United States Patent Application Publication US 2004/0034888 A1 - sequence listing, part 9

SEQ ID NO: 20268 - DNA, 651 bp, Zea mays
  Clone ID: LIB3180-016-D8_FLI
caaaaccggagctgcccccgtgccaaggcgagagcaactgcaagctgctcgtctcgtccaataatagccgcaggagcgcaagcgcgaccgaattcggtgcgttgctcttgtcgccatcgcatccgcctccgcctccatccccacctccccctccaatccccgcagaaaccaccggcgccgtcgaccgcaaccagcagtggttccgtcgccggcgcgggattgggccaccagccgcggttgtcgatcggccgaatgattgattgatcgatcgatcggtcggtccaccgcggcaaggccggggagggagccgtcgtcggtggttcctggcggttgcatgtatgcgggcggggagagccggcccaatggtgggggcggaggcggagacgcgctcaggcggcggaggcagcccggcccgtccgcgtctcccgctgcgtcgtcgtccggcaggggagcggaggaggaaggcggggaggagcgtgggcgaggccagaagcaaccgcggcgcaagaagcagcaggggaggcgcgaggcggtggccagggcgatccggggcgggctgccctcctgctggggcggcgtctcggtagctgaggaggccgcctccggcggctggaggaccggggggaggaggtggagccggcgggaggagag

SEQ ID NO: 20269 - DNA, 1095 bp, Zea mays
  Clone ID: LIB3180-016-F2_FLI
gctcacctcggtgcggcgcgtcgttcggacacggagatacagcggcgattccgacgatggagtacgtgaaccccctcaccggcttccgcgtcgacggccgccgccccaacgagatgcggcaactcaagggcgaggtcggcgtcgttgcgcgcgcagacgggtcggcgctgttcgagatgggcaacaccagagtcatcgccgccgtctacggcccgcgagaggttcagagcaaaggtcagcaagtaaacagcaaggaggctttggttcgttgtgagtacaggatggcagagtttagtacaggagatcggaggagaaaaccgaagggtgacaggcgatcaacagaaatttctcttgttattcgacagacaatggaggcaagcatattaacacatttaatgccacactcacagattgatatatatgtccaagttcttcaagctgatggtggaacaaggtcagcttgcataaatgctgcaacactagctcttgcagatgctggtattccaatgcgagacattgccacatcatgtagtgctggttatctgtgttctactcctttgctcgatctgaattacctcgaagacagtgctgggggttccgatgtcactgttggcattcttgcaaagatggacaaagtgactttgcttcagatggatgcaaaattaccaattgatacatttgaaaatgtaatgggacttgcaatagaagggtgcaaagcaattgcaacttatatccgagaggtgctattggagaatacaaagaagcttgagtgtcagcgtggttaaccttaggagtgcaggcaggttgatgacctgaacctacacagccattaaaaggcttactggttgtggttgtgggtggctggctctggtgcagtgcacaggaacttccaacggagtatgtgcaagtcgtcagaagttgttcaaggcagcttgtcatcatcaccagggatacaagacatgcttcctcagtaaggtgttatcggaatttttcagttcctgtaaactgataaatcgatggtggcactgtactgataatcttccgtatggtgttattggaatttgtgtgacagttccagcggggctcctgcctcct

SEQ ID NO: 20270 - DNA, 1112 bp, Zea mays
  Clone ID: LIB3180-017-A10_FLI
ttcctcaccctaccccctcgctgctttctcctccccgtcgacctcgccaatctccctcccgctaaccctagtccagcacccgagatctactccgcgcaaacagccatggcggagacgctcgacatgaccctcgacgacatcatcaagaacaacaagaagagtaactcctcatctcgcggggcccgccgcagccgcggcggatccgcccctggcggcgggaccggcggggtcgggccgaccaggcgcccctttaaaagggctgggaacaggcaggcgccctaccagccgccgaaggcccccgacgctgcgtggcagcacgacatgtaccctgcggtcgccgcaggaggcggcggcggcgggagggtctcggctctcgagacgggcgccaagctctacatctccaacctggactttggggtttcgaacgaggatattaaggagcttttctctgagctaggtgatttgaagcgtttttcgataaattatgatcgaagtgggaggtctaagggaacagctgaagttgtatttgcaaggcgttctgatgctgtagcggcggttaagaaatatgacaatgtccaacttgatggtaagcccatgaagatagagatagttggtaccaatactccagctgcagcagctgctcatccagtccctaatggtggtcatgctaggaatgctgcgaggagtgcaccaaaggatgctgctccagcaggtatgtcgcagcatagaccccatcagaggggcgggaggcgtgctgctggatctggtggtggtcgtcgtggcaaagagcgcagcaagccgaagtcgactgaagaactcgatgctgatttggagaagtatcatgctgatgcgatgcagaccaactaaatacattcacaaatttgatattcgacatcaaatatcaagtgcattagtccttccattacagctgtttgtgctaccatgttcaggggacaacaaacattttctttgtgttgggggggggggggtatcgctttactgagttttgtggattttatgtgtttacaatagaactagagttgggtgatgctgaatacttttatggaaattacttggttgcaagttgctcgacatgtgaaagttggttatgt

SEQ ID NO: 20271 - DNA, 1574 bp, Zea mays
  Clone ID: LIB3180-017-D8_FLI
cgtcttccccttcctcgccgcctccactacagggctttgctcctcccaactctcgaaaccctacccacccgatgagagatcgatcggtcgagcgcgaattccccagccgcgagcggggggatcggccgccgcccggggtgctggggcccccgcgccgcgggccggcgtacaagacgaagttgtgcgcgctgtggcagcgcggcggctgttcccgcgacacatgcagcttcgcgcacggacacgccgagctccgccggttccccggatcgcgcacctcgttcccaccccgcgccgggagaagagattatagagctggtgactttagagataggtttgataggaggcgctcacctcataggaggcattcccctgatggagattccaggggccatcgctcccttcgtgaccgacggccaaattcccaagaaagggaatctagctattcacggtctcccagtaggaagagtgaaatgaggcatgagaagaagcctgatgatggagaaactaactcatctaggagtctcagtgtctctgacaataatgatgatagaaaaaaggagacactgttaagtggtgatgataaagaggatcacgaaatacagctcaaacaaataagacaggacatggaacttttgcgtgatgataaatctctcttggagataattttggatgagaagaatgctgaagtgcgcaagatttctagcagattaaatgatcttgatctgcagctaaggaaggagaaagaggaatgccacaggatgacctcaaaaattaaaaagttccttaaagcccatgctcgctttttgaaagcacaggaagaattgaaaaggtcacaagctcgttttgagagactcggtgatttacttgcttcagatattctgaaacgtggtgctaatgaagaagtttctagtatcaatgttgatgaagatccaaatgttccttatgaaaggagcccaaatgctgctatagctaagaagagatcaataccatactcaacaagtgaagaagcgaaagccgtgaagaaaagaagagagcgggactctgacacaactaggccagataaatataggtttgaaggtactattgcaggatttgaaaaactaagcaagggaaccgagccaacaaaatctttatatttgaagaagaaactgtgggaagatgaaaaggataagataggcaactttgtctcctcagccaacaccgacaaggtcaaagaatctccggtcaaacatgttttgccctccactggtatggctgctcatgctttagacgatctgtttgaagctgttgaactggaggatagacgtgacacatcaatagaaaatgatgctgatgacgaaactaggtcgcctgttatgcccccacaaccaccaccggtggttaatacttacgagcagtacgaggctgatgatgaggaagtcgacgtggaataagtagaatgccgagatggtactggaatgagctatatagctctcgcgcctgtgtaaagcattatgtaatatgtatttgatgctggagtttaccttgcatacaaagaatcgtcattaatgatccttggtggatgcggtttaagc

SEQ ID NO: 20272 - DNA, 1951 bp, Zea mays
  Clone ID: LIB3180-017-E1_FLI
ctcgcacccgtaagtggcgacgaatctcgcggtgcggaggcgcgacagaggcggtgtcgactccgacggactcgcagccaccggtggagacgccccaccggcgcactcctccaacgttcatagtttaagggcttgatttggataattagtcatcaacagaagtgataaaaaatggtggttcttgcagcatcaatcgtttcaaagtcgggaaaagcacttgtttcaagacagtttgttgacatgtctcgcataagaattgaaggattacttgctgcgttcccgaaactggttggaactgggaagcagcacacttatgtcgaaactgaaaatgtgcgatatgtttatcaacctattgaaggtttatatcttctacttatcacaaacaagcagagcaatattcttgaagatctggacactttgaggctcctctccaagctcgtgcctgaatactccccttcattggatgaggagggtatttgtaaaacagcatttgagattatatttgctttcgatgaagccatatctcttgggaacaaggaagatgtaacagtgcaacaagtcaaacaatattgtgagatggagagccatgaagagaaggcacacaagctgatgatgcaaaccaaaatcaatgaaaccaaggatctcatgaagaagagggctaatgagcttgacaaaatgaggatggaaagaggcaaacttgacaaaggaggatactcatcaatatctggtccacgcgtgattgaaaaaactttcagtgacatgagcatcagtggttctggattaggtggactgagcactgacatggactcatttgctagcaagcccaaaggccgtccatctacagcagctactgcacctggtaaaggttttggtatgaaattaggcaagacacagaagacaaatcaattccttgaatctttgaaagctgaaggagaagtcattttggaggatgtacaaccaagtgcagtttctacaaggtcatctgctcttccaccaagtgaccctgtcacagtaactatagaagagaagctcaatgttgttgttaaaagagatggtggtattaataactttgatgttcaaggaacacttgctcttcaggttctcaatgatactgatgggttcatccaattgcagattgaaagccaagatattcctgggcttagcttcaaaacacacccaaatatcaacaaggatttgtttaacagtcagcaaattttgggagcaaaagatccaaacaggccttttccgagtggtcaaaatgaaactcctctggtgaaatggagaatccaggggatggatgagtcatctttacctctgtcagtcaattgctggccgtctgtatctggaaatgaaacctatgtgaacattgaatatgaagcttctgagatgtttgatctgcacaatgttgtcatatctatacctctgcctgcagttcgggaggctccaagtgtcagacagatagatggagagtggaagttggactcaagaaactctgtgttggaatggtctattctccttattgatcagtcgaatcgcagtggttccatggaatttgttgttcccccagctgatccgtcatcatttttccccatctctgttggattttctgcatcgagtactttcagtgatctgaaggttactggaatccttcctctgaaggaaggcaaccctccgaagttttcccagcgggctcgtttgctcacagctaactatcaagttgtttaatggttgtaccgttgtccgagtgttgatccacttaaatatattcgaatagcatatttttgtgacatggtatgctactggcatgaacttttgcaagtcatgggatggaagatcattttgggttttgaaaatctttactatgtgcttctcattgttagcatgttgcacaaatgttctgatgtgttgctaccagagaaataagtaatgttcttgcctttcgtttgcctgc

SEQ ID NO: 20273 - DNA, 1987 bp, Zea mays
  Clone ID: LIB3180-017-E8_FLI
tatacctctgtatgtgagtgaggccaatgagagccctcgtagtcgtaagtttcgcttcggcgtgcttgctgctgctgttgcagctcgcaggagcgtcgcatgtcgtctacaactacaaggacctcgaagccgaggctgctgcggcgacggaccaggtgccgccgtccatcgtcaaccccctgctcaggacggggtaccacttccagccccccaagaactggatcaatgatcccaacgcgcccatgtactacaaggggtggtaccatttcttctaccaatacaatcccaagggcgccgtatggggcaacatcgtgtgggcgcactcggtgtcgcgagacctcatcaactgggtggcgctagagccggcgctcagaccaagcatcccgggcgacaggtacggctgctggtccgggtcggcgacggtgctgcccgacggcggcggcccggtgatcatgtacacgggcgtggaccacccggacatcaactaccaggtccagaacgtggcgtacccgaagaacgtgtcggacccgctgctccgggagtgggtgaagccctcgcacaaccccgtcatcgtccccgagggcggcatcaacgcgacgcagttccgcgacccgaccacggcctggcgcggccccggccccgagcagtggcggctgctcgtcggcagcgcggcggggtcgtcgccccgcggcgtggcgtacgtgtaccgcagccgcgacttccggcggtggaggcgggtgcggcggccgctgcactcggcgcccacggggatgtgggagtgccccgacttctacccggtgagcaagggcggcgcgccgcgcgcggggctcgagacgtccgtgccgcccggcccaagggtgaagcacgtgctcaagaacagcctcgacctccggcggtacgactactacaccgtgggcacgtaccacccgtgggccgagcggtacgtgccggacgaccccgccggcgacgagcaccgcctgcgctacgactacggcaacttctacgcgtccaagacgttctacgacccggccaagcggcgccgcatcctgtggggctgggctaacgagtccgacaccgccgccgacgatgtggccaaaggctgggctggaatccaggccattccaaggacggtgtggctggaccccagcgggaagcagctgttgcagtggcctatcgaggaggtggaggcgctgagagcaaagtcggtcactctcaagaacagggtaatcaaggcaggacatcacgtcgaggtgaccgggatacagacggcacaggctgacgtggaggtgagcttcgaggtgtcgccggcggccctggccggtgccgagacgctggacccggcgctggcctacgacgcggagaagctgtgcggcgtgaagcgcgcggacgtgaggggcggcgtggggccgttcgggctgtgggtgctggcctccgccaaccgcaaggagagaaccgccgtgttcttcagggtgttcaagcccgccgccggcagcgacaagcccgtggtgctcatgtgcaccgaccctaccaagtcgtccctgaacccgaacctgtaccgcccgacatttgcaggatttgtcgacacggacatctcgaacggcaagatatccctgagaagcctgatcgaccggtcggtcgttgagagcttcggagccgggggcaagacctgcatcctctccagggtctacccgtcgctggccatcggcaaggacgctcgcctctacgtgttcaacaacgggagggcgcacgtcaaggtgtcccgtctcaccgcgtgggagatgaagaagccggtcatgaacggggcctgaagatcttgaataaatatatcacccatgcatgacatagtggcgcctgaggaatctttcctttttttaaaaaacatattttagatgtcgtttattaagagttgattgtccatactaaagggcgccccgttatatgttacaatggtaccagctgcacttctagtaacaaagacaaattgact

SEQ ID NO: 20274 - DNA, 679 bp, Zea mays
  Clone ID: LIB3180-017-F9_FLI
ttgaatgggggcttaggtcatggactaaggaatatgagcttggacagtgttagttctggcaggtcgtttgggcatgcaaaccatcaacaaagttttgtttctaatcctatagagttggctgccaatggttggggtggcacatggagttctggaggtacatcatcttcccgtcctgtggtgtcatcatttggggcgtttagagggtggagttcatccgagtcgtcccctgcattgcctcattctgattggagagccaatggggcagcaccttatgactacacctcagtagactggagcctggacacaacgttattgaacccagcagcaaagagcgagcggctgtcggacacatggtcaaccatgttcatgggtggcagatcaacaaggacacctgggaacctcagtggcgcaggcatagctgggttgcatgacagtaaccatccaatggatcctgctccatcacctcgtccatatgagtggcctactttctgcaggggaggatcttcctagttccccctaccatgtaggtaagaggacattgaataaaaaaagtaaaagctgccatttgtttcttttcttgttttggtctcaggtgcagttggttgaaaaagttttactttgtgtatcgaactgagcttgtgtaccttgactgttggctgagataagtcatctttctgtg

SEQ ID NO: 20275 - DNA, 1629 bp, Zea mays
  Clone ID: LIB3180-018-A11_FLI
gcctcgtcctccccctttcccctccgagtccagcccggcgccacccactcagccgcggatccgaggcgcagatccgatccggcgatggcgtccacggcggcgaggcggctgcgggagctgcaggcgcagacggggaacaagacctgcgtggactgcgcgcagcggaacccgcagtgggcgagcgtctcctatggggtgttcatgtgcctcgagtgctcgggcaagcaccggggcctcggcgtgcacatcagcttcgtgcgctcggtcaccatggactcctggaccgaggcgcagctccgcaagatggaggccggtggcaacgaccgactcaacgccttcctcacagctcgcggcgttcctaaggagacgccccacgtcgccaagtacaactccaacgccgcagccgcctaccgcgaccgcatcgccgcgctcgctgagggaaagccgtggactgacccgcccgtggtcaaggagacgcccggatctggcgcccccgcccccgctaggaagccgcccgtgcacacatctgccgcctccggcggcggcgggtgggacgactgggacgacgattttcggccggacatgaggcggaatcagtcggttggatcgttcgccgccgcgggtgcgcagtcagggaggcagccgccgaggtccaaatcaacacaggacatgtacacgaggcagcaactggaggcgtcggcggctaataaggaggactttttcgccaggaggatggcggagaacgagtccaagcctgacgggatcccgccatcccagggcggcaagtacgttgggttcggatccagcccaccgccgtcggctaacaggaacggcggtgctgcccagggcgatgtcatgcaggttgtctctcagggatttggacgcctttcattagttgcagcatctgctgcccagtctgctgccagtgctgtccaagttggcacaaaagaaatccaatcaaagatgagggatgggggctatgaccagaaggtgaatgaaactgtcagtgttgttgccaataaaactgcagagattggaagcaggacttgggggatcatgagaggagttatggcgctggcctcacaaaaggtagaggaatatgccaaggaaggaggagtgggtggctggggagaggattggcaacacagcgagcagaaaagtgagccttaccaaaggtttgagcatgagaccaacggcaacagttggaattcctcccaaaattcttcatcgaagaacaattccagttcttgggacgactgggacgacccaggcaagaaagatgagcctgcgaaaccgcaccagagcagtgactcctgggctggctgggatgatgggaaggatgatggttttgatagccctagttacaacaatcacagcacctccaacaaggggagcaaccaaaacgggacatccggtggcacattttggacagaaggcggcttccgctgaaaccagtctcttttccatagagctatactttcagagttgttacatgccaggaaacgtgagggtccagtggttggtattatttgggatacttaaacagtcgggtgaaagggtttgtgtgttttgtaccatgtctacaactgttattatatctagtgagatatatttctgtggtcagatgcc

SEQ ID NO: 20276 - DNA, 1555 bp, Zea mays
  Clone ID: LIB3180-018-A2_FLI
ggcagaggcttctagatctactgccagctcggcagcaacaaagccgaagcgtctcgcgtgcgcggccgccaccggggattagggatggcggcgaagaaggtgctcatgctctgcggcgactacatggaggactacgaggtcatggtcccgttccaagcgctgcaagcgtatggggtgtccgtggacgccgtctgccctagcaagaaggccggcgacatctgccgcaccgccgtccatcagctgaccggtcaccagacatactctgagacaaaaggccataatttcacactgaatgcttcatttgatgagattactgctagtgaatatgatggattggtaattcctggagggcgtgcaccagaataccttgcgatggatgaaaaggtgcttgacctagtcagaatgttctctggtgctaagaagcctattgcatcagtttgtcatggacagttgattttagcggcagcaagagtagtcgagaaccgtacctgcacagcatttccggctgttaaaccagttttggttgctgctggtgccaagtgggaagagcctgacacaatggcaaaatgcactgttgatggcaatctcatcacagcagcgacttataattctcatcccgaattcatcagcctatttgtcaaagcactcggaggttcagtggcaggctcagataagagaatactgttcctatgtggggactacatggaggattatgaggtcatggtcccattccaggctctccaagctcttggctgccatgtcgatgccgtttgccccgacaagggagctggggagacgtgcccgacagccattcatgatttcgaaggtgaccagacctacagcgagaagcctggccacgattttactctgacagcgtcgtttggaagtgtggatgcttcgagctacgacgcgcttgtggttcctggcggacgggctccagagtacctggctctgaacgataaggtcatcagcttggtgaaggccttcgcggagagcggaaagccaatcgcgtcgatctgccacggccagcagatattatccgctgccggagtcctcaaggggaagaagtgcaccgcatacccagccgtgaagctgaacgtgttgctcggtggcgggacctggctggagcctgacccgatccaccgctgcttcaccgatggcaaccttgtgaccggcgcagcctggccaggccacccagagttggtgtcccagctcatggcgttgctcggcgtcaaggtttccttctgaagtccaaactgaaagggcaaggcagaaagagctctggctcaacctggggaggggcgtgatagcatagctttggatttccagatagaagagaacagactcaaaacgacaccttatagcgatcgctgcacttaatccttgttccatgcgcagcaagcctcaggcttattacccttgtttgtcagcgttgtgtaaaaactgtaacccggatgctgtttcttcttcttcttcttggttccttcttttttctgagtcgtcctttgtggattcaaataataaataaagtcttgtatactgctgtttgttgatc

SEQ ID NO: 20277 - DNA, 1086 bp, Zea mays
  Clone ID: LIB3180-018-D5_FLI
ctctcccttcgccttcatcttcccggcctctctgtcggccctaactttccatcggcgcttgcagtagcaggaggtgcgctcgtgccgccgtagccggaggcgcggtgccttacggggctgctccccggcgtgggatttggtcgatcagggatgacttggtggtgccgaggtctccctactttccagtggattccgcggcggggcaagagcgtgggccgtcgcccatggtgatggagcggttccagagcgtcgtcagtcagctttttcagcacaggattatccggtgcggtggtcctgttgaggatgatatggccaacatcattgtagcacagctgctctacctggacgctattgatcccactaaggatatcattatgtatgtgaattcaccaggagggtcagtgacagctggtaatagctcatttagaacatagtatgtttgctttagctgcttcgattaaattctaatgcattttcgttttctgttaggaatggctatatttgatacaatgaagcacatcaggcctgatgtatccactgtttgtatcggactagctgctagtatgggagcttttctacttagtgctgggaccaaaggaaagcgatacagcttaccaaactcgagaataatgatccatcaacctcttggaggagcccaaggacaggagactgatcttgagattcaggccaatgagatgctgcaccacaaggctaacttaaatggatatcttgcataccacactgggcagcccctggataagatcaatgtagatactgaccgcgactactttatgagcgcaaaagaagcaaaggagtatggccttattgatggagtaatcatgaatcccctcaaggcccttcaaccacttccagcttccagttagtcatgaagtgggctagaactatcaaacatttttgtttgttgtatcaatgtgtctgttggagctgagtttgggccgcggtgtttctagtagcctggccacataatattctacatccagagccgtcaaagattgtaaaaaaacaagaactacgattaggatatccatccttggcgatggacattcgaattgaattaacagtatt

SEQ ID NO: 20278 - DNA, 708 bp, Zea mays
  Clone ID: LIB3180-018-H8_FLI
caaaaagagatgcttcagactgtatgggaaagaaggctacccactggtagatatcatgattcgcgaaagtgaaccatcgcctaaggcaggagaaagaatcctctgccgccatccattcattgaatcaaagagagcatatgttgtcccccagcatgttgaggagcttctacagtgctattggcctgggacatcagataaacctagagcagagctgccctccttggagaagatcagaagccgctgcatgcagcagcttgaaatgctgcgcccggatcacatccggcggctaaatccaacgccctacaaggtgagcgtgagcaccaagctgtacgatttcatccaccgcctatggctgaacgaggcgccagtaggtgaactgcagtagatgatgatcatataaaagaagttttgggtcatctgcgatacagcagcaattcatcgaagaaaattagagctcttctgcacaacatcaacagttgagcccatggcaggattttgctccccaacttttcatctctagtcaccggtatagaggcaggttaatcaggttgtctagtttatacgtcccttaattggtgggatgctatacacatcatcatcagaaaagaaccgaaatcatatggagccaaaaatgttactaggtcgtccggtgtttgtgctcgacggtgtcacatttgtttttctagccgatcgtgcatatggtcatat

SEQ ID NO: 20279 - DNA, 2246 bp, Zea mays
  Clone ID: LIB3180-018-H9_FLI
caccgccaaaagccctgggtagggtgactgggtgtctgggtctctacgcctccctcgtcatgctgcgccgcctccgtctgcgctcgccggtgtgcgctgtcgccggcgcggccgctgcaatggcgtcgctcaccaacgtcgcctacgccgatggcctcttccgccgccagtccccgccgtcgaatccaggcgacgaggacaatttgggagcctccgcgttcggccgcgacccggagaccctggagcgcatggctcgagcgctgcgggagatcaacaactcaccgctcgccaagcaggtgtttggactgatgcggaagcaggaggaaacacgccttactgagctggaggccgagaaggtccaatacgccatctacgagaagctcagggacatggaaaggatggagaaaaaagctgaagattacagaaatagtttgcaacaagaagcacaagtaaaagctcaagcattacgctttgaggatgaattagctagaaaaagaatgcagacagagcatgctgcacagaggcaacaggatgctgaacttgtgaagatgcaagaggcatctgccctcagaagagaagaagctaggcgtgcaacagaacagaagattttggaagaaatgatacggactgagaaggaaaaggctgaaatagatcaggaagtaaacagagctaaagctttagcagaagcagaagctcgtgttcatgaagagaagcaatcagaagaagttacaaaaagaatgatgttggaacgtatgaagggtgaaaaggaaaagtggctcgctgcaataaatacaaccttttcacacattgaaggtggattcaaagcactgttaactgataggagcaaactaataatgggtattggaggagttactgcactggccgctggagtctatactactagggaaggtgcgagggttacatggagttacatcaataggatcttgggtcagccttcactgatccgtgaatcatcaatgccaaagttcccactaccaatgtctaggttactcaaaccaagctcagcatctttgtcggggggagcaggctttgagaatgtgattctgcacccttcactcaagcggaggattgaacatcttgcacgagcaactgcaaatacaaagtctcatggtgcaccattccgcaacatgctgttttatggtcctcctggaactggcaaaactttagtagccagggagatggctcgcaaatctggcctggattatgccatgatgacgggaggagatgttgcacccttaggatcagaggctgttaccaagatccatcaaatatttgactgggctaagaagtccaagaaaggcatgctggttttcattgatgaagctgatgcattcttgtgcgagcgtaacagtacccatatgagcgaagctcagcggagtgctctcaatgcattgttgtttcgaactggcgaccagtccagggatattgtccttgtcctggcaacaaacagaccgggtgaccttgatgctgctatcactgaccgcattgatgaagtcatagagttccccttgcccggggaggaggagaggtttcaactgctcaagctatacttgcaccaatatatactcaaggaagagggcaaaggatcttggggtgcattattcaagaagcagcagcggaagattcaggtgaatggcataagcgacgatttgctcagggaagctgcaaggaggatcgatggcttctctggcagggagattgcaaagcttgtggctagcgtgcaagctgctgtttatggccggcctggctgcacattggatccccagttattttcggaggtagttgactacaaagttactgagcatcaccaacgcatcatgcttgcttctgagggtatggcttgatcaataagaaatattttacctggaagccacaggtttcaagctatcaaagatcgggtttggtgatgagcgacaaaactgacaatcacctcccactgacttgtagtcatgttttggatcccgtgggactttttgtaggcggaggttctatttccagaatttttgttccatgtgccttgcctgaagcaaggtctggtcccggatggacatccaaataggctggttgtggtcaactgagtttagtttaactcatttagtaggtttgcgctgtgttttaacttttccttaagtctctcgtgccccattcttggtagcatctgtacgcttgtttatgccaaagaaaaggatcaaattatttaggtgataattctttgtccatttttt

SEQ ID NO: 20280 - DNA, 954 bp, Zea mays
  Clone ID: LIB3180-019-G12_FLI
ctgccacgcgcgccccggatcgagggagggcacgcagacgcggaggagggaggatgagtctcttcgggcttggacggaaccagaagacattccgccccaagaagagcgctccatcaggcagcaagggagcacagctccgtaagcacatagatgccactctcggcagtggaaaccttagggaagctgtgaggttgcctcctggagaggatatcaatgaatggcttgctgtcaataccgtggatttctttaaccaagttaatatgctgtatggcacgctcacagaattctgcacacctgagagctgcccgacaatgacagctggcccaaagtatgagtacagatgggctgatggtgtgcagataaagaaacccatagaggtatcagcaccaaaatatatggagtatctgatggattggattgaaggccagcttgacgatgaatccatatttcctcaaaaacttggcacaccattcccaccaaacttcaaggaagtagtgaagacaatattcaagcgcttgtttcgtgtttatgcccacatctaccactctcatttccagaagattgttagccttaaagaggaggcccatctcaatacctgtttcaagcacttcattctgtttacaaatgagtttggcctgattgacaagaaggagctggctccactccaggagctcattgaatccatcatcgttccttactgagactacggtgtagtaaacgtggatatagagctctcagtgcagatggctgtgaagtgtccatccgtgacagaacttcactgcatagagctatatgtgcatgtacctgtgtgtttctaaatgatcatgtattggccatgtaagtgtgcctgttatcagttatagaagggtgatgatgatcatgtactgcaaaaagagaaagcacaagaatgtgttggattgatgtatgcagtgtttattttcctcctggttgtgg

SEQ ID NO: 20281 - DNA, 2517 bp, Zea mays
  Clone ID: LIB3180-020-B11_FLI
attatccttcctcccgtgcctacagtcctacacctcgacgatgccaaaaccctagcgcagcagcgcgaactacacctctccccgtcctgttcctcgtggcgcggtagccatggcggagccggccatcctcgacccctcccccttcgatctccgccactatccggcgcacctcttcgacccggacatccccctcgccgccgccgacttcccactcggtgaattcgccggagacgacggctgtgatggcctagacttcgacgtgcccgtagatttctctatcgacgacttcctcctccggtctcctgaccgcgggcacgacggcgacgactccggcgagggctctgctgccggatccggccccaccgcatcttccttggcctccccggccacctccggcactaactccgccgtggccaacgtcggcaaccgcaaggtgaagcacgaggactcggacgagggaaggagcggcgccaccccgaattggagcctcaagcggaagcaggtgagtcccggagaagcaacctcggatggggccaagtgccgccgatccggcgatggggatgtttcgccatctgcatcggcgtcgcgtgcagccacggaggactccgatgagaggggcgtgggcggcgaggaagaggacaagcgccggactgcgcgcctgatgcggaaccgtgagagcgcgcagctctctcggcagaggaagaagcggtacgtggaggagctggaagagaaggtgaaatcgatgcactcggtgataaatgacctcagttgtaagatctccttcatcgctgcggagaacgccacactgaggcagcaactcggtggtgtgggggtgagtggaccaccacctggggtgtatccaccgccaccgccaggcattcatttcccttgggtttctgggtatgcaatgcggcctcatggctcccatgttccacttgttccaatcccgcgattgaagccgcagcatgcagcagctgcagtgaaggtatccaagaaaccagatgtcaagaagtctgtggagagcaagagtaagaccaagaccaagaccaagaccaagaaggtggcaagtattagccttcttggtttgctgtttgttgcatttgtctttggcgcttttgttccggggttcaatcatagtctcggactgagaggaaggagcgacaatgtgatgtttggaaattttggccagtctgatgctagggtgtttagtgtcactaaccatggtaaaggacctaaaggcagtttcaacagtagtgacatgatcagtactgatcatgacatgatgactgggcatgatgatggagcggggcagaaacaccgagctgcaaataactctagtgagatcttgcctgctttgttgtatgtgccgaggaatggaaaacatgttatgatcaatggcaatttgattattcattctgtgatggctagtgagaaagcagtggcacataagggctcaaatagtcagtcagttaaagatcacaaggagaccagtgttgctatagctcgctatctgtcaccacctggaaaggatatgaattcaaaagagatgttcccgccagatgcaccactgccacaatggttccgtgaaggaatggaaggacctgttttgaactcgggaatgtgcagtgaggtatttcagtttgatatttctccagcttcggccaaatctggtggcattatacctgcttcggccaaatctgcctcaagtgtcaatgctacccagaaaattctgaaaccttctcctgcttataggggcaagctgaaaaacaggaggatcatgtataacgaggcaattccacttactggaaaaacagcgaacaacacaaagcctcaggcttttaacagtactgctgaaagcagcaaggtacctgatactgatagcaagcctgcatcatcagttatcgtctctgtgctagctgatcccagggaggctggcaatggggatggtgatccaagagtatcaccaaaacccctctccaggatatttgtcgtcgttctgctcgatggtgtcagatacgtgacttactcgtgcacacttcctttcaagagtgccagcccacaccttgtgaactaaccttggggccggtgcagctttctggtccatgagcggctaaatagttggggttttctgatgcattggaggtagatgaatgaatacagtaatgtggtgttgcttgctaacaatgaaaacagacttcaagactcgcactcggcctgaggtaatttgagtttgtcgaaggtttgtagtgtggactggcgaaatgttgtgcaagttcaaccttaacccatgaggtttgtgcttctatgtagtcgagttattatactcacctctttctctggtactctttattgcggagctggaaaatataacagctgatgagagaagacaatatttggaaaataactttgtactagtatatattatatatatagtgtactatatatagggatgtaatatggttcggaaaatatccgtccggatccggattctaagatggtgaacactggttcggatgg

SEQ ID NO: 20282 - DNA, 1222 bp, Zea mays
  Clone ID: LIB3180-020-B12_FLI
ctcccgttgcggccgcccatcaccaacggaagtcggcagagtgagccaaggccttgtgtgtgtgtgtgtgccacattacctactgtcagtctgtcaccgagatcgaaatggcgcggtgccctgctgctcatgccgctctctgctcccttgctctgctcctcctgcttccagctgcgcgggcggcgacgttcaccatgaccaacaactgcggctacacggtgtggccggggctgctgtcgggcgccggcacggcgccgctgcccacgacggggttcgcgctggcgcacggcgcgtcggcggcggtggacgcgcccgcgggctggtcgggccgcatgtgggcgcgcacgctctgcgccgcggacgccgccaccggcaggttctcctgcgccacgggcgactgcggctcgggagccgtccagtgcaacggcggcggcgccgccccgcccgccacgctggcggagttcacgctcggcggatccggcggcctggacttcttcgacgtcagccttgtggacggctacaacgtcccgatgctcatcgtccccgcgcagggcgcgggtggtgccggtggtggcagcagcagcagcagcaacgggtccgcgggcggctcgagcaagtgcatggccaccggctgcctcgtggatctcaacggcgcgtgcccagctgatctgagggtaatggctgcttcggcgtccgcgtccgcgtccggcgccggcggggctgtggcgtgccgcagcgcgtgcgaggcgttcgggtcgccgcagtactgctgcagtggagcctacggaaaccccaacacgtgccgcccgtcaacctactcgcagttcttcaagaacgcttgcccgcgcgcctacagctacgcctacgacgactctacctccaccttcacgtgcgccaccggcatcagctacgccatcacattctgcccgagcaccaccaggtaaattctttcccaaaatggaggtttcccttatcatacaagctccaaaggttagtgtttacctgaaatggcaccaaattattgaggtggctgaatgcctatttcggatggcaaattggatagcttgagacaagaggctgagacatcacacagacagtccacaccactaagggtctgttcggttccagtggattgagcacccggaataatttctagctagattgtttatctaatttatataagagttgatgagctgtaatgattcttggccaaatccggcat

SEQ ID NO: 20283 - DNA, 1087 bp, Zea mays
  Clone ID: LIB3180-020-D3_FLI
agaaggccaagaagcctgcgccccccgcgccagctgcctcttctgacgacaacgatggcgacgccgactacgaggaaggtggcgagctagcggagccgcagggcggcgccgtcaggaggtgcacgcattgccagatcgagaagacgccgcagtggcgcgcggggccgctggggcccaagacgctctgcaacgcctgcggcgtgcgctacaagtccggtcgtctgttcccggagtaccgccccgcggcgagccccaccttcgtgccgtccatccactccaactcgcacaagagggtggtggagatgcgccagaaggctgtccggagcggcgacccgtcgtgcgaccttctccatttcatccgccgccgggattgacgtcccggcatggcgtcgccggactgtcggtcggtctcgtcccccatatagctatatatgtatgcatgcatggttgcttcatcagtcgtcgtcgcccatcatggtcatcatcaccgcttcaccggtcaccgccatggatcgtctcccgcccatcatcacatgcattggtttgtgtcagcatccatccaatcccaatccatcgccgggcgtcccgacgttgttagttcattaggtcttttttttcctcatcgggggctagtgttattttacctttgatccttttgtctattggttaattggttccccctggatgttttttgtttgtatagagagtgaaaaagagagaagaaatagatgagtcagagtggttgctgcattgcaattgcagttgcttgcaagctaggtaggtgagaaggagagctaaaccagcagcagagggagacagatttagagaggaaactttgcagctagtcagtcagtcacttagaaaaaaaaacaaggagagtgcttgaagcaggtgaaagggcaatttgttggtttgctaattagaagagaggttctgtcaggtcaggtcaggtagttgctatcattattcatgaggattttcaaacttaatagggggacagccatcatccatcatagtttgtatttggaacttggtatactgaactctgaaaattctttttgcagttcatctatgcttagggattgat

SEQ ID NO: 20284 - DNA, 905 bp, Zea mays
  Clone ID: LIB3180-020-E12_FLI
caaccagaagagcggcggcgcgggcggacaaggagcaggcggaggaggagttgtgccaagccacaatgggtatctcgcgtgactcgatgcacaagcgccgagccaccggtggaaagcagaaggcctggaggaagaagcgaaagtatgagcttggtcgccagccagccaacaccaagttgtcaagcaataagacagtgaggagggtccgtgttcgtggaggtaatgtgaaatggagggctcttcgccttgatactggtaactactcatggggaagtgaagctgttacccgcaagacccgtatcctcgacgtggtctacaatgcatcaaacaatgagcttgtgaggacacaaacccttgtgaagagtgccattgtgcaagttgatgctgccccattcaagcagtggtacctcactcactatggagttgacattggtaggaagaagaaaacccctgctgcaaagaaggataatgctgagggacaagaggttgaggcagcagctgaggaaacgaaaaagagcaaccatgtcacgaggaagcttgagaagcgcaaggagggacgtacccttgacccacacattgaggagcaatttggcagtggacggttgctggcatgcatttcttcccgccctggacagtgtggccgagctgatgggtacatccttgagggtaaagagcttgagttctacatgaagaagctacagaggaagaagggcaagagcgctgtagcttagagcattctcatggattgtcttgcaccgaaatgtgtgtcctgatgagtacactttttttggttagtcgtctcaagttcagagcgttatgccatgttttcagtcctgattagtacactgttttctaaaagcgattgagctctagtccaatgtattgataatttctgctgttgtcct

SEQ ID NO: 20285 - DNA, 1235 bp, Zea mays
  Clone ID: LIB3180-020-H10_FLI
catctgtttagccaagctgtggccaacctctgcgaggaatggagatggagtcgactcctctcttgacaccatacaagatgggcgatttcaacctggcacacagggttgtgctggcgccgctgacgaggtgccgggcgttcgggaacgtgccgcagccggagcacatggctctctactaccgccagcgggcgacgcccggcggcttcctcatcgccgaggcctgcgccgtgtcggagagcgcgcgcgggtacccggacgttccggggctgtggacccaccaacaggtcgtggcctggaagccgatcgtcgacgccgtccacgccagcggtgccgtcttcttcgcccagctctggcacaccggccgggcctccccctcagaattccaaccaaatgggcaggcaccgatctctagcacggacaagcaaatcccagcacaggtgaaccattccggtgacgtcaacacgttcgcggtgcctcggagactagagacagaggagataccacacgtcgtcaatgacttccgggttgccgccagaaacgccatcaaagcaggctttgatggagtggagatccacgcggcaaacgggtacctgttcgatcagttcatgaaggacagcaccaatgaccgagacgactcctacgggggcagcttggagaaccggtgccgtttcacagccgaggtgatggcagccgtcgcggacgaggtcggtgccaaccgcctcggtgtgcgcctctctccgttcgcggattatatggactgccacgactccaacccagaggcgctcgcgcttcatgtcatcgacgagacgctgaacccgctcggcgtgctttactgccacatggtagagccaaggatgcgggtgaacccagacgacggtattatgactctcgagcacatgctgctaccgttcaggagggcgtttcgcgggacgttcattgctaatggaggctacgaccgtgaggaaggcaatgacgccattgcccgtggccgtggctatgcagatctcatcgcatacggccggatattccttgccaacccggaccttccgatgcgttttgccaagaatgccccgctgaacaagtatgataggagcaccttctatacctctgatccggtggttgggtacacagattatccatttctcgatcaactctaggatgattggcttataaacaatttccccacctggagtactatcttgaccttaaaataaaatgagtgtcactataatatt

SEQ ID NO: 20286 - DNA, 814 bp, Zea mays
  Clone ID: LIB3180-021-C8_FLI
gcaccacaagcgagcgagggacccggggcggaagaagagagagaagacgtctctctcctctcggcgtccccgttccccaacctctcgtctgctgcctgcctgcctgcctgcctgcaaaaaggagtttgtcatggcgtctaagcgcatcctcaaggagctgaaggacctgcagaaagacccccccacatcatgcagtgcaggtcctgctggtgaggacatgtttcattggcaagcaacaattatgggaccacctgacagtccctatgctggtggtgttttcttagtgaacattcatttcccgccagattaccccttcaaacctccaaaggtttctttcaagacaaaggtcttccatcctaatatcaacagcaatggaagtatatgccttgacattctcaaagagcagtggagccctgctttgacaatttctaaggtcctgctctccatctgctccctgctgaccgaccccaacccggacgaccctcttgtcccggagattgcccacatgtacaagacggaccggccgaagtacgagtcgacggcccgcagctggacgcagaagtacgcgatgggctgacgaacgctttcctgctcgtctgggcgccattgttcccttggatttgttgttggtcgtatgtatccctgatccatctaggatcatcgtattgtattgtagtgtatgtatgtcgtcggcctaccatcgttgccatccaccatagtgaggtggttggacatgcttcgcctatatgcacctgtgcttgccttccttcgggtcggtgctgtttggttaatgttcatcgaagacgttgatttc

SEQ ID NO: 20287 - DNA, 867 bp, Zea mays
  Clone ID: LIB3180-021-D1_FLI
ctgggtcttcagaccattagctttatctactccagagcgcagaagaacccgatcgacaccatgagggtgttgctcgttgccctcgctctcctggctctcgctgcgagcgccacctccacgcatacaagcggcggctgcggctgccagccaccgccgccggttcatctaccgccgccggtgcatctgccacctccggttcacctgccacctccggtgcatctcccaccgccggtccacctgccgccgccggtccacctgccaccgccggtccatgtgccgccgccggttcatctgccgccgccaccatgccactaccctactcaaccgccccggcctcagcctcatccccagccacacccatgcccgtgccaacagccgcatccaagcccgtgccagctgcagggaacctgcggcgttggcagcaccccgatcctgggccagtgcgtcgagtttctgaggcatcagtgcagcccgacggcgacgccctactgctcgcctcagtgccagtcgttgcggcagcagtgttgccagcagctcaggcaggtggagccgcagcaccggtaccaggcgatcttcggcttggtcctccagtccatcctgcagcagcagccgcaaagcggccaggtcgcggggctgttggcggcgcagatagcgcagcaactgacggcgatgtgcggcctgcagcagccgactccatgcccctacgctgctgccggcggtgtcccccactgaagaaactatgtgctgtagtatagccgctggctagctagctagttgagtcatttagcggcgatgattgagtaataatgtgtcacgcatcaccatgggtggcagtgtcagtgtgagcaatgacctgaatgaacaatt

SEQ ID NO: 20288 - DNA, 2172 bp, Zea mays
  Clone ID: LIB3180-021-F12_FLI
gtccagttctcaacccggctgtgctgtctcgtcgccttcctcccctcctgccggctgctgccgccgccagccgctgcaggcacgcttgccctctgctccctgtccatccactcatcattccccgtcatccaccaattcacaacccaaaaccctaaacccatttacctcaacgccaccgccgccgccgcgatgcagtccatggcgcccacctctccctcactcccggtggcaggccccgttccccgccgccgcctccagcgcgtccgcgccgccgcggtctccgacgagcccaaactcaacaagtacagcgcgcgcatcacggagcccaagtcgcagggcgcctcgcaggccgtgctctacggggttggcctcaccgacgccgacctccgcaagccgcaggtcggcgtctcttcggtgtggtacgaagggaacacctgcaacatgcacctgctccgcctcgccgaggccgtccgcgacggcgtccgtgaggccggcatggtcggcttccgattcaacaccgtcggtgtcagcgacgccatctccatgggcacccggggcatgtgctacagcctccagtcccgcgacctcatcgccgacagcatcgagaccgtcatgggcgcgcaacactacgacgccaacatctccatacctgggtgcgacaagaacatgccaggtacaataatggcaatgggacggcttaatcgacctagtatcatgatatatggtggaactattaagcctggtcactttcagggcaattcctacgatatagtttctgctttccagtgctatggagaatatgttagtggttcaatcactgatgagcaaagaaagaatgtgctccgcaattcatgtccaggggcaggtgcctgtggtggtatgtacacagcaaacactatggcatctgctattgagacattgggcatgagccttccatacagttcttcgacacctgctgaagacccgctaaagctagaagagtgccgtcttgctgggaagtatcttctagagttgctaaagatggatttgaagcccaaggacattataactgagaagtcattgcgaaatgcaatggttatcgttatggcacttggtggttcgactaatgctgttctgcatttgattgccattgctcggtccgtaggtctgcatttgactcttgatgatttccagaaggttagtgaccaagttcctttccttgcagacctcaagcccagtggcaaatatgtcatggaagatctacataagattggtgggacaccggcagtcattcattatcttctggagcaaggtcttcttgatggtgattgcatgactgttactgcaaaaactctagctgagaatgccaaaattttccctcctttgtctgaagggcagcaaataattcgaccacttgacaatcctatcaaaccaactggccatattcaaatactttatggcaatcttgcaccagaaggttctgtagcaaaaataactggcaaagagggactatacttctcaggtcctgcattagtttttgagggtgaagagtccatgattacagctatctcagaaaacccagcaaatttcaagggaaaggtagtagtgatccgaggagaaggaccaaaaggcgggccagggatgcccgaaatgttgactccaacaagcgcaataatgggtgctggtcttggaaaggagtgcgccctgctgacagatggtagattttctggagggtcacatggatttgttgtcggtcacatatgccctgaagcacaggaaggtggtccaattggccttgtccagagtggtgatataatcaccatcgatgtaagtaagagggtaatcgatgttgaccttaccgaacagcagctcgaagaaaggcggaggaaatggaccccaccgccatacaagtcgaccagtggagctctttggaagtacatcaagcttgtggctccagcgtccagaggatgcgtcactgatgagtaggctgtgttacattctgttaggttgtgcacatgatgtgttttcaatcaaaggctgtttgccaggaacaaccatcctgttagagtgattcatgatagtgcggtttgcgtatggcaggtataataataaaatgccggtttctattagcttagcaatgctacagaagctgctgaataatcgagcgtaatatgtctgtttaagcttgtgagc

SEQ ID NO: 20289 - DNA, 968 bp, Zea mays
  Clone ID: LIB3180-021-F3_FLI
cctcagcccagcccggcccgcgatggagaagacaaagctgccgctgccgctaccgctacccctggtgcacggcgagcgtctgtgggcgcggccgtggcggtggctgaagacggccttcttcatcgtggcgatgctggcgtcgctgctgctcgtgtgcgcgccgccgctgctggtcgtgctgctggacctgctcctgccgcccgcgctgctctccagcttcctccgcgcgcagccgccctcctcggcctccttggccgccgcgctcgccgcccaggccaggtccttccgcttcgcctcctcgctcgccgacctccccgcggtctccgccgcgcgctccctcctcatcctctgcgcgtacgccgcggccggaggcggcggcgccgcctacaggtgggtcgccgtcgcctgcagcgccgcctccgtctgctacgtcctcgccaaggccgtcgccgtcttcggcgccgcgcccgtgtggcggggcaacggccagctcgtcgccgtcgaggccatgttcctcatgtcgctcgcgctcgccgtcgcccacctcgccatggcgtaccgcgcgtcatgccgcgagcgccgacgcctgcagctcgtctacagaatcgacgtcgaagcggtaagactgaagggaggccagacgcccaaggcactgaagcaatgcatgatatgacacccatctgctcctagtatcgccgtcaccgctggcgctgggtggaggtggaattggaaggaaggaacctcaagaagatgcacggcgcggcggtcttcgtggtgcagaccggcagtgcagtgcagggggctcgctcatccgcgcccaagttttggctcgagaagctgtgcataccgatcgccgcgtctgtccgtccactccctctgcgtctgtgaatgcgtgccagagtgaacgtgtagtgtcatcctgtacatacgtatggaacacaacattcgtgcttcggcctcctgcagcc

SEQ ID NO: 20290 - DNA, 1337 bp, Zea mays
  Clone ID: LIB3180-021-F5_FLI
ctcagctcccatatcctttcccctacctctccagcatctcccgtctccgtcgtctcgtctccgctcctcacctcgccagccatgggcaagatcaagatcggaatcaacggtttcggaaggatcggcaggctcgtggccagggtcgccctgcagagcgaggatgtcgagctcgtcgccgtcaacgaccccttcatcaccacggattacatgacctacatgttcaagtacgacaccgtgcacggccaatggaagcacagcgacatcaccctcaaggactccaagacgcttctcttcggcgagaagccggtcaccgtctttggcatcaggaaccccgaggagatcccgtggggtgaggctggtgctgagtatgtcgtggagtccaccggtgtcttcactgacaaggacaaggctgctgcacatctgaagggtggtgccaagaaggttgttatctctgccccaagcaaagatgcacccatgtttgttgttggtgtcaatgaggacaagtacacctccgatgttaacattgtttccaatgctagctgcaccacaaactgccttgctccccttgctaaggtcattcatgacaactttggcattattgagggcttgatgacaactgttcatgccatcactgccacccagaagactgttgatggaccctcagccaaggactggagaggtggcagggctgccagctttaacatcattcccagcagcaccggtgctgccaaggctgtcggtaaggttcttcctgaattgaatggcaagctcactggcatgtccttccgggttcccaccgtggatgtgtcagttgtagacctcactgtcagaatcgagaagggggcctcctacgaggaaatcaagaaagctattaaggccgcttctgagggcccactcaagggtatcatgggctacgtggaggaggatctggtttccaccgacttcaccggtgacagcaggtcgagcatcttcgacgccaaggccgggattgccctgaacgaccacttcatcaagctcgtctcgtggtacgacaacgagtggggctacagcaaccgcgtcgtcgacctgatccgccacatgttcaagacccagtaggctagtagagagatagatttctgcctccctatcgtgggtcgtccccaatggcctttggtcgcagaccatctttgctgcttgtctatgctgagaataaatgtgaacggtgcccctggacgctggatccatgctggttttggacacgctgtctttttgtgtttaacttatctgctgccgtcctgtaacgaattcgcaagttttagttcttttgtgctttgttaaagaataaacaatgaggtttc

SEQ ID NO: 20291 - DNA, 1051 bp, Zea mays
  Clone ID: LIB3180-021-F8_FLI
tccgcgttaccccctctcccttggtttcctctcccaccaccaacccccatcccggttatctccgccgccgcccgctttgggaaggcgcgacgaaggcaggcgagaggctccagccggacgaggaggaaagaggagcagcagggccggaggagagatgttcctgtgggactggttctacggggtgctggcctccctcggcctgtggcagaaggaggcgaagatcctcttcctcggcctcgacaacgccggcaagaccacgctgctccacatgctcaaggacgagcggttggtgcagcaccagccgacgcagcacccgacgtcggaggagctcagcatcggcaagatcaagttcaaggccttcgacctcggcggccaccagatcgcgcgccgcgtctggaaggattactacgcaaaggttgatgctgtagtatacctggtagatgcgtatgataaggagcgatttgctgaatcaaaaaaggagctggacgctctcctgtcagatgattccttggcaaatgttccatttctcatccttggcaacaagattgatatcccgtatgctgcctctgaagaggagctgcggtatcacctaggccttagcaacttcacaaccgggaagggcaaggtcaaccttggcgactccaatgtccggccacttgaggttttcatgtgcagtgttgttcgcaagatgggctacggcgatggtttcaagtgggtctcccaatacatcaagtagggcccttgccggggcgcttgctcagcccagcgatttttttgccttgttatttgttctggttggtatttcgtcacgtgaacgatgatcatcatatcatgacagtatcatggaggggtatgaagaggaaaaaacagtgcttaacattggggaacatgttgaatctttagcgtgaaaacattttgttatgtcagtcaaactcctggaattcttttgcttttccgtaggacctttactaaggacttgcctgcgatgcattataagattattgattgcttaaattatgtgttataatatggtggtggattggtactgagt

SEQ ID NO: 20292 - DNA, 1336 bp, Zea mays
  Clone ID: LIB3180-021-H3_FLI
cacaaggctaggcacaagcgaaccaaacccatggcgtccgacggcagcggcgtggtgacggtgtacggcagcaacggcgcggagctgctggagccgtccaagcagcccaagtcggcgactttctccgtcaaggtggggctggcgcagatgctccggggcggggtcatcatggacgtggtgaccccggagcaggcgcggctcgcggaggaggccggcgcgtgcgccgtgatggcgctggagcgggtccccgccgacatccgcgcgcagggcggcgtggcgcgcatgtcggacccggggctcatccgcgacatcaagcgcgccgtcaccatcccggtcatggccaaggcccgcatcgggcacttcgtggaggcccagatcctggaggccctgggcgtcgactacgtggacgagagcgaggtgctgacccccgccgacgacgcgcaccacatcaacaagcacaacttccgcgtccccttcgtctgcggctgccgcgacctcggcgaggcgctccgcagggtgcgcgagggcgccgccatgatccgcaccaagggggaggccggcacgggcaacgtcgtcgaggccgtgcgccacgtgcgctccgtcatgggcgacgtccgcgcgctccgcagcatggacgacgacgaggtcttcgcctacgccaagcgcatcgccgcgccctacgacctcgtcatgcagaccaagcagctgggccgcctccccgtcgtgcagttcgccgcggggggtgtcgccacgcccgccgacgccgcgctcatgatgcagctcggatgcgacggcgtcttcgtcggctcgggcatcttcaagagcggcgaccccgcgcgccgcgcccgcgccatcgtccaggcagtcacccactacagcgaccccaccatcctggccgacgtcagcacggggatcggggaggccatggtcggcatcaacctcaacgaccccaaggtggaacgatacgccgccagatccgagtgaaccctttctttccgtagtcatctccatccatccatccatctgccttggattgcatttccgtcgtttcatgtctctcaatcagtaataatggaatgaatgaaatggtaagaaacaaagctattacctatgcagaacctctttaattttgtgctactgtactaagttagcctagtccccacccccaccctggattatcatgtacccaaatgttggatggattgtatgtctgtcactgagccagaccttcttattgctatgaacgatgaatcaatcctctttctcgaggctaagacggctaatcgccttgattcagttgccatatcggaaaggttaagtgaatcacatcatcagg

SEQ ID NO: 20293 - DNA, 1650 bp, Zea mays
  Clone ID: LIB3180-022-A10_FLI
gccgtccgcttccctttccttggataaccacggcacccgcccgcccgcccgccggcaagcgaaagcgaagcgagcaaacccagccatggagaaggcgatcgatcggcagcgggtcctcctggcgcacctcctcccctccccctccgccgcctcctcgcagcctcagcttgcggcgtcggcgtgcgcggccggggacagcgccgcctaccagaggtcctcctccttcggggacgatgtcgtcgtcgtcgctgcctacaggacgccgatatgcaaggccaagcgaggaggcttcaaggacacctacccagaggacctcctcactgttgttctcaaggctgttctggacaacactagaatcaatccagctgacatcggtgacatcgtcgttgggacggtgctcggccctggttcccagcgtgcaaacgagtgcaggatggctgcgttgtttgctggcttccctgaaaccgtccctgttagaactgtcaaccgccagtgttcatctgggctacaggcagtagccgatgtcgcagctgctataaaggctggttactatgacatagggattggtgctggtttggaatccatgtccataaattccattgcttgggaaggacaagttaacccaaaaataagcgcattccagaaagcacaggattgtcttctgcccatgggaattacttctgaaaatgttgcccatcgatatggtgtaaccaggcaagagcaagatcaggccgccgctgagtctcataggagagctgctgcagccacggcctctggaaaattcaaggatgagatcgtcccggtcccaacaaagatcgttgatcctaaaactggagaggagaaggaagttgtgatatcagttgatgatgggattaggccagggaccacagcatctggattggcgaaactgaaaccagtttttaaaaaggatggaactacaactgcaggcaattccagtcaagtgagtgatggtgctggagctgttcttctcatgaaaagatctgtggctctgaagaaagggctgcccattcttggtattttcaggagctttgcagctgttggagtggatccagctgttatgggcgttggtcctgctgtggccattcctgctgctgtgaagtctgcaggccttgagattggcgacattgatctgtttgaactgaatgaggccttcgcctctcagtttgtctattgctgcaacaagttggggctggaccgttctaaagtaaatgtaaatggaggcgcgattgcccttggacaccctctgggtgcaacaggtgcccggtgtgtggctactcttctaaatgaaatgaagcgccggggcagagactgcagatttggtgttgtcaccatgtgtatcggatctggaatgggggcagcagctgtgttcgagcggggagacgcggtggatggactctccaacgtgagggacatgcaggcacataattttctatctaaggatgcgaagtagaggcgcagaaaaaccatccatcctagagcagcataagcctgctgcatttgtaatatattcgaaatccgtattttttttcttcacaagcactactctatatacgatgaataaaagggcgacaatacagtgtcatcttgtggccacctaagatgcgaaagagaaaagaaggccggctgttc

SEQ ID NO: 20294 - DNA, 813 bp, Zea mays
  Clone ID: LIB3180-022-A2_FLI
gtagcagcagccgccgccgccgccgcccagccgcaggaaacaggaggaagatgccggcggggcacgggcttcggtcacggacccgcgacctgttcgcgcggccgttccgcaagaagggttacatcccgctcaccacgtacctgcgcacctacaagatcggcgactacgtcgacgtcaaggtgaacggcgccgtgcacaagggcatgccgcacaagttctaccacggccgcaccggtcgcgtctggaacgtcaccaagcgcgccatcggcgttgagatcaacaagcaggttaatggccgcatcatcaggaagcgtatccatgtccgtgtggagcatgtgcagccctcccgttgcacagaggagttccgcttgaggaaagccaagaacgatcagctcaaggttgatgccaaggaccgtggcgaggtgatcagcaccaagaggcagcctgtgggacccaaacctggcttcatggttgagggtgctacacttgagaccgttactcctattccctatgatgtggtaaatgatctcaaggggggttactagagagaattatgtatcttgagcagttcaagcgagctggcataaatacctatctgaatctttttgacaactgtctagttcttttgttctagaagggcaggcatggtacattggtgatatttgtctcaggcattcgaaccagactccacatttctaggggcggtttgtcccttcttgagtatcgtcttgagagcctcgtgcactgggtcggcctctctggttctttttgttctggtgttataaacctatgtggctattgctagttaatgct

SEQ ID NO: 20295 - DNA, 1440 bp, Zea mays; identical to SEQ ID NO: 19872
  Clone ID: LIB3180-022-C4_FLI

SEQ ID NO: 20296 - DNA, 1855 bp, Zea mays
  Clone ID: LIB3180-022-E6_FLI
ggaaacctttatccatggctcgaggtatcatactactcctgcttgtcatccccctcgtcgtgagaattgaagggagtgtcatgggggagagatccaactcgttctcacaggactccaataattctagccctgctgaaaacaaactccaaccaggtgaaaagtccttcgcatcggaagcatatgcggtgaactggaacgaaccaccagacctgcaaatgcaagactccttcgagcgacctgagctatatcggaagcaatcagtgcaaggtgaaaagtccttcgcatcggaggcatatccggtgaaatggagcatatcaccatcactaggtcagcaatcacaagagtctttcgagccagaggcatatccgatgaaatggaaagaaccaccaccatcaggccaacaatcgcaagactctttcgagccagaggcatatcgggtgaaatggaacaaatcaccaccaccacaccaacaatcgcaagactccttcgagccagaggcatatcgggtgaaatggaacaaatcaccaccaccactccagcaatcccaagactccttcgagccagaggcatatcgggtgaaatggaacaaatcaccaccaccacaccaacaatcgcaagactccttcgagccggaagcatatcgggtgaaatggaacaaatcaccaccaccactccaacaatcccaagactccttcgagccagaggcatatcgggtgaaatggaacaaatcaccaccaccactccagcaatcccaagactccttcgaaccagaggcatatcgggtgaaatggaacaaatcaccaccaccactccagcaatcccaagactccttcgagccagaggcatatcgagtgaaatggaacaaatcaccaccaccacaccaacaattgcaagactccttcgagccggaggcatatcgggtgaaatggaacaaatcaccaccaccactccaacaatcgcaagactccttcgagccggaggcatattgggtgggatggaagcaacatgcgcaaggagaaacagacgttgctgatgggacgacgccagcacgcggccatggcctgcatgtcgcgaccgggatgcttttcacgaggaagagcttgcttccagggacagccctaccggaaggcaccaggttcagcggccacggcttccccgatccgcagaggttcgcgctacgggcagacgcggacgccatccccttcagctacagccagctcgacgcgatcctaaggatgttccggatccctcgagggtccaagaaggcggagcaagtcgctgacacactccgggcatgcgaggccgagtcctcggacgctcatgcctgcgccacctccgagcaggcggcggcggactttgctgcctcctcgctcggggtcagggctagcgacctggtatcggtcgtcaccgccgtccacggggggaaggacgccactaggtacgtggtggcgcccgacggcgtcacacgcatcggcaaggcggcgggggccgcgaccgcggtgccgtgccacccgatgccgtacccgtacatggtccattactgccaccggccgacggacgtggaggcgctccgcgttgagctgactgggctcggagacgacggcgcgaccatcgcgatcgccatgtgccacgccaacaccatgagctgggacgaccgctacttccagatgttgaacgcgacgcgcggcgaggagatctgccacttcatgccgtggaactatgtgctatggctgccggctgccgaccttctagcgaataactaggatcactttctaggcgggtgatacaccgtccattctaaaatgtaaaaaataaaaataaaaactatatacatagttttttattatgcacttag

SEQ ID NO: 20297 - DNA, 1852 bp, Zea mays
  Clone ID: LIB3180-022-E7_FLI
ggaggcacacacacacaaccagatctcccccaaatccacccgtcggcacctccgcttcaagatgcagatctttgtgaaaaccctgaccggcaagactatcaccctcgaggtggagtcgtctgacaccattgacaacgttaaggccaagatccaggacaaggagggcatccccccagaccagcagcggctcatcttcgctggcaaacagcttgaggacgggcgcacgcttgctgactacaacatccagaaggagagcaccctccaccttgtgctccgcctcaggggaggcatgcagatctttgtgaaaaccctgaccggcaagactatcaccctcgaggtggagtcctctgacaccattgacaacgtcaaggccaagatccaggacaaggagggcatccctccagaccagcagcggctcatctttgctgggaagcagcttgaggacgggcgcacgcttgccgactacaacatccagaaggagagcaccctccacttggtgctgcgcctcaggggaggcatgcagatcttcgtgaagaccctgaccggcaaaactatcaccctcgaggtggagtcttcagacaccatcgacaacgtcaaggccaagatccaggacaaggagggcattcccccagaccagcagcggctcatctttgctggaaagcagcttgaggacgggcgcacgctggccgactacaacatccagaaggagagcaccctccacttggtgctgcgcctcaggggaggcatgcagatcttcgtgaagaccctgactggcaagactatcaccctcgaggtggagtcttcagacaccatcgacaacgtcaaggccaagatccaggacaaggagggcatcccaccggaccagcagcgtttgatcttcgctggcaagcagctggaggatggccgcacccttgcggattacaacatccagaaggagagcaccctccacctggtgctccgtctcaggggtggcatgcagatctttgtgaagacactcactggcaagacaatcacccttgaggtggagtcttcggataccattgacaatgtcaaggccaagatccaggacaaggagggcatcccaccggaccagcagcgcctcatcttcgccggcaagcagctggaggatggccgcaccctggcggactacaacatccagaaggagagcaccctccacctggtgctccgcctcaggggtggcatgcagatttttgtgaagacattgactggcaagaccatcaccttggaggtggagagctctgacaccattgacaatgtgaaggccaagatccaggacaaggagggcattcccccagaccagcagcgtctgatctttgctggcaagcagctggaggatggtcgcaccctcgcggactacaacatccagaaggagagtacccttcaccttgttctccgcctcaggggtggtatgcagatctttgtgaagaccctgactggaaaaaccataaccctggaggttgagagctcggacaccatcgacaatgtgaaggcgaagatccaggacaaggagggcatccccccggaccagcagcgtctgatcttcgccggcaaacagctggaggatggccgcaccttagcagactacaacatccaaaaggagagcaccctccaccttgtgctccgtctccgtggtggtcagtaagtcatgggtcgtttaagctgccgatgtgcctgcgtcgtctggtgccctctccatatggaggttgtcaaagtatctgctgttcgtgtcatgagtcgtgtcagtgttggtttaataatggaccggttgtgttgtgtgtgcgtactacccagaactatgacaaatcatgaataagtttgttgtttgaaattg

SEQ ID NO: 20298 - DNA, 818 bp, Zea mays
  Clone ID: LIB3180-022-F6_FLI
accatagaggatcccagaacattgaacaagacgttgtatctgagacctccaggaaatgtcttctcaatgaatgaattggctgacctctgggagtcaaaactcaagaaatccctgaaaaggttatatgcaacagaagagcaacttcttaaagaaatccatggtaaattgaaactgctaaaggttaagtggtagttatatttgggttgcttttgttatagctctggtgtccattgtattttcttgaagttcaatcagttccttttcaatttaagctttaagctactgtcgtcagatacaatgtagttcaagattgatgaagttaccgatgcagttttatgatttgcgatttactgatacttcataatttagtcaatccatttcagttgttcatacgttcacctaaatagctgcaagtatatttgatcatggagcagaagtttgttgttatgtctacgaaaaagagttgaaaaaacttgaagaaactgtgaaacctctctttcctagttgcaaactgcaagtcattttctgaaagacttctgtttcatgcataaatcatctactctcattcttcctttctcctcattgcagatgctccatttcccttgaagatggatttaatctttatatattcagcgtttgttaagggtgaccacacgtattttgaaattgacttgtcaatggaaggaactcaactgtatccccatgtaaattatacaacagtgaacgagtacttggatactctagtttaggatatttgttcggtttatatcttccttgtaataagtcaaaaataatgttttttttgtttcgaatggagc

SEQ ID NO: 20299 - DNA, 1234 bp, Zea mays
  Clone ID: LIB3180-023-A12_FLI
gctcaaggtcctggctaacgccgatacccctgatgatgcattgactgcgcgaaacaatggggcacaaggaattggattatgccggacagagcacatgttctttgcttcagacgagaggattaaggctgtcaggcagatgattatggctcccacgcttgagctgaggcagcaggcgctcgaccgtctcttgccgtatcagaggtctgacttcgaaggcattttccgtgctatggatggactcccggtgaccatccgactcctggaccctcccctccacgagttccttccagaagggaacatcgaggacattgtaagtgaattatgtgctgagacgggagccaaccaggaggatgccctcgcgcgaattgaaaagctttcagaagtaaacccgatgcttggcttccgtgggtgcaggcttggtatatcgtaccctgaattgacagagatgcaagcccgggccatttttgaagctgctatagcaatgaccaaccagggtgttcaagtgttcccagagataatggttcctcttgttggaacaccacaggaactggggcatcaagtgactcttatccgccaagttgctgagaaagtgttcgccaatgtgggcaagactatcgggtacaaagttggaacaatgattgagatccccagggcagctctggtggctgatgagatagcggagcaggctgaattcttctccttcggaacgaacgacctgacgcagatgacctttgggtacagcagggatgatgtgggaaagttcattcccgtctatcttgctcagggcattctccaacatgaccccttcgaggtcctggaccagaggggagtgggcgagctggtgaagcttgctacagagaggggccgcaaagctaggcctaacttgaaggtgggcatttgtggagaacacggtggagagccttcctctgtggccttcttcgcgaaggctgggctggattacgtttcttgctcccctttcagggttccgattgctaggctagctgcagctcaggtgcttgtctgaggctgcctcctcattggcaaccggattgcctgctgctggtggatgtggtgatcaacagtattattacagagccatgctatgtgaacattactagtagcagtgctcataaaagctacaatcccatgtcctttttttccccagtcatgtaaaacttccaaactgctccatggttcaaaactctgttcttcaatacatcatcaattatcgatt

SEQ ID NO: 20300 - DNA, 2528 bp, Zea mays
  Clone ID: LIB3180-023-C11_FLI
cttgataatgctggatgctattctcaggcagacctatatggtgatcttgccatttattgtcgtgtttctatgttatggaaattttaagagcgctgatgttacctgtagtgctctttaaatttggaacatggaacatggagcatgtgctgattagtagaaggtttccaactgatcctgctctctaaatttggaacatggagcatgtgctgagtagtagaaggtttccaactgatcccaatgagtataagttatatgaggaaattggagatggtgttagtgccacagtataccgagctctttgtgtcccacttgacatcttggttgccatcaaagtgcttgaccttgagaaatgtaacaatgacctggatgggataagacgggaagtgcaaactatgagtttgattgatcacccaaatcttcttcgtgcatattgctcatttacaaatgggcaccagctttgggttgtcatgccttacatggctgctggatctgctctccacattatgaaaacttcttttccagaagggtttgatgagccagtcattgctactcttttgcgtgaagttttgcaagctcttgtctacctacattctcaaggacatattcacagagatgtcaaggctggaaacatcttaatagatacaaatggggctgttaagctaggagactttggtgtgtcagcctgtatgttcgatactggaaataggcaaagagcaagaaatacatttgtagggacgccttgctggatggctcctgaagtcatgcaacaactgcatggttatgattacaaagctgacatttggtcctttggaataacggcattagaactagcacatggtcatgctccattttcgaagtaccctccaatgaaggtgttgcttatgaccttgcaaaatgcaccaccaggtttagattatgagagggacaagcggttttcaaagtctttcaaggatttggttgctacatgcttagtcaaggatccacgcaagcgtccttcgtctgaaaagctgctgaagcattctttctttaagcatgctcgctcagctgaatatctagcacggagtattcttgatggcctccctccattgggtgaacgctttagggaactgaagagcaaagaggctgagttgcttctcaataacaaacttggtcaggagagcaaggagcagctatcacagaaagagtacataaggggcatcagtggctggaacttcaatctagaggacttgaaaaatgcagctgcccttatagacagttcaaatggcacttgttatttagatgtcagggagaacagagttaaggatgactcacaagaagcttacaatggcccagaacatatttatcaggaaaggctcaaccatgttgcttctagaaggcctgaagaggatgagatacaagaagttgaagccttgaatgatgctgtctcctcttcgttttcaagccgctcccttgaggcactaaaatcttgctttgatgtttgtggtgttgatgatccgagcccaactgctactgattcaagagcgcaaccaagtgtcggaactttacctttccagcagttgcaaaaattggagcattgtaaaagtggcgactgcaatggtgaaagcttggaaagaagcgtttctgtacctacgaatctggtcactagtggataccacaagcattcaagtggttctcttatacctgagcaagttctttctccctacttgagcagtgatttggaaagggatggatttcgtcagaaaaacttaagcagcaggaactgtagtggccctttattgttccgccaaatgaaggattcacgcacacatcaatctgttgcgccagacgagtcgtcggaaggaaaaattatccatcgaagggggcgcttccaggttacatcagatagtatttctgaaaaggtagctacatcatcctgcaacagcagcaggataaatctaccaattgatgcagcacgttcaagtcccaagttgtctgcaattcttccaactttgcaattcttgatgaagcagaatactatgcaaaaggaagtactcagtaggctgatttcttcaattgaggaaacatctgatgattctgaagcaaccggaagcagttcatatcagtcttctggagggcctgcccgagaaaaggaattgcatttgtatgttctccaattgcagcgaagtgtcaccgaacttgctgaggaagtgcaaagattaaagctccaaaacaataagcttgagcatcagatcaatatattgtcaagaaaagatgaaaggtcgtcaacgcaagataactgacaatgatgatatgccccttctaccacactgtaattcgattacccaattttgctttgttagaaagttatttgtattctgcctgcagtcagagttgtatcattgtaagctgtaagtatttagcgaagtgtgaaatcatagtaattttgatctgtacagctttgtttggttaaccatgaagatataattgtgttataagtaatgtgctgataatattgttttgcgtggaagtttgtgaaagtttatctgagc

SEQ ID NO: 20301 - DNA, 1407 bp, Zea mays
  Clone ID: LIB3180-023-D6_FLI
cacagttcaatgagcttcaagaatactacctgcaaagacgtcgtactggagcacaggcacgcagacaggaagaaagagatatagttgcaatgaatagagaaggctatcatgcaggtcttcaggatttccagtctgtgctaacaacgttcactcgatacagtcgtctacgtgtcattgcggaactaagacatggagacttgtttcactctgccaatattgtatccagtattgaatttgatcgtgatgatgaactatttgctaccgctggagtctcgaaacgtattaaagtcttcgaattttccactgttgttaatgaaccatcagatgtgcattgcccagttgttgaaatggctaccagatctaaacttagctgcctaagctggaacaagtactcaaaaaatattattgcaagcagtgactatgagggtatagtaactgtgtgggatgttcagacccgtcagagtgtgatggaatatgaagagcatgagaagagagcatggagtgttgatttttctcgcacagactcttcaatgctagtatctgggagtgatgattgcaaggtgaaagtgtggtgcacaaatcaagaagcaagtgtgatcaatattgatatgaaagcaaatatttgctcggttaaatataatcctggatcaagcttctacgttgcagtcggatctgctgatcaccatattcattactttgatttacgtaatccaagttcgcctgtccatattttcggggggcacaagaaagcagtatcatatgtgaaattcttatctaacaatgagcttgcgtctgcatcaacagatagcacattacgcttatgggatgtcaaggataactgcccggtacggacattcagaggacacaaaaatgaaaagaactttgttggcttgtctgtgaacaatgaatatattgcttgtggaagtgagacaaatgaggtttttgtttatcacaaggctatctcgaaaccggcagcaagccatagatttgtatcttctgacccggatgatgccgatgatgatcctggttcttatttcattagtgctgtctgctggaagagtgatagccctacgatgttaactgctaacagtcaggggaccataaaagttcttgtacttgctccttgatgttatggagggcgttcaagaggttcacagtactgtccagttgtttcctttcgtgtcattatattcccccaaaattgggaacgggggcataattgatctccggttagggaatgaagttttgcagatggtcagctgacgtagggttttgaggtatcagaatgtgcatagtcatgtttatgttgtataggtgtaattgtgtaaagcagccaagttattggttacaagtgtaacacgagaaatacacattaacaaaaaaaaaaaaaacctcctgcttggttgg

SEQ ID NO: 20302 - DNA, 1348 bp, Zea mays
  Clone ID: LIB3180-023-E2_FLI
caaatcgaaaggggccgtccggctcagggtttctcgacggctccttgccctctccgccatggacgcacagcgagccctccttgacgagctcatgggcacagctcgcaacctaacggaggaggagaagaaggggcacaaagagctgaagtgggacgatccggacgtgtgcggcccttacatggttcggttctgtcctcacgaccttttcgtcaacaccaagagcaatatcgggccgtgctcgaggatccacgatccgaagctcaaggaaagctttgagaagtctcctaggcacgatacttatatgcaaaggtttgaggcagagcttgcacaacaatgtgagaaattggtaatggacttagatagaaagataaggcgtggtcgagaaaggctggctcacgattctgctgtgccaatgccaatccctggaaaattagctgagctgctttcagtgcgaaaagaacaggtgaagaagctgctggagcaaattgaggagcttggtgaggctggtaaagtggatgaagctgaggcacttatgagaagggttgacattttaaacgctgagaagacagctttagctaacgaagcagacaacaaagtagctatgcttgagaagaagatggaactttgtgaaacatgtggatcattcttagttgctgatgatgctcttgagagaacgcagtcccatgtgactgggaaacaacacattggttatggcatggttagggatttcctggcagaatacaaggcagcaaaagagaagacaaaagaggaagagcggcttgcaagggagcagaaagcagaggagcatcggaaacagaggggaaaagagtatgatagtgggggcagggatagagataccagaagggagaggtctggggagcgtgactttgaccgtgatcgtcagtatgagcgaagcagaggaagagatagggtttatgattacagggacagaggatcagaacaccgaagcaatcgctacagaaatgggagggattctgaaagaggtggacacagatacaggagtggtggtatgacaaatgaccgagggagaatgaggagcagatcacgttctccaaccaggcatggctatggaagatctagaagtccagatcattagctgcctagctggacatttagatagttttattcacagttgggactcatgaggtagacagttcccttctgctatttattactgtacaatgggttttattgaagtgtcgcacttttttaagtctctgatctgttgtaacagctctgttggaaccctacagtctccctattttgcatggggaaaaattcccaggtcggtatcgattgccatccccacattttttgtgtttctggc

SEQ ID NO: 20303 - DNA, 1648 bp, Zea mays
  Clone ID: LIB3180-023-E8_FLI
ctcatggccatggagaacactgcgccatgcggtgacttcgggaagatcgtggccgatcttgagtctgagaacttggtggctaacgtctctgccgtgaatcaagcctcggcgttgattgctggaggtaaaatccctgaaccccagcttctgtgccgcctgatcgctggtcttgcttccaatctggagaagcctgaccatgactctgccatcaagaggtgtgtttcctttactctaaaggcaatcagggtggccgtcatcaagaaccgcatgaacatggattcctcagctcgtggtgaggctctccatgccatctggtgttgttttatggatcaaggccttcgccgtattcagcgtgattcaaatatggtgaggctgtggacagtccaggatcaactgtctgcagtcaaaatcatatgtactttcttccgtctctcaccggtaaacatcagtgacacaaggtgtgtcacagccttcgcctcactgatgttgtcaccgtacagcactgtggtgtgtgcatgtgcagatgccctgctctctttgccccctgttgttccaggattttcatttgccattgcaagagcctattgccatatgcttgcaacagtgtcaccacaatcaccacttgaggtaagcagcatggttgcgatgcttggtaggctgaagcaagtaagtacgaccatggtccaccacccagggtttagtgaccttgctgtggatgtcctagcagctttatcaaattgcaatcttgctgttcgaaagaatcttctgaacctgatggtgaggctcctcactccaaggaacatcagtgctgtgctattgctccttgataatgagctgaatagggctgctaacatccatatcgagtaccacaagatgctagaggaggcgatcagagaatgccatgctgcttttccggggtgtattgtagaattcacactagatcccaagtacagtgtgttcattgatagtattctgtacatcatagacatcatgaatcccgaccagtcgttgcgaggcccacttctgaaaggtctactaagggcgctccggcatgtgaagtcaccactggtatgcgccgctgctgtttgggccatctcaatgttctctggatcactggaagaggtcagtgatgccattgttgcactttcatgcttcttcaaggacctgcttgatcgacgtaagattgagaagctgatacttggaggagaagcggagaatcaatacaagctttctactgactattatggtgtcactgccggagatgcaacacagggaaagcaccagcagccatggctgatggagatggaggaactgctgtttgtgcgcatagggctcacacggcaagcaggtgggagctatgccattccttcgagttccaagagcagtgctagttcttcaaacgcgtatcttcctgagccattgggtaatacagacaatctgatcttcctcgtgcattctggagatgccctcttggcagatttcgtggaaatcatgctgtctaacctcaagaagaaggtcaaagagctggagtgatgctgatgagttcatttgatgtaataatttggaggtcaaataactagaaatggagtcgttgaaccttggccaatcgtacctcaatatgcataataatgctgtcttctgtgtgctt

SEQ ID NO: 20304 - DNA, 1622 bp, Zea mays
  Clone ID: LIB3180-023-G11_FLI
cggagtcaggcccaggcctaacctcagtacatcagagcagccgaacacgcccgcggcaaccgccgccattctaccccaggtcggacggacccttgccggagacgagcacacgccacagcaggaattatcgggcgtagagcagcgcgaagcgagagatccaatggcggcggcggaggggcagtgggtgctcatggcaacggggcggacgccgaccaacattgcggtgatcaagtactgggggaagcgggacgaggcgctcatcctccccatcaacgacagcatcagcgtaacgctcgaccccgaccatctctccgccaccaccactgtcgccgtcagcccctcattcccttccgaccgcatgtggctcaatggcaaggagatctcgctattaggaggaaggtttcagagctgcctcagagaaatcagaaagcgtgctcgtgactttgaggacaaggagaagggcgtcaagatcaagaaagaggactgggacaagttgcatgttcacatagcctcgtacaacaacttccccactgctgctggtttggcctcttcagctgctggccttgcctgtttcgttttcacccttggaaagctgatgaatgcgaaagaagattatggagaactttcttcaatagcaaggcagggatctgggagtgcatgccgcagtatatatggtggttttgtgaaatggtgcatgggagaaaaagatgatggaagtgacagtattgccgtgcagcttgctgacgaaacacactggaatgatcttgtaattattattgcagtggtcagttcaaagcagaaggaaaccagtagcaccagtgggatgcgagatagtgttgaaacaagtcctctcttgcagtacagggcccagacagtggtgccaggtcgggtgttgaaaatggaagaagctatcaagaaccgtgactttgaatcctttgccaaattaacttgtgcggatagcaaccagtttcatgctgtatgcttagacacgagccctcctatcttctatatgaatgacacgtcacaccgaataattagccttgtggaaaaatggaaccactcagaaggaaccccacaggtcgcttacaccttcgatgctgggccaaacgctgttctaatcgcacaaaaccgtaaaactgcagcacatctcctccagaagctcctatactatttccctccacaggataatgatttgagcagctatctggttggcgataaatcgattctaggtgtcgccggattgcattccatgaaagacgtcgaggctcttccagcacctccagagacgaagataccggatcagaaattcaagggcgatgttagctacttcatctgcagcaggcttggcgctggtccaaaggttgtttctgacgaaggtcaagcattgatcgattcagtcaccggacttccaaaaggcgtgtagttctagatttaggttggaataatggtttaagctggggattaaagacaatggtatcatacaagcaacctgggccgggaagatacattaggctcgtgtcacgttggtttcgtgctgattgacttgacggtgtattggtcatgtattatgcatttgcgctggtgttcgttgctgtccaataaagatagaacacgttctcgcc

SEQ ID NO: 20305 - DNA, 903 bp, Zea mays
  Clone ID: LIB3180-023-G9_FLI
tccagcccatttcgaactctctctagacgcttcctcggtctctctgttcaccgctgccccgtaccgtactcctcttcgcgccgtagaaatggcgctgccgaatcagcagggcgtggattaccccagcttcaagctcgtcatcgttggcgacggtggaactggtaaaaccacatttgtgaaaaggcatcttactggcgagtttgagaagaaatatgagcccaccattggtgttgaagttcaccctctggattttagcactaactgtggcaaaattcgcttttattgctgggacactgctgggcaagaaaagttcggtggccttagggatggctactacattcatggtcagtgtgccatcattatgtttgatgtcacttctaggctgacatacaagaatgttccgacatggcacagggacctgtgcagggtctgtgagaacatccccattgttctttgtggtaacaaggttgatgtcaagaacaggcaagtcaaggccaagcaagttacattccaccggaagaagaacttgcagtactatgagatttctgccaagagcaattacaactttgagaagcccttcctttacctcgctaggaagctggcaggggatcagaaccttcactttgttgaagctgttgctctgaagccaccagaagtgcagattgatatggccctgcagcagcagcatgaagctgagcttgcagctgccgctgcgcagcccctccccgatgacgatgatgacctgatcgaatagatatgttatacatggcccttgttgatgactcttgttaaaaatctgtggtggttcaatccttgttagagttaggcagtacctgaatgttctcttgatgtattcgaagagttgagaaggaagttaatgacatcattatcctgttggctgtt

SEQ ID NO: 20306 - DNA, 1548 bp, Zea mays
  Clone ID: LIB3180-024-A2_FLI
gccaatcgccaaagatagccacgccacctccgtcactcccgccacccgtgtatcagtaactgacccgcggccaccgccttcgcgctacggcgtcatggtcgcacgcccgcagcttcccttttcccttcccagtcgatagaagccgcgttccaccatggcccccgcccccgtacttgccggcattctgctcgccctcgtcgcaatggctgtcgccgtccacgcacacgcgccagcccactccccggaggcgtccgagtcaacgtcgccgtcggaggcacccgccggggcacctgatgatgccagggagatggagaccccgtggatgtcccccgccgaggctccggtgctctacggcgaaaacgccgcgcccgctgcttccccggaggaagaaggcgcgcccgccatggcaccgggcttcgacgctaacggacctgccgcagcctcgccggaggaagaagacgccaccgccatggcaccggactacgacgctaacggacctaccgcagcctcgccggaggaagaatacgcgcccgccatggcaccggactacgatgctaacggacctgccgcggcctcgccggaggtagaagcgccgacgatggcgccggacctgtctccctccgcgagcgagtcaccggaggaagcgccgacgatggcgccggacctctctccctccgccagcgaggcgccggaggaagaagcgcccacgatggcgccggacctctctccctccgcgagcgaggcgccggaggaagaattgcccacgatggcgccggacctctctcccgtcgcgagcgagtcgccggaggaaaccccagcgggagccccagaattcgagggcgcctctatcgccgctcccccactagatgacgcgcccaccatggcgccggcatttgctcccttcgggatcagcgagtcgccggaggagtctgaggccccagccggcgccccggaggaggaagccgaggccgaggccgaggccgagagcccatcctccgaaacagccgccgccccgctctccgaggactacggcgtgttagaagaggaggtcgtagtactctcgcccgacgggtcggccgcggtcagcagcgaaccggaaaccgaggagagcccggccaaggcgactcccgcggccgcggaggctccaggcccctcatccgacggcgaggacagcggcgcgagcacgggcgccccgtgtcgcagcctcgtgtctgccgtcatcgtcgcggccatgtgcgccgttgctgctttttgaggtgccgcctgcgcgatcgatgaggcaccagaccccgcggtggagataggggacggatcgcagggcagacatgcatgcgcgcggcgagcgatgtaaacgatgcatgtcgtggaggggggatagcaatcagtggtattctttcaatacttcctcccaatcggaccatgtaaacgatgcattcaggtactgatttgccccaaaaggatgcatgtaaatgatccggtcattcgaacctcgagcatggatggatgaatatatgggggaaaaaagctatgccacattcggttcagttc

SEQ ID NO: 20307 - DNA, 1489 bp, Zea mays
  Clone ID: LIB3180-024-C10_FLI
atggcgtccaccgcgctggtggcagtggcagtggggggcgccatttctctcggtctcgtcgcctcctctggcgtcgcgtcctgctccctgcgcgccggcggcgactcccggcggtttggcccccgactcgtcctcctgcggagaggaggcgccgagggggaggggacgaggacacggaattgcccaatatttcgttgtgccaataaggtggacgttgtgaccgaggatgacagcgtcgatggtgacgttaccgacgatggagaagaccttgaggatgcagctgatgacgccattgatgctgatgttggtaccgaagatgaactggagtcttcgctgcctgaggatgttgagtggataaagcagcagccacttccttatcctttggatgctctggagccatacataagcaaggagacggtggagcagcactggggagttcaccagcagattcacgtggaccggctcaatggcatgatcggtggcagcgagtgggaaggcatgtcgctggggcagatgatgctcgcctccttcaatgagggcagggagcagccccatcctcccttcttccatgccgcacaggtatggaaccatgatttctattggcgatccatgaaacctggtggcgggggcaagccaccggaacggctcctgaagtttatcaatagagactttggctcccacgagggtatgatccggcaattcatggatgctgcactaactcagttcggttctggatgggtttggctttcctacaaaggaagcgggttgccttatgtgaaatcgagaagccccatcccatcggacaaccatggtaggctggtgatctcaaagactccaaatgccatcaaccctcttgtctggggccactctccactcctcgcgattgatgtttgggagcatgcatactatctggattacgaggatcgaagggctgactatgtttctgcgattctggagaagcttgtgtcgtgggaaacagtcgagtccaggctcgcgaaagccgttgcacgggcggtagaaagagatgagcatctccgcagaaggattctaaggaaacagcgtttagctcaggcaaacggacagagcagagctaggtctcgcgctcggcaagggaggcaaggagaccaggaagtcgccaggagccgtcccgtggaggcatgacaacgcagctggtaaatggggtgcatcaggacaccgttatgtagctgaatggcgatcaaccttttccctggtgacagtcttgagagcttgcatggtcatattggtctgttttaggccgcatccaccctcagcactgcgaggagggtgggataagttttgctaagtaggattaggggtagaggtagagatgtaaaatagacagaatttcgtcagacttggactcttggagaattcgttttgctcgttattctttgtgggatgtgagtgacaatgtaagaggacatgattgtgtgttctgatttctacaatccagtgctcggttttggtg

SEQ ID NO: 20308 - DNA, 2087 bp, Zea mays
  Clone ID: LIB3180-024-G12_FLI
agtcctgtacctattacggctgatactagagatgcagaaatgttgaataagacaccactgtcgctgccacttaagaggaagcttgtggatgtgaaggataataattctgtatcagcaacgaagcgcctcgcaacaactgatcaaacgtaccaaccctctgtattccaaactcctgctcctactcgcaaaggtctgtcagtagcagtagattctcctacttcatttcattgtggccggacaaacttcaactatgtttctactgaaaacttggacaattctcaaagcacaccaggaacgttgatcaccacgacacttcctggtgtgaatgatcaacaatcaggaaatttggaacgtatgacacttgactcactggttgtacaatacttgaaacatcaacaccgccagtgtcctgctccagttacaactttgccaccactttctcttttgcaccctcatgtttgccctgagcctagtcgcagccttagtgcacctgcaaacatagctgctcgtatgggaagccgtgagataagaaggcagtttagtggtatccagatacctcgcagggatcgtcattttatatacagtaggttcaagcagtgtcgggtttgccgtgatgaggcatcactattgacttgcatgacatttcttggagatgcatctcgagttgtggctggtaaccacacaggtgaattaaggatatttgactgcaacacggcaaatctcctagagacccaaacatgccacctacatcttgttacaacgatggaggcgacatgttctggtggacacgagcttattctcacatccagcctaaatgaggttaagatctgggatgccttctcggtatctgcagggcctttgcacacatttgaggcctgcaaagctgctaggtttaaccactctggaacttcatttgctgccctttctactgatacagctcaacgggaggttcagttgtatgatgtgcagacatatactcttgctacacagcttcctgataacactagcagttcaggttcgggccggggttacatacaacccattatacatttcagtccttcagacacaatgttgctttggaatggagtcctgtgggatacaaggcagccaaattttgtacatcagtttgaccagttcacagattactgtggcggtggcttccatccggcaggaaacgaggtgatcttaaattcggaggtgtgggatctgaggaagttcaagcttttacggagtgtcccttccctggaccagacagtaataaagttcaacggcactggtgatgttatctatgccatcctgaggcgtaatcttgatgacgtgacatcatccatcaatgctcggagggtcaggcatcctcttttccctgcattccgcacgattgatgcggtgacttactcggatattgcaaccgtccaaatcgaccgctgcgtacttgatcttgccactgagcccaatgattctcttattggggtggttgctatggacgatcaccaggagcttttctcttctgcccgcttgttcgaagttggcaggaagcgaataaccgatgacgattcagacccggaggatgcaggtgaaaccgacgatgacgatgacgacgatggcgactctgatgatgatgttctccttgcgccggtgctggaaggggatacagattccgaagagattagtagcagcagcgatgatggtgatgaagatggtggtgacgatgatatccccagttcggatgacattgaagatgacccagagtacattgatggtggtggtgattttgaagggggagggggcttgatggatattttgggtgatgacgaaggggaaggcgatgagagtgatatgatggaatcctttagcagtggcgacgaggagggttggatcatgtagtttttttttgggtagtgcagccctgccgaagatggagcatggccctgtacaagtcaatatttatacgctcacattatgattgtaattattatttcctggttctcttgagcagctcctgccctgctagggaaatgtggaacataatggaagatggtgtaagtaaaggtgggaagagaacaatctaataccaatcgattaaaatc

SEQ ID NO: 20309 - DNA, 2197 bp, Zea mays
  Clone ID: LIB3180-024-H3_FLI
ccctccgccgccactcccctcccattcaccgccaccgccaattccataccgtgctccgccacctctgctgagagcgagaagagatggcaggcaagggtgatgggccggcaatcggcatcgatctcggcacgacgtactcttgcgtcggcgtctggcagcacgaccgtgtcgagatcatcgccaacgaccagggtaaccgcaccacaccctcgtacgtcgccttcaccgactccgagcgcctcatcggagatgcggccaagaaccaggtcgccatgaaccccatcaacaccgtctttgatgccaagcgtctcattggcaggaggtttagtgactcctctgtccagagtgatattaagctgtggcccttcaaggtcattcctgggcccggtgagaagccaatgatagttgttcagcacaagggggaggagaaacagtttgcagccgaagagatctcctctatggttctcatcaagatgcgtgagatcgctgaagcttaccttggcagcacgatcaagaatgctgttgtcacggtccctgcctatttcaacgactcgcagaggcaggccacaaaggatgctggggtgattgctggcctcaatgtgctgcgtatcatcaatgagccaaccgctgctgctattgcctatggtcttgacaagaaggcaaccagtgtcggtgagaagaatgtcctcatttttgaccttggaggtggtaccttcgatgtctccctccttacaattgaggaaggtatctttgaagtcaaggccacagctggcgacacccatcttggtggtgaggactttgacaacaggatggttaaccactttgtccaggagttcaagagaaagaacaagaaggatatcactggcaacccgagggctctccggcggctgaggacctcttgtgagagggccaagagaactctgtcttccactgcccagaccaccattgagattgactcgctgtacgagggcattgacttctactccaccatcacccgtgccaggtttgaggagctcaacatggacctgttcaggaagtgcatggagcctgttgagaaatgcctgagggatgccaagatggacaagagcagcgtccatgatgttgtccttgttggtggctccactaggatccccagggtgcagcagctgctccaggacttcttcaacggcaaggagctgtgcaagaacatcaatcctgatgaggccgttgcctatggtgctgctgtccaggccgctatcctcagtggtgagggcaacgagaaggtgcaggacctgcttctgctggacgtcactcctctctctctgggtctggagactgccggaggagtgatgaccgtccttatcccgaggaacaccaccatccccaccaagaaggagcaggtgttctccacctactcggacaaccagcctggtgtgttgatccaggtgtacgagggtgagaggacccggacccgcgacaacaacctgcttgggaagttcgagctctccggcatcccaccggctcctcgtggtgtcccccagatcacggtctgcttcgacatcgacgccaacggcatcctgaacgtgtctgccgaggacaagacgacggggcagaagaacaagatcacaatcaccaacgacaagggccgtctgtccaaggaggagatcgagaagatggtgcaggacgcggagaagtacaagtcggaggacgaggagcacaagaagaaggtggagtccaagaactcgctggagaactacgcctacaacatgcgcaacacgatcaaggacgagaagatcgcgtccaagctggctgccgacgacaagaagaagatcgaggacgccatcgacgcggccatcagctggctggacgccaaccagctcgccgaggcggacgagttcgatgacaagatgaaggagctggagagcctttgcaaccccatcatcgccaagatgtaccagggcgcgggtgccgacatgggtggcgccggcggcatggacgaggacgctccggctggaagcggtggccctggccccaagatcgaggaggtggactaagcggattgtgtcagtctcgtgtgtctgctgcagtggctggctggcccagtcgctgctcgatttatcgtcgtcgtcgcggtgtatccgcgttagaaccttttgttggtgaacaatattatcgtggcacgcgttttaagtaatacggtattctggttcggtttcgt

SEQ ID NO: 20310 - DNA, 429 bp, Zea mays
  Clone ID: LIB3180-028-C1_FLI
ctccaaaccagttacaaggactacgaaccctcaggtgaaactccggtgaggtctgagccgaacgtgccaagcaaaggctcgattgaatcgctgcgagccatgcccgtggagaccatgatgaatgagttccgtgagaaccatccgtatgaacatgaatcgagcaaagaatctaagttatctcagatacctcgcttgccgctcgcgacaatcaactgagacattcacttccctatgtgcagtgtacttttattagtagggcgtcaatttgccggttttggtgtcccttgtgcacttgtgctaggttaaccatggggtgtgagctgccttggctctctccagtgcatttcccttttttcccgcattcaattatctgtaatgttctgttgtgccttgtacgatactgatattgtacagcatcagatatgtgcc

SEQ ID NO: 20311 - DNA, 568 bp, Zea mays
  Clone ID: LIB3180-029-B10_FLI
ctcgaccagaaccttgagctcgccaagcaatgctcgcgagaggccgccctcgcagggttcaaggcagcagctgtcgcgaccgtcgcctctgcagttcccaccctggttagcgtcaggatgctgccatgggccaaggccaacatcaaccccgctggccaggccctcatcgtctccacagttgctggcatggcgtacttcatcgcggcggacaagaagatcctctcgctggcgaggcagcactcgtacgagaacgcgccggagcacctcaaggacacctccttccagggcaccggccgtccgcacccagggttcttcaggccttgagcgagagaccatcaaactaccgccctagctagctggacgcactagttcgtcagcggccgccgattcatgtcgtccaagatcatatcaactactgctagcatatatatagtgtactagctagtagtaggcaccggcgatccgtgcatgcatgtgctcggagaaactgtaatggcttagtgctctgctccagtttactgtatctaccttccattatcatataataatatcatcctcctgtttaagc

SEQ ID NO: 20312 - DNA, 1728 bp, Zea mays
  Clone ID: LIB3180-029-G5_FLI
ctgcgatcccatatcaattcccgtccccactcgccgtcgacgcaggtcgcactccagctccagcgcgccgcgcggtgctgctcgccccgcccatgtgacgcgagtcgcgccccgccccccacagtcagcagtccgagaccccaatccgcggcgccgggcggggggaaccaggagtgggcaataaaaaaccgaggattccgtcctctgtggcggggatggggcaggaggggatggggtacaacagcaaggggggaggaggaggaggcggcggcgggggagggctgccgatgacggcgcttcggccgcggggcgcgtcgccgctccaccacagccggtcgcgcaagatccaccgcactttcaacaacctcaagattaccgtgctctgcggcctcgtcaccatcctcgtcctccggggcaccatcggcctcaacctctccctcccctcgcagccctccgacgccgaagcgctcgcggacgccaaggccgtcgaggacatcgaccgcatcctccgcgagatccgctccgactccggccccgaccccgacgacgagggcgacttcggcgccgcctctggcttcaacgccaccgcgctcagcgccaccgaggccgccgccgcgtacgcggccgcggtcggcaaatacgcgctcgggcccaagatctccgactgggacgcgcagcgccgacggtggctggcccagaaccctggcttcccggccacccttgccgggggcaagcccaggattatgctcgtaaccggctcgcagccggggccctgcgacaacccgctcggcgaccactacctgctcaagactaccaagaataagatcgattactgccgcctccatggcatcgagatcgtccacaacctcgcgcaccttgacaacgagctcgccggatactgggccaaattgccgctgctccgccgcctcatgctctcccacccggaggtcgagtggatctggtggatggacagcgacgcgctcttcaccgacatgtcgttcgagctgcccctgtcacgctacgacggccacaacctcatcatccacggctaccaggacctcctcttcgagaagcactcctggattgcactcaacaccggcagcttcctcttcaggaattgccagtggtcgcttgacctcctggacgcgtgggcgcccatgggacccaaggggttcatccgcgatcaggcgggcaaggtactcacggcaaacctcaagggccggccagcatttgaggccgacgaccagtcggcactgatttacctcttgctctcgcaaaaggacaagtggatggacaaggtgttcattgagaattcctactacttgcatggcttctgggctgggttggtggataagtatgaggagatgatggagaatcaccacccaggcctcggcgacgagcggtggcctttcgtgactcactttgttgggtgcaagccatgtgggagctatggggattacccagtggagcgctgcctcaggagcatggagcgagcgtttaattttgccgacaaccaggtgcttcggctatatggtttctcacacaaggggctggaaagccccaagatcaagagattcagggatcagacaactagaccaattaatgatgtggagaacttagatatgaaggccaaaatatctacaatttcctgaaagttcagatgagagttggtggtttggcaattgcatacttgctttggctatcaacaaggtcagagcattttgtgat

SEQ ID NO: 20313 - DNA, 890 bp, Zea mays
  Clone ID: LIB3180-030-B4_FLI
ccccgctccgcctccactcctcgcgccgctgccgcatctcctctacaggtaagaaggagagaaagagggcgaaatggtgaagcacaacaacgtcatccccaacgggcacttcaagaagcactggcagaactatgtcaagacatggttcaaccagcccgcccgcaagcagaggcgccgcatcgcacgtcaaaagaaggctgtgaagatattcccacgaccaactgctggccctcttcgtcccattgttcaatgccagactctcaagtacaacatgaagtcaagggctgggagaggctttacccttgaggagttgaaggctgcgggcattccaaaaaggcttgctccaaccattggcatttctgtggatcaccgccgcaagaacaaatcccttgaggggctgcaggccaatgtccagaggcttaagacatacaaggccaagctggttatcttcccaaggcgtgctcgcaaggtcaaggctggtgactctactctggaggagcttaccactgctacccaggtacagggtgactacatgccaattactcgcggtgagaagcgctctgtagaggttgtgaaggtcacagatgagatgaaggcgtttgcggcctatggcaagctccgccttgagcggatgaacaagaagcacctcggtgcccgccagaagaaggcagctgaggcagagaaggaagacaagaagtgaagcagccaaactttgtagcctgttttgttctgttcagtcatagcgagatgctacttccatcaagtgcttgttccaagttttttttgggtgctggaaatagagaccagtcaaatattttggtgtcctactgtttgataccttgtatttgtttgcgaactcagctatctaatgggttaatgaattcttggcg

SEQ ID NO: 20314 - DNA, 1434 bp, Zea mays
  Clone ID: LIB3180-030-F5_FLI
cgatattcaaaatataaatatcctgaaggtgactggttgggtcgtgcaatatcaagaaaacttgattggtcttggtgtggatgaatcacttgcccaagtttgttctgaaagtggtgcattggatcccctcatgaacatgtatgttgagcgtatgcaggcaacaaccaagaaatggtacagcaacattttggaggctgacaaaacacaaccaccaaagagtacagaggatggaaaactatatacacctgcagcagtggatctattcagaatattgaccgagcaagttcagatagttagagacaacagcacagacgtcatgctatatcgaattgcacttgcggttattcaggtcatgcttgattttcaagcagctgagaggcaaaggcttgaggagccagcttctgatgttggtctggaatctctatgtgcattgattaacaataatctgcgttgctatgaactttcatcagagctaagtagcagtacattggaggcgcttccacaaaactatgctgaacaggttaattttgaagacacctgcaaaggatttcttgaggttgccaaggaggccgtcctccaaactgttagtgttatttttgaagacccaggtgtgcaggatctactcgtgaagctttaccagaaagactggctggagggaatggtcacagaatatcttgtcgcaacatttgctgattactttggtgatgttaaaatgtatattgaagaaagatcatttcgaagatttgtggaggcttgcatagaggaaacaattgtggtctatgttgaccatctcctttctcagaaaaactacataaaagaagaaacgatagagaggatgaggttagatgaagaggtgcttatggatttcttcagggaacacatcaacgtgacaaaagttgaaagcagagtgcggattctggcagatatgagggagctagcttcagctgagagtttggatagctttactctcatttacactaatatactggaacatcaacctgattgcccgcctgaggttgtcgagaagcttgtggcaatgcgggaaggcattccaaaaaaggaagcgaaggaggttgtacaagaatgcaaagagatatacgagaactcgcttgtggatggcaaccctcagaagtccggttttgtgtttggcaaattgaagtgcttgacagcaaagaaaggcatatggaggaagcttgggcagtaagtgtggacttgagcagagtggacagaagtaccacctaggcaaagactgtacgtttcacttctctatgatcattcttttgttcttttgtcgatgctactgttgggtttcacgtttagactatcagtgtgtactcagcttgaggagcaaaaatgtatattccactttgcttagctacagaggattttggtgtaagaatatgtaatttattcaataaaatggttgctatttgc

SEQ ID NO: 20315 - DNA, 916 bp, Zea mays
  Clone ID: LIB3180-030-H3_FLI
gcaagccaagttcgacgagataaaaaagaaagctgctgccggtggggatgcagatgatgcttctgatgatgtggaagaggacgaggacagcgattcctctgattcagacatcgaccctgagctggagaagataattgctcagcgcgagcgcgccaggaatggagcaaggtggcccaggaaggaaaagaagtcgtccagccaccaccataggaacagcagcagcaagagaaaatcaaagcacacaaggagtaggagtgatgatagtgaggaggatgaaggcagaagaggccgggacaggaagaagatgtctggcagatcgaagaagcatgaaagatctgatgaggctagcagcgatgacactgattcagatagacagaggcacaggaagagcaggaaggacaggaagagcaggaaggacaggaagaggaggagccaccgcaggagtgacgacacgttggatgagaaggatgtatctggaggtgaagaaaggaggcatcaacgtcaccagcggagccatcactggagggatgcatctgactgtgacaatggtgacagtgattctgcacatgacaagaagcaatccagcaggcggaggaggcattgccagtcagaaaacagtgggctagatgaggatgagcgacatgaccaccggggagcaaagcgatcacggaagaatagggaccacaagaggagctaaagaggagcattgaattggtaattcatattcgatgatgttatcgagttcctgtagtcatcagctggtctgttgtcttctcataagttggaaacatttgaaatatgatgcttaatatgtgtaacaatataacatgttggtgtattactgtatgtctgaactatacgtcgagtctattatgtgttgatgattcaataattgatacattgacaaggatttttt

SEQ ID NO: 20316 - DNA, 950 bp, Zea mays
  Clone ID: LIB3180-030-H9_FLI
cttctccagcgtggcacagagctagggtttctcccacccgtcgccgccgccggctgcacccgccgtcgtccacggccggtccctccagctcccgccgcgcgcgctcccgccgctggacgctccagctcttgcacgcattctcggccgccgtcgcgcctgcacgccgctccagcttgcccgcgcgtgctcccctcgactgctctagcttctgcacgccgtcggtcaccaatcgtcgcctactacgactcggccttcaagcggcagcttcatccgcgacgtccgcgtcgccgtcttgcgccacgacctcacccgagcactctgcctactcccgaagccctcctccgcggcgcccgccccagcagttcctcctccgcagcgcccgccccatcagttcctcctccgcggtgcccgtcgacccgccgagcaccagcagcagcgtcgccggtggttgagctccatcgcctttgccgcgctccatctcttcaggaagtgccctgctccaccgcccacctgtacggcagcctggcccagctattcggctgcctcggagatctcgctgcctcgccggcctgaaatttgtgagtgcaaatccgtcagcattggactgttttactcatctataggatctgattttgggtgggcgcagttgcggagatgcagaggctgggggatttcaggctccctcccttcttcaactacccgccttacttcacgtaattctcccttgttttcgctctatcttctgccttttattctcttccaaacgctccgacgactaggtctttgcctgctctcagtaacaatgccactagatgtttctgttatctgcaaccttgcagctgtatgtggaagagatggtccatgatgctgaattggttatggatgtagtctcgatcaatgtattcaggatgaatatttcaaagcgaatttgcactccaatatgttgaact

SEQ ID NO: 20317 - DNA, 2246 bp, Zea mays
  Clone ID: LIB3180-031-A4_FLI
ctagtcccctgctccattctcagccgccgccaatcccttcccgtgctccgcaaccgctgagtgagaagaagagatggccggcaagggcgatggcccggctatcggcatcgatctcggcacgacgtactcttgcgtcggcgtgtggcagcacgaccgcgtcgagatcattgccaacgaccagggtaaccgcaccacgccctcgtacgtcgccttcaccgactccgagcgcctcatcggagatgcggccaagaaccaggtcgccatgaaccccatcaacaccgtctttgatgccaagcgtctcatcggcaggaggttcagtgatgcgtctgtccagagtgatatcaagctgtggcccttcaaggtcatttctgggcctggtgagaagccaatgattgttgtccagcacaagggtgaggagaagcagtttgcagctgaagagatctcctctatggttcttatcaagatgcgtgagattgctgaagcttaccttggtagcacgatcaagaatgctgtggtcacagtccctgcctacttcaatgactcacagaggcaggccacaaaggatgctggggtgattgctggccttaatgtgctgcgtatcatcaacgagccaacagctgcagctatcgcctatggtcttgacaagaaggctaccagtgtcggtgagaagaatgtcctcatctttgatcttggaggtggtacctttgatgtctccctcctcaccattgaggaaggaatctttgaggtcaaggccacagctggtgacacccatcttggtggtgaggactttgacaacaggatggtcaaccacttcgtccaggagttcaagaggaagaacaagaaggatatcactggcaaccccagggctctccggaggctgaggaccgcttgtgagagggcgaagaggactctgtcttccactgcccagaccacgattgagattgactcgctgtatgagggcatcgacttctactccaccatcacccgtgccaggtttgaggagctcaacatggacctgttcaggaagtgcatggagcctgttgagaagtgcctgagggatgccaagatggacaagagcaccgtccatgacgttgtacttgttggtggctccactaggatccccagggtgcagcaactgctccaggacttcttcaacggcaaggagctgtgcaagaacatcaaccccgatgaggctgtcgcctatggtgctgctgtccaggctgccatcctgagcggtgagggcaatgagaaggtgcaggacctgcttctgctggacgtcacccctctgtccctgggtctggagactgctggaggagttatgacagtgctgatcccgaggaacaccaccatccccaccaagaaggagcaggtattctccacctactcggacaaccagcccggtgtcctgatccaggtctacgagggtgagaggacccggacacgcgacaacaacctgctgggcaagttcgagctctccggcatcccccctgcaccccgtggtgtgccacagatcaccgtgtgctttgacatcgacgccaacggcatcctgaacgtgtctgccgaggacaagacaacggggcagaagaacaagatcacaatcaccaacgacaagggccgtctctccaaggaggagatcgagaagatggttcaggacgctgagaagtacaagtctgaggatgaggagcacaagaagaaggtggaggccaagaactcgctggagaactactcctacaacatgcgcaacacgatcaaggacgagaagattgcgtccaagctgccggccgatgacaagaagaagatcgaggacgccatcgacgcggccatcagctggctggacgccaaccagctcgccgaggcggacgagttcgaggacaagatgaaggagctggagagcctctgcaaccccatcatcgccaagatgtaccagggcgcgggtgaagacatgggcggcgctggcggcatggacgaggacgcccccgctggcagcggcggccctggccccaagatcgaggaggtggactaagcggtttgttgtcagtcttgagcgtgctgcagttgctggctggcccagtcgctgccgcgagttatcgtcgtcggtcggtgcggtgtgtccgcttaaactttatttgtggtgggctggtacttttgtggtggttattttttttggacctcgtgatagtcggtcggttccatgttatcgcggctactggcaaaccttaagtgatacggtaattcttcttttcggt

SEQ ID NO: 20318 - DNA, 1279 bp, Zea mays
  Clone ID: LIB3180-032-A2_FLI
gcgaggtggaggagaacatggcggcgtggctggttgccaagaacaccctcaagatcatgcccttcaagctcccgcccgtcggcccttatgatgtccgcgtgcgcatgaaggcagtggggatttgcggcagcgatgtgcactacctaagggagatgcgcatcgcgcacttcgtggtgaaggagccgatggtgatcgggcacgagtgcgcgggcgtggtcgaggaggtgggcgccggcgtgacgcacctgtccgtgggcgaccgcgtggcgctggagccgggcgtcagctgctggcgctgccgccactgcaagggcgggcggtacaacctgtgcgaggacatgaagttcttcgccaccccgccggtgcacggctcgctggcgaaccaggtggtgcacccggccgacctgtgcttcaagctccccgacggggtgagcctggaggagggcgccatgtgcgagccgctgagcgtgggcgtgcacgcgtgccgccgcgcgggggtggggcccgagacgggcgtgctcgtggtgggcgccggccccatcggcctggtgtcgctgctggcggcgcgggccttcggcgcgccgcgcgtggtggtcgtggatgtggacgaccaccgcctggccgtggccaggtcgctgggcgcggacgcggccgtgcgggtgtcgccccgcgcggaggacctggcggacgaggtggagcgcatccgcgcggccatgggctcggacatcgacgtcagcctggactgcgccgggttcagcaagaccatgtcgacggcgctggaggcgacgcggcccggcgggaaggtgtgcctggtcgggatgggccacaacgagatgacgctgccgctgacggcggcggcggcgcgggaggtggacgtggtgggcgtgttccggtacaaggacacctggccgctgtgcatcgacttcctgcgcagcggcaaggtggacgtcaagccgctcatcacccaccgcttcggcttctcgcagcgggacgtggaggaggccttcgaggtcagcgcccgcggccgcgatgccataaaagtcatgttcaacctctaggcgggcaagccgcctccctctcggtccagccgtctaggcgccgtcgccgttgccgtatgcccctgcccccacccaggccacagctcctggaataaaaatgacagaaaagaaactttatagttcgatgaatgggcagtttgccgtggttttggaataatttggactttgtcttctttcgcttctgttgtcgtaccattgtcttaatcgatttgtggatttcg

SEQ ID NO: 20319 - DNA, 396 bp, Zea mays
  Clone ID: LIB3180-032-C11_FLI
ccggtctcctcctcctccgccgccgccgccgccgcttccctcgtctccgcccgccgaagccatgccgtcgcacaagaccttccggatcaagaagaagctggccaagaagatgcgccagaaccgccccatcccctactggatccgcatgcgcaccgacaacaccatcaggtacaacgccaagcgcaggcactggcgtcgcaccaaactcggattctgagcggtggaagaaatgctggctaaagacgcctagagggtatagggctctgcaagctaggaagctcttgtttaattttttttgcttgtgttatttgtcattgtagtaccatgttttgtctgatggttaaagaaccgcctttatgctatggtgaatttatttaaccttgcagcgccttaatc

SEQ ID NO: 20320 - DNA, 1489 bp, Zea mays
  Clone ID: LIB3180-033-B2_FLI
cctccgccacctccaccctcgaatcgttccccaccatggcgtcgcagggatcctccgtcttcgccgcactcgagcaggccccggaggaccccatcctcggagtgaccgttgcctacaacaaggatcccagccccgtgaaggtcaacctcggggtcggcgcctaccggaccgaggaagggaagcccctagtgctgaacgtggtcaggcgcgccgagcaaatgttgatcaataatccgtcacgtgtcaaggagtacctaccaatcaccggtctggctgaattcaataagctgagcgctaagcttatctttggcgctgacagccctgctattcaggagaatagggttgctaccgtgcagtgcctatcgggtactggttctttaagagtcggaggtgaatttcttgcaaggcactatcacgagcgcactatctacatcccacaaccaacctggggaaatcacccaaaagtcttcaccctatctggcttgaacgttaggagctaccgctattatgatcctgcaacatgcagccttcacttcgaaggactcctggaagacctcggttctgctccttcaggttcaattgtactgctgcatgcctgtgctcacaaccctactggagtagatcctaccatcgaacagtgggaacagattaggcagctgatgagatcaaaatcactgcttccgttctttgacagtgcctatcaaggctttgcaagtggaagtcttgacaaagatgctcagtcagtgcgtatgtttgttgctgatggtggtgaacttctcatggctcagagctacgctaagaacatgggattgtatggagagcgtgttggcgctttgagcattgtatgtaaaagtgccgatgtagctgttagggttgaaagtcaactcaaacttgtcatcaggcctatgtattcaaaccctcctcttcatggtgcctctatcgttgctaccatactcagggacagcgagatgttcaacgaatggactctggaactgaaggccatggctgataggatcattaacatgaggcaacaactatttaatgcgctgaaatccagaggaacccctggtgattggagccatatcattaagcaaattgggatgtttactttcactgggctgaatagcgaacaagtcgcattcatgaggcaggaataccacatttatatgacatctgatgggaggatcagcatggccggtttgagcatgaggactgtgccccatcttgcagatgccatacacgctgcagttactcaactgaaatgaggatagtatcgcagctttcgtgaataaaacctgaatcacccacaacaatgttctaagtactcagccagtggtatttactggttgacctactgtagtttgcgtcggaatagatatgtttttttactcttcgtggggcagttttgtactggtggattcataaggactctgattatggtgcgttcggaacttataataataagcacatgaaattttgcttcaggtgc

SEQ ID NO: 20321 - DNA, 828 bp, Zea mays
  Clone ID: LIB3180-034-F1_FLI
cctgaatgaaggacaggttcccccttcagagttgtggaggtcgttgtcagccctccttatgtcttccttcctgtggtcaagagccagctgcgccaagagttccatgttgcggctcagaactgctgggttaagaagggaggtgctttcaccggtgaagtcagtgctgagatgctcgtcaaccttggtgttccctgggtcattcttggacactctgaaaggagagctctgctgggagaatcaaatgaatttgttggagacaaggttgcgtatgccctgtctcagggactaaaggtcattgcatgtgttggtgagacacttgagcagagggaggctgggtctaccatggaggttgttgctgcacaaacaaaagcaattgctgagaagatcaaggactggagcaacgtagttgttgcctatgaaccagtttgggctattggaactggtaaagttgccaccccagctcaggctcaggaagtgcacgcctccctgagggattggctaaagaccaacgtcagccctgaggttgctgaatctactaggatcatttacggaggctctgtaactgccgcgaactgcaaagagctagcagcacagcctgatgtcgatgggtttcttgtcggtggagcttctttgaagcctgagttcatcgacatcatcaacgcggccaccgtgaagtccgcttaagatgttacgctgaagacgaacatactttttttttgctcaactgtgctatgtaagctagtagcttttgcgcaggagcagagactgttttgcctgcccccaacttttagcttgagcttgctaataatgtttacctctggacgtatc

SEQ ID NO: 20322 - DNA, 1751 bp, Zea mays
  Clone ID: LIB3180-035-F2_FLI
catgactgcgtcatgcatgccaattaattagccaccactccatcgaaaggacccgatcaaactttagtctactcgtcctcctcttctcgcagcagccagcagaccaatcgggacaagcaaactcccccgattagtttaagcagcccgggcccggcgacgaccagctccgttccgcgcggggatttaaacgcgcgaagcgagaaggcacgcagcaggcggcagcggcaagcaacgaacgcgatcgcgcgccgacgacgacgcgcggtgccggcgcctggtggtgccgtgttgcggactccgctgcatcgcctcggtcggtcgtcgtcatatcatgggtgtccggctgccggtggcgtggtccgccgtcctcgtcctcctcgtgcgggcggccgtggcgcgggagtacgcggccatcttcaacttcggggactccctggtggacgccggcaacctggtggtggacggcatcccggactacctggccacggcgcgcctgccctacggcatgacccacttcggctaccccaccggccgctgctccgacggccgcctcgtcgttgacttcatcgcgcaggagctgggcgtgccgctgctgccgccgtccaaggcgaagaacgcgacgttccaccgcggcgccaacttcgccatcacgggcgccacgtcgctggacacgcccttcttcgtggagcgcgggctggggaagacggtctggaactcggggtccctgcacacgcagatccagtggttccaggacatgaagcccaagctgtgcgggcaggagcaggagtgccgggacctgttccggcggtcgctgttcatcgtgggtgagttcggcgggaacgactacaactcgccgctgttcgcgttccggccgctggcggaggcgcacgacatggtgccgcacgtggtggagtccatcgggcggggcgtggagcggctgatcgcggagggcgccgcggagctggtggtgcccggggtgctccccatcggctgcttccccgtctacctctccatcttccgcaggcagccggccggcggctacggcgcccgcagcggctgcgtcaaggagctgaacacgctgtcgtgggtgcacaacgccgcgctgcgccgcaaggtcgaggagctccgcgccaggcaccccggcgtgcgcatcgtgtacgccgactactacacgccggccatccagttcgtcctccacgccgagaaatacgggatgctgaagcagacgccgcgggcgtgctgcggcgcgccgggcgtgggcgagtacaacttcaacctgacgtccaagtgcggcgagccgggggcgtacgcgtgcccggacccctccaaccactggagttgggacggcatccacctcacggaggccgcctacggccacatcgccaggggctggctctacgggcccttcgccgacccgcccatcctcgacgccaagcacctcggctaacgtcgtccatccaccgtcttctccagcgccggccccgcccgcacggccagtacagactactcctccggctctgggcgccgtcgtatgtgcgtccttattaccgacctgcaaaattggattggttgcttgtagtagaagtgtagagagagcgagacagagatagatgacaaacacgaaacgaaccggaaggaggacgataaggcgcgcgtgccggccggtcttttactcctctctgttcatagctgtcccatatcgtagtcaagaaaactgagcagggaaacaaaccgggcgatatttctgttgc

SEQ ID NO: 20323 - DNA, 1736 bp, Zea mays
  Clone ID: LIB3180-035-G10_FLI
cgcagtcggctgccgcagactggtagtagccggcgcgccgtcaccgtatcctcagatcagcggcgagcagataccacaccactctactgacgcccgacgagcagtgtaacattttccttcagccatgggtaaggagaagactcacatcaacattgtggtcattggccatgtcgactctggcaagtcgaccaccactggccacctgatctacaagcttggaggtattgacaagcgagtgattgagaggttcgagaaagaggctgccgagatgaacaagcggtcattcaagtatgcgtgggtgcttgacaagctcaaggctgagcgtgagagaggtattacaattgatattgccctgtggaagttcgagaccaccaagtactactgcactgttattgatgccccgggacaccgtgacttcatcaaaaatatgatcactggcacttcccaagctgactgtgctgttcttatcattgactcaaccactggtggttttgaggctggtatctccaaggatggccagacccgtgagcatgctctccttgctttcacacttggtgtgaagcagatgatttgctgctgcaacaagatggatgctactacacccaagtattcaaaggcccgttatgatgagattgtgaaggaagtctcttcctacctgaagaaggttggatacaaccctgataagatctacttcgttccaatctctggttttgaaggtgacaacatgattgagaggtccaccaaccttgactggtacaagggcccaaccctacttgaggctctggacttgatcaatgagccaaagaggccttcagacaagcccctgcgtctcccccttcaggatgtgtacaagattggtggtattggaactgtccctgttggacgtgttgagactggtgtcattaagcctggtatggttgttacttttgggcctactggtcttactactgaggttaagtccgttgagatgcaccatgaggctctccaggaggcccttcccggtgacaatgttggcttcaacgtgaagaatgttgctgtgaaggatctgaagcgtgggtatgtggcctccaactccaaggatgaccctgccaaggaggctgctagcttcacctcccaggtcatcatcatgaaccaccctggccagattggcaatggctatgccccagttctggactgccacacctcacacattgctgtcaagtttgctgagctcgttaccaagattgataggcgatccggcaaggagctggagaaggagcccaaatttctcaagaacggtgatgctggtatggtgaagatggttcccactaagcccatggtggtggagaccttttctcagtatcctcctcttggtcgatttgctgtccgtgacatgaggcaaacggtggctgtcggagtcatcaagagtgtggagaagaaggacccaactggagccaaggtgacgaaggctgctgccaagaagaaatgatctatctggctggtgacgaaggctgctgccaagaagaaatgatctatctggctggtgctgtgcttgcttgttggttacctcgtggaagcttaaaatatctcgtcttgttgacatccttgcagttgtcgcgtgaacaagtaatctatgatggcaatgtttgcctggtcatgaagtattattactttcgttgaaaccgtgatgctattaagacttaattttttttatggaacatcgaatgtaaggcatacatggttatgagttttgtact

SEQ ID NO: 20324 - DNA, 1412 bp, Zea mays
  Clone ID: LIB3180-035-H10_FLI
cccaacaccacctcgcctgcgatctccgtagcctccgtcgcgtcgagcatcgatcatgtcggcctactgcggaaagtacaaggatgagctcatcaagaatgctgcctacattggcacccctggcaagggtatccttgctgctgatgagtccactggcaccattggcaagcgcctttccagcatcaatgtcgagaacgttgaggagaaccgccgtgccctccgtgagctcctattctgctgccctggtgctctccagtacatcagcggtgtgatcctcttcgaggagaccctgtaccagaagaccaaggatggcaagccttttgttgatgtcctcaaggagggaggcgtcctccctggcatcaaggttgacaagggcaccattgaggttgttggcactgataaggagaccaccacccaaggccatgacgaccttggcaagcgctgcgccaagtactacgaggccggtgcccgctttgccaagtggcgcgctgttctcaagattggccccaatgagccatcacagcttgccatcgacctgaacgctcagggtctggctcgctatgccatcatctgccaggagaatggtctggtgccaattgttgagcctgagatccttgttgatggccctcatgacattgatcgctgcgcttacgtcactgagaccgtccttgctgcctgctacaaggcgctcaacgagcaccatgtcctcctggagggtaccctcctgaagcccaacatggtgactccaggctccgactccaagaaggtgactcctgaggtgattgctgagtacaccgtccgtaccctccagaggaccgtccctgctgctgtgcctgctgttgtcttcctctctggtggacagagcgaggaggaggccacccgcaacctcaatgccatgaacaagctcagcaccaagaagccgtggtccctgtctttctccttcggccgtgccctccaggcgagcaccctcaaggcctgggctggcaaggtggagaacttggagaaggctagagctgccttcctcgccaggtgcaaggccaactctgaggctaccctcggcacctacaagggtgatgctgccgccgacaccgagagcctccacgtcaaggactacaagtactgagttgcttctctttgcgtgcccgttttggaactcctgcctacgagctaggttgcggagtgtggtttgctcgttagagcttattttcggacatccaaaaaacatgcttcctatgtgggatgatggttatctttatatttgtatgttaattagtctctttgctgttaaatttcgtgtaagttggtcctgccgatggagaatcgagcagccccctttttttgttctatcaactatgctgtaatgctggctatgtatcggcaaaaacaattctatatgctgagttggagtcggc

SEQ ID NO: 20325 - DNA, 587 bp, Zea mays
  Clone ID: LIB3180-036-A3_FLI
cttccaccctgcagcccctgccgtccgtggcgctggcgaccagggacagaatggcgcgcagcagccccgggcggtgagcatgatgggcctcctggaagtggcgaaccggccccttgataactacatgaagcagaacggcctgacgagcctggcgggggagcaaggaggtggcagctccagcacggccacggtcccgccggctccagtggagagtgaggaccggacgtccgatgagggccgtgtcgcgtcagcagagcgggaagcagacgccatggccatcgacgaggccggcgagaaccagcaggacaagcctgccgactctgccgctgccgctgctacttgacggcgtgcgtctgttgtgaatgtgactgatgggtgttgtcggcgtgctttgatggtttcaaggtgttgctcctcctggaggctggagttacttacgtgtacgtatgaggctgtgcaaccaatccccaggttgtatgttgtagaagttctgtaaaccacgatgctcttgtgttggttgctgctgtaatctaaaaacgcttagacctttggattcaataactcaccacatacttgatctgtactgt

SEQ ID NO: 20326 - DNA, 813 bp, Zea mays
  Clone ID: LIB3180-036-B4_FLI
ccattattcctcttcacgcttcacacgcaccgcccgcaggccgtcatcccacgcattcgcatccttccccgctctcgctctctcagccgcagagccactcgtgtcggtgacggcggcgaaggcaatgtcatccctccgcccgtccctcctgctcgtggtgtcgctgctcgcggcggctctgcttgcagcggcgccgtcctccgcgtctcgcgacctccgcccgctccaggcgagcttcgtcgtgcgcggccgcgtctggtgcgacaactgccgcgcgggcttcgagacccccgcatccacctacattgccggagctaaggtgagagtcgactgcaaatcgaagaccaccggggcaaatacatgcagcttcgaggggcatactgaccgcaccggcacctacaacatccttgtcattgatgagcatgagcatgagctctgcgagtccgtccttgtgagcagcccggacaaggggtgtgccaatgttgtggctggtcgtgagagggcccccgtcttccttaccagcaacaacggtgttgcatccaacgttcgtttggcaaatgctctggggttccagaaggacgttgcccttcctagatgcgcgcagatcctcaagatgtaccaggatgaggatgaccgtgtctaattacgcctgagtttagatgtacttggcgagttacaatatatttatgtggtgtctgaaatgttctagaacctctaaatctattactaagagcaacgatattgtcgcttcttaaaccttagtactacggatgttatgagctaataaatatatttcgctaatgtgatgcagtt

SEQ ID NO: 20327 - DNA, 3494 bp, Zea mays
  Clone ID: LIB3180-036-B7_FLI
ccaatcccaatcccgatctccaagcaaacccacctccccggctgtcccccactcgccgatccagatctcctccactccaaccggacgcctccgccgccgctggcatcggtcgagccacacgcgcacgccgctgaggaacccggagcgggcgccggcaatggagcagctgcggacgatcgggcgggagctggcgatggggtcgcagggcgggtgggggcagtccaaggagttcctcgacctcgtcaagtccatcggcgaggcgcgctccaaggcggaggaggaccgcatcatcgcgcgcgagcttgagcacctcaagcgccgcctcgccgaccccgacgtgccacgccgcaagatgaaggagctcctcctccgcctcgtctacgccgagatgctcggccacgacgcctccttcggccacatccacgccgttaagatgacccacgacgagtcgctcccgctcaagcggaccggttacctcgctgtcgcgctctttctcgacgaacgccacgacctcgtcatcctcgtggtcaacaccatccagaaggacctcaggtcggacaattacctcgtcgtctgcgcagcgctcaccgccgcgtgccgccttatcggtgaggaggccatccctgccgtgctgccccaggttgtagagctgctcgcgcaccccaaggaggctgtgaggaagaaggccgtcatggcactacaccggttctaccagcgatccccctcctccgtctcccacctcgtctccaacttccgcaagaggctctgtgataatgatccaggggtgatgggtgcaactctttgccccctctatgacctgattttggaggaaccaaattcgtacaaggatttggttgttagttttgttaacatcctcaaacaagttgcagagaggagactaccgacttcctatgattaccaccaaatgcccgcaccgtttattcagataaaactattgaagatacttgctgtacttggtagtggcgataaacaagcaagtgggcatatgtacactgtattgggtgacatattcaggaaaggtgacactgcaagcaacattggcaatgctatactgtatgaatgcatatgctgtatttcatccattttcccaaaccctaagatgctagaggctgcagctgaaacaacatcaaagtttctgaagagtgatagtcataatcttaagtacatgggtattgatgctcttggccggctaataaaaataaacccagatattgcagaagagcaccagctagctgtcattgattgcctagaggatccagatgacactttgaagcgcaagacctttgagcttctttataagatgacaaaatcaacaaatgttgaagtgattgttgataggatgattgaatacatgatcaacataactgatcatcattataagacagaaattgcatcacgttgtgttgaacttgcagagcaatttgcgcctagcaatcagtggttcatccagaccatgaacaaagtctttgagcatgccggagatcttgtcaacatcagagtggcgcacaatctgatgcggctaattgctgaaggctttggagaggaggatgaaggtgctgacagtcagctaagatcatcggctgtggattcatatctccgcattgtcggagagccaaagcttccttcttcgtttctgcagataatatgctgggttttgggggaatatggaacagcagatggaaaatattcagcttcttatattattgggaagttgtgtgatgtggcagaggcccacctcactgatgacactgtcaaggcatatgcgatctcagcaattctgaagacatttgcgtttgaaatcactcttggaagaaagatcgatttgctgcctgagtgtcaaacattggtagatgaattgtcagcttcacattcgacggacttgcagcaacgggcatacgagctacaggctttactaggcttggacaaaactgctgttgaaagtgttatgcccgcagatgcaagctgtgaagacattgaggtcgacagaagcctctcatttctaaacagttatgtgcagcaagccttggaaaatggtgcgtccccttacattccagagagtgaacgctctggtgttataagtgtcggcagctacagaagccaagaacaacaggaaacatctgcccatactcttagatttgaggcctatgagatgcctaaaccttcgttgccactagcaacttcacaaaccagcatgtccacaccacctactgatctggttccagttccagaggcaggctactacaaggaagacaatcaaacatcaatgtctcaaccaccaagtgatgcaatttctggtgagtttggtgtcaaacttcgccttgatggtgttcaaaagaaatggggaaggccaacatattcttcttctacaccctcaagctcgatctctagtcaaccaacacccaatggggcctctcattctgatgggggagggtcaagttcgcaaccacgggagtcatcatacggttctaagagacagcagggcacggaagtttcagcagaaaagcaacggctggctgcttcactttttggttcagcagcagctaaagctgataggaaagcacaagcttctcgaaagacagcaaaggacagtccctcaactgagaaagtggctaccactaatgtgactgcccagcctgttaaggagcaagtaatccctgctgcaccaccgcctgatctgctggatctgggtgatgagcctgtttcatcgagtccaccgtcggctgaccctttctcacagctagaggggctccttggaccagcatcggctgccccggtgctttctggaactccggctaccagcacttccaaagcaccaggccttctgtcaatcttctcagatgatgtaccaaccggagtgactagtgtgtccaccgatcccactctaggtgatgttaattcgatgggctcccgcaaaggagcagctgcagtggcttcaatgaagggcccgagcctccaagatgccttgcaaaaggatgcggctgcacgacaagtaggagtgacaccaacagtgaacaaccccaatcttttcaaggacttgctaggctgaaggggacagtagggcacaccatatgctctgtgtggcctctttgggtacgtggagttcgtctccgacatggttcgatcaccgaaacgacgccgaactcgctgtttgatcagcgtaggctggggttttagggttacaagggctaatatttgtttgagagtcacaagacacgacctatctccttccaattgtggtttgtggagatttgtggatggttgcgggtatttttttttcctttacgctcttgtaattttgtcctgagactggtgtacatgtgtctacatgatgtgtaatttgtacatgaagaccatggtccgtccagaagcgtatgccgtcgtctttttgttcattcatgtaggaggggcatgctcatctgtgctttcagagtttcccatatatgttgattaatataacaattgatgtcattctc

SEQ ID NO: 20328 - DNA, 1404 bp, Zea mays
  Clone ID: LIB3180-036-B8_FLI
taaccattcctcccaacaccacctcgcctgcgatctccgtagcctccgtcgcgtcgagcatcgatcatgtcggcctactgcggaaagtacaaggatgagctcatcaagaatgctgcctacattggcacccctggcaagggtatccttgctgctgatgagtccactggcaccattggcaagcgcctttccagcatcaatgtcgagaacgttgaggagaaccgccgtgccctccgtgagctcctattctgctgccctggtgctctccagtacatcagcggtgtgatcctcttcgaggagaccctgtaccagaagaccaaggatggcaagccttttgttgatgtcctcaaggagggaggcgtcctccctggcatcaaggttgacaagggcaccattgaggttgttggcactgataaggagaccaccacccaaggccatgacgaccttggcaagcgctgcgccaagtactacgaggccggtgcccgctttgccaagtggcgcgctgttctcaagattggccccaatgagccatcacagcttgccatcgacctgaacgctcagggtctggctcgctatgccatcatctgccaggagaatggtctggtgccaattgttgagcctgagatccttgttgatggccctcatgacattgatcgctgcgcttacgtcactgagaccgtccttgctgcctgctacaaggcgctcaacgagcaccatgtcctcctggagggtaccctcctgaagcccaacatggtgactccaggctccgactccaagaaggtgactcctgaggtgattgctgagtacaccgtccgtaccctccagaggaccgtccctgctgctgtgcctgctgttgtcttcctctctggtggacagagcgaggaggaggccacccgcaacctcaatgccatgaacaagctcagcaccaagaagccgtggtccctgtctttctccttcggccgtgccctccaggcgagcaccctcaaggcctgggctggcaaggtggagaacttggagaaggctagagctgccttcctcgccaggtgcaaggccaactctgaggctaccctcggcacctacaagggtgatgctgccgccgacaccgagagcctccacgtcaaggactacaagtactgagttgcttctctttgcgtgcccgttttggaactcctgcctacgagctaggttgcggagtgtggtttgctcgttagagcttattttcggacatccaaaaaacatgcttcctatgtgggatgatggttatctttatatttgtatgttaattagtctctttgctgttaaatttcgtgtaagttggtcctgccgatggagaatcgagcagccccctttttttgttctatcaactatgctgtaatgctggctatgtatcggcaaaaacaattctat

SEQ ID NO: 20329 - DNA, 2266 bp, Zea mays
  Clone ID: LIB3180-036-C7_FLI
gatagagaaagagagcctgtcagcccaagaaaaggttcctcccctccttccccacctcgccctcagccctcatcatcctctaacatccgattgtgccctgtgctctgcggttctcggatccaagatttcgccggccggccgccggcggtggctccggcctccgggagcgggagaaagactggatttttcgggccatggagatgtggcctgatccgttcaggcccgggcggtggggtggcttcctgagcaggtctgattcgtatcggttcaaatgatctcggcggcttgattggtcggttccgcttccgccgggggatcggagctagggcggtggtttcttggccggccggtggattcatcggctcgggtctggtgggatcttggtggttgctggttcagcacacgagccgcaggtctgcgtagatcccctcttcgcttccgtggcggatttgtactgctagggttttggttgggtctggtggaagatgattaagcagatccttggcaggctgccgaggaagccggggaaggctggggatagccgggaagctgctgctgcggggaatggaactgagccgtcgaattcctacagtgttgcgaggagcatggacccaggtaacaaaagggctggaaatggagattacccagttccatctggtgtaattccgaatccagtgatgaatggggctgtggtgtatcactccaatgaacccttaccggcattcaaggacgtgcccatgtcagagaagcagaatttgtttgtcaagaaggtgagcctatgttgcgctgtgtatgactttgtggatccaactaagaacctcaaggagaaggaggtgaagcgccagacacttatggagcttgttgattacgtcacttccgctaatggcaagttctctgaggttgtcatgctggagatcacaaagatggtgtcaattaatttgttccggagctccagccccacacctcgtgagaacaaagccattgaaggggtcgatctggaggaggatgagcctctcatggatcctgcatggtctcacctacagatcgtgtacgaggttttcttgagatttgtagcttcacaggagacagatgcaaagttggccaagagatatatagaccattcctttatccttaggctgctagacctttttgactctgaggaccccagggaaagggactatctaaagacgatacttcatcgaatatatggtaaattcatggtccatcgaccattcatcaggaaagcaattaacaacatattctacaggtttatattcgaaacagagaaacataatggtgttgcagagttgttggagatcctgggcagtattatcaatgggtttgcccttccacttaaggaagagcacaaattgttccttgttcgtgcactgatccctcttcacaagccgaaatgtgtatctatgtaccatcagcagctatcgtattgcatcacacagtttgttgagaaggactgcaaacttgctgacacagttattaggggtttacttaaatattggcctgtgacgaacagttcaaaggaggtgatgttcttgggtgagttagaggaggttttagaggcaacacagcttgcagagttccaaagatgcatggttccactcttccgtcagattagccgtagcatgaacagctttcatttccaggtggcagagcgggctctgtttctctggaacaatgaccatattgaaaccctaattaagcaaaactacaaggtgctgttaccgatcatctatccagcactcgagagaaactccagagatcactggaaccaagctgtccgtagcctgacactgaacgtacgcaagatcttctcagaccatgattccacattcttcggggagtgcgtccagaggttcagtgacgaggagctcaagcaggcggaatctgattcaaaacgagacgccatgtggaagcgcctggaggaaatgggtgcctcaaaacctggcgggaaccatcccttaggtgcacccaatggcaaacccagtcacgctgctggctagaatacaatagcccaccgtaccagccgcatccgtgtaactcttcggctctcgtgccaagatctcctggaacctgggttgtgattttagctttgggattctttttgcgttggtttgcccctgttgtaggtgggtccgatgtgtttggttttgtaagaactgtatgttcaaaatgtacacacggaggaatttgacagatttggcatgtgtagcaacattaatcagaattactatcatatagtccaataaac

SEQ ID NO: 20330 - DNA, 1579 bp, Zea mays
  Clone ID: LIB3180-036-F5_FLI
gcctggtctctccaactcacgctttttcaccttcggcagtctggctccatccgtctcctgcactgaccttttcctccacgtttccggcaactgcaagcaaccactgatccagcccgttctgtgtcccggcgaatggtgacgaaccaggacgcggaggcggcagcgccaggggcaggggcgacggtagatccgatgcggctagcatcgcggtggcgatcccggccagagtggaactgcgcgtcggcggagctggaggctgagccgtctgagctcaacaccatcaacagctcgggactcttctccgtcgtctctaccgacaagttatcggtaaaatacctcggtagccatcaccacggccacgacgtcggtgtcgtgcaggccgaccgtcccgcgccgacgcgccgagccgtgtactacttcgagatgggcgtcaggaatgctggatacaaggggcagacatccattgggttcacgagcgagagtttcaagatgaggcgacaaccgggggttatattcttgaggacaaaatgaggcagcaatcagtgtctgataaattgaacttggagccagacatcagccattggattgtccgttcatatctcctacattatggataccaagatacattaaatgcttttgacacggcaaatgcaactgatcgccccaccagtcgccaaaatggtcatgcagaacctcacgaaatgtatggtcttagccatagaaaacttttgcgtcagcttatcatgagtggagatattgactctacattcaaaagacttcgggagtggtatccgcaagtgataaaggatgagcaatcggttatttgcttcctactccgttctcaaagattcatagaatatatcagggctgaacaactggaggttgctgtgaaatatggtcgtgctaacctggcaagcttcttcactcacaaagcttttgaggggctgctgaaggatagtgtggccctacttgcgtatgagaagcctacagaatcatgcttgggatacctgatggactcttcccagcgtgaatttgtggcggacgcggtgaacgcggctgtcctgtcgacgaaccccactgtgaaggaccctgagagctgcctttactcgtgtctcgagaggctactaaagcagctcacagtatgtagctttgagcgacgtgcattcaacaactaccaaggagatgcattcttactccacaaagaagtgcagaattatgaaaggtctaggcgctcataggcatcgggtttgatgcgcatctcagaagtaaactcagatgctagagctagactcccaagtctcaactgctctttgaagggacgaaggttcagaacgaagtggtcaaccatgctaagcacaaatccttccccttgatgcagcacccctactttcggaagggtggatacaagatttcgcagacagaggtcaggctttcggaaggtgtcttatcctccctgtaatcagaaaactcagtcagatacgccaacgtttcagtctccctagttttttttgttggttggctaatatgctgattgacattgacattgtggatgctaaaaagtaaagatgcttcatgcttc

SEQ ID NO: 20331 - DNA, 1998 bp, Zea mays
  Clone ID: LIB3180-036-H11_FLI
ctcggagaagaggagcagcacggcacggcagctgtggcgaggaaggctcctgtcccatcccaacccagttagcagccgcccaaggaggaggagatccaatcggcgtgcgggcgtccgcggtccatccatcgatccaattccaatctgcaggttatactcaaactgcacacagtagcatccttctggtacagtaacaaaggatttggaacccagccctctgttctccaccaccgcttcgaagatgccgcaggtaatggtggtggcacggaacttcatggatatggtggctgctcttcctgcgggcaagcttgatatgctctatgactcagcctttatctgtgaggcagtactcaggtcacttcccccactggcaaagaagtatgcactgcagatgttgtatgtgctggcaccagtgaccgctgcagcaatggaagagtgggtgcttgatgaatatgctgccaagcataaggttgccattgataagcttctacagctcagggtctttgttgaagtgcgcgacagacgacgggacgtgagctacaagatgaatcagaagttccagggaaacatgcagaagtatttggttgatggtgggagtttaccaagggaacctttaccattaagtgtcactggtcgattgcccacaccagcagatctggaagcctatgctcttgatcaatgggagtgcttcttgttgcaattgatcaattcatctcaagtcgaaaaagggtcaagttttagctcctccatgatgaagacgtttcagcgtggtcttctgagttcaagggatggtgaagcttcaaagttgactgaaaatggcttccaatttcttctgatggaaacaaatgcacaactttggtacataatgagagaatacatttcatctgctgaggaacgtggagtggaccctacggagctgatatcatttctcttggaacttagctttcataaattgggagcggcttatagcttgaacactctgactgatgtccagaggattgccatcagggatcttgcagaattaggactagtcaaacagcagcagggtcgaaaggatagctggttcattcctacccaattggctactaatctttcagcaagcttgtcagattcgtcatctaacaaagagggatttgtggttgtggagacaaactttcgaatgtatgcatactctacttccaagttgcactgtgaaattctacgcctttttgcaagggtggagtatcaacttccaaacctcatcgtaggagctgttacaaaagaaagtatctatggtgcttttgaaaatgggataactgctgagcagataatttcatttcttaggcaaaatgctcaccctcgtgttgctgacaagatacccgctgtcccggagaatgtcacagatcagattaggttgtgggaaactgacctcaacagggttgatatgattccatcgcatttgtacgaagattttcctagcaaggaatggtttgaacaatgctgtgattatgcaagggataatgggtacttgctctgggaggaccccaagagaatgagactaattgtacgaggggagttccaccctgaaatgagggagttccttcgcaggcaaagatgaggaacgaccttgtacttgacggaccatgctatgcttctttgtagtgcatagaaacactgtatcgggtaatagttctcctttaaagatcaggaaagggtctagaaaagggctcagtttttgaattattttggtgacctgtgagctgtggaagcatatgaataatgtggtgttcaatggagcaaggcccaacatccttgatctgctcctaaatgttactagtgactgtaccctatgctggtgtatggctggtggccaggtcctgttggaactcttaggtagatagtgtttggttttggagtatggtgggatggagttgttatgctcttaatttgttgttatttggattgattctatatagaacggagtgattctaaaaatgaaaaaaactcaaatgatgaatc

SEQ ID NO: 20332 - DNA, 1371 bp, Zea mays
  Clone ID: LIB3180-036-H9_FLI
gcaagctataattccaaggcaccgccgccgcatcgatctcgggaatcgaaactcgaaaggcgcacgcggtccacgcccccggctcgcccagctcgagaagccacctgcactcctcccttctagaagcttccatttccttaggccatggaagacgactacgacttcccggcggctggcgggtacgaccccatgggaatgatggggatggggatgggaggctacggcctcggtggccccatggggatggggggctacggcctcggaggtcccatggggatggggggctacggcctaggcggcgaggacgacgacgatgccatgaaggacctgcacgccggcgacgaagtcgaagttcactacacggggacgttgatagacggcaccatgttcgactccaccagggaccgcgactccccgttcaagttcacgctgggccaaggacaagttataaagggatgggatttgggcatcaagaccatgaaaaaaggcgaaaatgctgtgttcaccatcccaccagagcttgcatatggtgaagatggctcaccaccagtcatccctccaaatgccacactgcaatttgatgttgagcttctgtcatgggtgtgtatcaaggacatttccaaggatggaggcatcttaaaaaaggtagtagccaagggcgataagtgggagaaccccagagatcctgatgaagttgttgttaagtatgaagcaaggcttgaggatggaacagttgtatcgaaatctgatggtgttgagttcactgtgagagatggcgtattctgccctgccatatcaaaggctgtcaagactatgaagaaaaacgagaaggcccacctcactgtcatgccacaatatggctttggtgtgaaaggtagacaggcatctggagaagaagcttctgtgcctcctaacgcgacattgcacattgatcttcaagtggtgtcctggaggacagtcactgagttaggcagtgacaaaaagatccttaagaagatccttaaggagggcgaaggctatgattgtcccaatgattgtgcagttgtccgagtgaaacttattgggaagttggaggatggtaccttgtttgtcaagaaaggtcatgatggtgaggagccatttgagttcaagactgatgaggatcaagtgattgaagggcttgacaaagcagtactcagcatgaagaaaggagaagtatccttggtcactattcctccacatcatgcctttggaactaatgaaacaactaaagatctggctacagttccaccaaactcatatgtttactacgaaatggagcttgtctcatttgataaggagaaagattcatgggacttgaagaacgttgctgagaagattgaagcagctgct

SEQ ID NO: 20333 - DNA, 2228 bp, Zea mays
  Clone ID: LIB3180-037-C12_FLI
aaaaaacgagaggagagcggagagacagacaggagccaaatctacgtctcctgccaattcgcctttctccaaccagcttccccgcgccgcccgcccgtcgccgctcctccccgccctctctgcccgcatcagatcgtcttccccacgccgtgtgaccgaggtcccgtgatccctcccacttctgcgccggcgaggacccgggaggcgggatgagcggctgagcacgacgatggcacgcagagccacgccgcaggaggccgccgtcgctgccgcggaggccgccatacgatccgtaggcctggggttcgacgtcgtcagcgacgtccgcctcaagttctgtaagcagcggggcgcgcccgacccctggctcatcgaacttgaccatggggaggtccaggatatcgtgctgcccggcggcgtcaccgtcgctggcgtcaccgcttcggttaagtgtgacaaaggggagcggatgaggttccgctccgatgtcctgtcgttccagcagatgtctgagcaattcaaccaggagctatcattgtctgggaaaattccatctggcttcttcaatactatgtttgagttttctggcagctggcagaaagatgctgctaataccaaagcacttgcttttgatggttggtatgtcacactatacagtgttgcgctctcaaaagggcaaattgtactccgggatcatgttaaacagtctgttccatcaacctgggatcctgccgctttggcaaggtttattaaaaaatttggcactcatatagttgttggcctaaagatgggtgggaaagatgtaatttatttgaagcaacaacattcatcaaccttgcaagctgtcgacgttcaaaaacgattgaaggagatgtcagatagtagatttcttgatgcaaatgtgcaatatgacatgagtaggaacaatcaggatttggtgatgatgcttaagcgaagaggtgggagggataaagaatctatatctcatagtgagtggcttaatactgttcaagcagagcctgatgttacctcaatgtcctttataccaatcacttcgctgttgaatggagttcctggaagtggatttttgatccatgcaattaatctgtatctccgacataaacctccaatcgaggaattacatcagtttttggagttccagcttccaaggcagtgggcacctgtttacagtgatctcgctctgggtcctcagaggaaaagacaaggcagtacatcgttgccagtaaatttaatcggtccaaagctttatgtttgcactaacatggttgatgtgggtaaaagaccagttacaggactccggttgttccttgaaggaaggaagagcaacaaattagctgtacatcttcaacatctctgctctcttcctcagattattcagcttgaagacgacccttacaatcaccaaaccccggaatatgaccgcaaatactacgaaccaattggaccgtggaaacatttctctcatgtttgcacagcaccagtcgagtcagatgacctgtgcatcgtcacaggggcacaattagacgtggtccaccaaggcctcaagaaaattttgttccttcgcctacatttctccaaagcctgcaatgccgttgtgaggaactcggaatgggagaattctcccaacatagctcagaaatcaggccttatctcaacactcattagcacacatttctcctcggtagctcagacgcctccgccgcggccagccgatgtgaacataaactcggcggtgtaccctgggggaccacctgttccagtgcagaccccaaagctgctgaagtttgttgatccaacagagatgatgcgtgggccgcaggactcaccgggctattgggtggtttcaggcgcaaagttgaaccttgagaggagtaagatctcattgcgggtgaaatactcactgctgacagctatgatgccagatgatgagtttccacttgatgatgatgaattttagaacctggaacgaaagaaacctgtgtagcaaaggttgaggatccaagatttccgtcatttgggcatttgtttgatgttgtatactttgtggtttctttaaacattatagcataaacgagttctctgccctgaatggagcgagaagaattgttgtaacatttctttgtagcgtgggcgtggcacatagcgatcagcattagatgatagatcaaattatctgtatatatgggatgaataaaaaatattgtttc

SEQ ID NO: 20334 - DNA, 3454 bp, Zea mays
  Clone ID: LIB3180-037-C5_FLI
ctctctgctcggttccttgatccagattccgcagcggtgagggcacccagcccgatcgtccgtctccgtcgatcccccgaagccctaggagagacccttgtccgcgtcgaattcgatcgcgggctgatttgatcccgagaattcgcggggggcaccggcggcggggaatcggatgttgtaggaaaggtcccggatttctgcgcgggcaggcgggcgggcggccatgcatctgaaactgtggaagccgctgtcccactgcgccgcgctgctcctggacaagaagaaccgtccgccgaggacgccgccggcaggggcgggcgcggggtccggcggcgggcggcggctgcaggagagcaagctgcgggaggcgctggaggaggcgtccgaggacgggtccctcgccaagtcccgcgacgcggcgctcctcgatggaggggacggcggtgccgaggaggggtccgtggggcggtcgcggtcgctggcgcggctccacgcgcagagggacttcctgcgcgctacggcgttggccgcggagcgcgcgttccagtcgccggacgcgctccctgtgctggaggaggcgctcgccaagttcctcgtcatgtaccccaactacgcgtccgcgtcggacgtggaccgcctccgcgccgacgagtacccgcacctggacaaggtatgcctcgactactgcggctttggcctcttctcctacctccaaagctgcaaccctgcggactcgtcagcggcgttcacgctctcggagatcaccgccaacctcagcaaccatgcgctctacggcgccgccgagaagggcaccgcggagcacgacatcaagaaccgcatcatggattacctcaacatccccgagtccgagtactgtctcgtcttcacggtcagccgcggctcggccttccggctcctcgccgagtgctaccccttcggcaccaacaagcgcctgctcaccatgttcgaccacgagtcccagtccgtgaactggatgacgcaggtcgcgcgtgacaagggagccaaggcatactccgcctggttcaagtggcccacgctcaagatctgcaccacggagctccggaagctgatctccaccaagaagcggcggcgcaaggactccgccactggcctcttcgtgttccctgtgcagtcgagggtgacgggggcaaagtactcgtaccagtggatggcattggctcagcagaaccactggcatgtcctgcttgatgctggggctctggggcctaaggacatggactcgctggggctgtctctgttccggccagacttcatcataacttcattttacagggtgtttggggctgacccaacgggctttggatgcttgctgatcaagaagtcggtaatggcttgcttgcagagcccaagcggcgggacgggggcagggctagtgcggattgtgccggtcttcccacagtatctcagtgattcagttgatgggtttgatggtgtcctcgacgggctggaggatgataacatcattccaatcgaggaggggtcagcctcgaacagtcaccatgcatcccaattgcctgcattctcaggcgcatattcatcggcgcaggtgagggaggttatcgagagcgagatggaccaggacagttcagacagagatggtgccagcacaatatatgaagagagcgagagtgtttctgttggagaggtgatgaagagccccgtgttcagtgaggatgagtcatcggagaactccttctgggttgatctgggacagagcccacttggttccgaccattcagagcaatcaagcaaggggaaattgggctctccgttgccagcgtcctggttttctggcaggaagaaggcgtcgccgaaggtgccatccaaactgtcaaggagccctgttcatgacaagcatgttttgtcatttgatgcagccgtgaggtcggtatcacaagagccagggcctgtggaagttgttccagatgaagaccattcacgtaacggcatcaagaacattcatatcagtgagattgaagaagacaacagagatggtaaagtgaacaagaggttcgtaaagttttcttgtgccaatggccctgctgaaggcagtgcaacctccgttttcgggacctgtaccgcccgcgagaacggctccacatccgagatctgctcagaaactcaagcggagaccaaggagagcgcgatcagaagggaaaacgagggcgacttccgcctgctgggaaggagggaagcacacaacggcaggttcaacggaggaggaagattcttcggagtagaagaaccggagcgggtgtcgagcatggggcgcaaggtatcgttcaccatggacgacagcaggctgtgccgtaactcggatgccggcgagacatctgggtacgggatggcagccgacgaccaagacgacgacgacgcgtacagcgactacgacgaggctcaggacggcaggaaagagcccgagatcgtctgcagacacctcgaccacgtgaacatgctggggctcagcaagaccacgctcaggctgcggtacctgatcaactggctggtgacgtcgctgctgcagctccggctgcccgactcaggggacggcgagggggcggcagcggcagcggcgcccgctctcgtctacatatacggtccgaagatcaagtacgaccgcggggcagcggtggcgttcaacgtgaaggactgcgggtccggaacctcgctgatcaaccctgagaccgtgcagaagctggcggagaaggagggcctgtccttgggcgtcgggttcctgagccacatccggctcacggacagccagagacacggcgcggccgacgtggggctcagctcttcctcctcgccagctgcggcgagcggccgccgcgagaagaagagtactcgcaagaacgctgtcgtcgggaccgaagtggtcactgcttctctcgggttcctcaccaacttcgaggacgtctacaggctgtgggcgttcgtcgccaagtttctcgactcgtcgttccttgagcaggagaggctgtcgtccattccggaggatgcagaaagatagcatcagatggtttcatagtagtaactgaaagtggggtgtgggggtagaagaagagagatgccaaggcgcttgtgcgtagtattgttcttttgtatccaaatgcctcagcatggcatcgacttggcggcgcggctgtttatatttcttcattcttatttcctcccctttttttttcttctaggcatgggacttttttttttggtctgtaggttttgttggagatctatatgtacccacctacacctactaattgttttgaggagcatcctttccatgtactcgcttgtaaattggctccattggccatgaaattaggtccggtcgcctgtattgttgttgcggcatgaatattgaatagcagcatgatgataggtgattctacccttttcggttttgctgttg

SEQ ID NO: 20335 - DNA, 459 bp, Zea mays
  Clone ID: LIB3180-037-D2_FLI
gggcccgacggtcatatattccttcatgcaggctgcggggctaacaaatgatcacctagtcagttgcttccggttcgagcattgcagtgccgttccaactctttgcgcatgcgacatcgacagggcaaacacgaaggtggatctgaaaaaagatgaggtgacagcgaagatctatcgcgaggaggtaatcgcaaacccagagatgctgaggacgatcgatgctcttaccgtttcgtagcaccatgtgcatgtgggaatggaagagcaacatggtcgctgaacttgtgtcatctcttatgtggacagtgtgctaggctatcctttgcattgaggtcaggaatcaaaaaaatgcttattatgtaaaaaaatcgttctgttgctaatgcttactctgttgtacattgaatggttgggggaagctaaggatggtggccttttcttactgatccagaaactgtc

SEQ ID NO: 20336 - DNA, 721 bp, Zea mays
  Clone ID: LIB3180-037-E3_FLI
agcttaccacacttactgcatggatccaccgcgcagttctgtcccgagaggtaaatggttctgcacgccgtgtagtgcatggaggtcggcgaacgggatgcagaggtatgagaagtcgatcctgcagagcgtcaagcgtgttcttgatgccaaagggcccaaggtgcaggcagcagctgctgctccaggaaaataagcagcggcgctgtggatgtgggggtacaaaaagaaatgaaaggattcttgttcctctgaaggtgtatgcattactctgacagactgaatcgagtaatcggaggatgggctgtgtatacgtggggagaagacctgttggcttgtgaagacggagatggtggcatccgagtggacacgcacttttgtctgtggatggagctgctgatgttggttccctgtcctgctatttccttcctggaattcttctgactaccccaagcgagtaggttgttgttgttgttgttctgttatgttgtgtctgccctttacctgatgctaagtggtaacactgacacccgcccatgttgacattgatatgtacatgtccgttacctgttttctttttgttggacaatccatatatacttttctgcatggcatgtggtcgatgtctgtataagtttattacatatctgattgaacccataaggcagaaagcttgggtgatatctaaacaatgatgcatctccatgttttttcttctttc

SEQ ID NO: 20337 - DNA, 2278 bp, Zea mays
  Clone ID: LIB3180-037-E6_FLI
tcgtcgccgccggctacctcctccagccgccgcgcctccctcctccacccgctgccgcctccctccaaaacttgtcgtcgtatccctccaacacccgcatctggcgcagacgaccatacacccgctctgatgctttaaatcaatgtgtatggggttccaagcgtctgacctgacaaagaccgccccaagcaacgatgattcttgaagcgattgcagagataaaattgaagtgattttatagtgatttttttgcggagacagctgatttcccattggatatagtgattttatggtgattttttttgcagagggctgatttccttgatgtgcgcttcaacgagttggagaggtgggacgccagtttttttattttttatttttgaaaaaaaacagggcaacgaaggggaggtgggaactgggaagacctgtttgataaattacagaggatacttcgccaaccgaacaagcctaagtgggggtgatgatgagccaccggaggcgttctcgcgctgccggctcgccgcctggcgacgccagtacgggtacgccccctactcctgagaagtcgggacgggtccggccgtgggcggcgacagcgtcgaaccggaaggtgctggtgttcgcgctggcgttccgcgcggccaacgcgctgctcgtgcgcacgtacttcaaccctgatgagcactggcagtgtctcgaggtcgcccaccgcgtcgccttcgggtatggtcatctcacgtgggagtggaagcggggcctgcgcagttatctccacccattgctctttgctgctttgtacaagaccctggcgctactccatatggacactccgtgggttatggtgatggctccacgtctcgtgcaatctttgtttgcagcttttggagatctatacctatataaactttccaaacttattttcaatggtcaagttgctaagtggacgttattttctcagttggttaactggttcatgtttttctgtatcacacggactctatcaaacagcttggagactgttttgaccgtggctggactctattattggtttgctgcaatagagtcttccaaggcaacctcaatcgtttcaaagcagcacgcggcctgtgaacaaagtatcccatcaagaaaagtggctcttctgatagcagccttgtcatgtgccattcggccaacaagtgctgtaacatggctatatgttggccttttggattttattcagatgaaatcaaaatgtcgctttatccttcttgatgtcattccagtgggggccattgtccttgcagtaacaacactccttgattggtggatgtatggttcctgggtcatagtgccgcttaattttttgaaattcaacttattgtcttccggaggagactactatggaacacatgtcttccattggtactttacacagggttttccatccatgatttggacattcttaccatttgcattgtgcggtattgtaaagtctcaggaatggaggctttcaggtctaattgcttgggtgttaggggtttacagcattcttggacataaagaattcaggtttgttcttccagtgctacctttagcattgatgttctcaggttactgcttagcttccatgtcacagtccaagggcaaaaatcaacataggaaaggaagtctttcaaggctgcagctttctgttattcttctcgtcataaccaatgttcccatggctttatatatgtccttattccatcaaaggggaacagaagacgttatgtattatttgtcaaaagaagcttatgatggaagagtgaggagtgttctctttctcatgccttgtcattcaacaccttactactcaaccttacattacaatctacctatgcgttttttggactgcactcctagtgatagcaaagggaccttggatgagtcagattgtttccttacaagtccatctgagtttgtcggcgatgtttttggaaatttatctgcattcagtcacattgtattattcgagtcagaagaaaaacatgttctccagttgcttctgcacaattcctttcttgagatgaggaggtttttccactcacatttcaaggttgacagagaccttcagtcggctgttgtggtttattcacggagggatgtgctatgatttagtactgatgtggcagaaaatgcctgttagctcgtgtaacaatccccacatgtttaatgttgtttcagcttttcatttgagaaatgagttgtggcattgctggatacttctgatatcttaatcctcttggaatgagatgtt

SEQ ID NO: 20338 - DNA, 1719 bp, Zea mays
  Clone ID: LIB3180-037-H7_FLI
cacaggcaccactccccccctgcaagctcctccctctctcggctcttggttcttgcattactctgtcagcccagaggcagagcaagtaagcaaatggttgctatggcggcgccagggcgagtggcgctcctggccgccgcactcctgttcggcgccttcttcccatccgcgttcgccacgtcctcgtaccccgcaaggcttgcgggcaggctcctgtccaccacggcgtcggcggtggccaagcagctgtggtcgctcaaatcggccgccaccaagacggcgacggcgtccgtggcggggcggtccatggtgcggtacgagggcgggtacgcggtggacacggtgttcgacggcagcaagctggggatcgagccgcacgccgcccagatcaaccgcgccggcgacctcctcctgctcgactccatcaacagcaacatctacagggtccagctgccgttgtcaccatatagcagaccaaagctccttgctggttctccagaaggtttatctggccatgttgatggaagactgcgagaagcgaggatgaaccatcctaaggggttcactgtggatgataggggcaacatttatgttgcagatgctatgaacatggcaataagaaagatcagtgacacaggggttacaaccattgctggggggaaatcaattagaggagggtacatagatgagcccagtgtcagtgatgatgcaaaattctcaaccgattttgaagtccaatacatcagcagtacctgctctctcttggtcattgatagaggaaaccaagcaattcgagaaattccactgaacgatgatgactgtgcatatcagtatgaagctggttttccactagggtttgcattgctttgtgctgctggtttctttggttatatgcttgcattgctccaacaccggcttttaggaatgccgtcaacaatcaataaacctcaagcgcctccaagacccagcattgcaagtatccctccataccagaaacctttaaacccttatgttcgtcaaccattcatcccaagagaagaaactgcaagacaggaacctgaagaggggttcttcacctcagctggaaaacttgttggaggggcaaaatcatctgtggctgaggtatttggtttcaagaagaagagcctgagcaacccataccatcagcagcaacgaagagctaacccttggccggtgcaagaaagctatgccatcccacacgacgaaccacctccggcgctggacacgagagcaccagcccctcagaagaactacagctccgagaagatccactacgtccgccatgggcacccgtatttcaacagctgggacggtcaccgtctccctcagcagcagccggaccagcagctgtatcaccagcagcagcagcagcacctgcagcagcacaggcagtgctctgcaggcccccagacgttttacgagcagagttgtgaggctacaaacgaggtcgtctttggtgcggtccaggaggtggacagcaagcggcgaatggtcgagatcaaggctgtcaactacggagacacattctatgaacagtacgggatgcggtaccgcaacaatttcatcggctacaacaacactaacaactattgaacagcctgtctatttctttgacttccctgtctctcttttcctttctttttttccatcttagttacgagttatttgctttatagtatttatttaaagtggcttttc

SEQ ID NO: 20339 - DNA, 2643 bp, Zea mays
  Clone ID: LIB3180-038-A3_FLI
atccgcccgcctgccgcagcccccattctcgcgccccgccttcttcctccagcagccccgctcgttcttccggcctcgcgttccgtctccgaagccgcaggcagccatggaaatcaacgaggaggcaatggcggcgcataagcgcgccttcctcgacttcctcgaccaagacgtcgggaagggggtttacatgcaggccgtccgcgacatggtccagaacaagcgccaccgcctcatcatcggcatggacgacctccggaatcacaatctcgatctcgcccgcagggtgatccggacccccggggagtatatgcagccggcgtcggacgcggtgtcggaggtggcgaggaacctggatcccaagtttttgaaggaaggggagcgcgtgatggtgggcttctcgggtccgttcgggttccacagggtcacgcccagggatctcatgtcctccttcatcggcaccatggtctgcgttgagggcatcgtcaccaaatgctcgttggttaggccaaaagttgttaagagtgtccacttctgccctgtgactggggactttctctcacgtgaatacagggacatcacttcttttgtaggcttgcctactggctcggtttatccaacaagggatgacaatggtaacttgttggttaccgagtatggaatgtgtgaatacaaggatcaccagacattgtccatgcaagaagtgcctgaaaattctgcacctggacagctcccaagaactgtcgatgttattgtagaagatgatcttgtagattgttgcaaacctggcgaccgtgtctcaattgtcggtgtgtacaaggctctaccggggaaaagcaagggaagtgttagtggtgtcttcagaactgtccttatcgcaaataatgtgtcgcttcttaacaaagaggcaaatgcacctgtctacactcgggaagatctgaagcggatgaaagaaatatcaaggagaaatgacacctttgacttactgggaaattctcttgctccatccatatatggtcatctatggataaagaaggcagtagtactgttgatgctaggtggtgtcgagaagaatctaaaaaatggaactcacttgagaggagatataaacatgatgatggtgggagatccttcagttgccaagtcccagctcctaagagctgtcatgaacattgcccctttggctatctcaacaactggcaggggttcatctggtgttggtttgactgctgctgtgacttctgatcaagagactggggagcgaaggcttgaagctggtgccatggttcttgctgatcgtggtgttgtctgcattgatgagtttgataaaatgaatgatcaagatcgagttgctattcatgaagttatggaacagcaaactgtaaccattgcaaaggcaggaatacatgcctcactaaatgcaagatgtagtgtaattgctgcagcaaatccaatatatggaacttatgatcgttcattgacaccaacaaagaatatcgggcttccggattcactgctttcccgttttgatttactttttattgttcttgatcaaatggaccctgagattgaccggcaaatctcagaacacgttgcccgaatgcatagatattgcactgacgatggaggagcaaggtctcttgataaagagggatatgctgaagaagatgatggtgatgctaatgcagccatttttgtcaagtatgatagaatgctccatggtcaggatagaagaagaggaaagaaatccaagcaggacaggctaactgtcaaatttctgaagaaatatattcattatgcgaagaaccttattcaaccaaggctcactgatgaggcatctgatcatattgcaacctcatatgctgagctcagggatggtagtgcaaatgcaaagtctggtggaggtacacttccaattacagcaaggacactggaaaccataattcgtctatcgacagctcatgccaagatgaaactgaggcatgaggttctgaaatccgatgttgaggctgcattgcaagttctaaattttgcaatataccacaaggaattgactgagatggaagagagagaacagaaagaaatggagatgaaacagcaagctgatcatgatgcaggtgcaaccggtggcactgtggatgggcatggaagctctggcaatgatccaatggatgtggatgtaggatcaaatgatcagaatgtttctgcagagagaattgaagcatttgaagcacttctgggtcagcatgtgttggcaaaccatatagatcaaatgtcaattgatgaaatcgagcagatggttaatagggagtcaactgcaccttacaccagaagccaagtagagtttattttggagaggatgcaagatgcaaacagggtaatgatacgagatggtgttgttcgaatcatataactacctgtctaccaggacgtttacctgtggatcccatggtcgtgctgtgtcatggtgcctgtctctgtctgtaaccaacttatatgtcgaagtatttgtttcttagtgtttgtccacaaaggattgaggcaaccattgccccccttggtacttttagttcatgtgatgtattgcttacttacctgacctagtgatatctagtactcagtcacgtctggttgtgttgagtt

SEQ ID NO: 20340 - DNA, 1221 bp, Zea mays
  Clone ID: LIB3180-038-C12_FLI
ccgcctttcccgtgtcgtgtcccccgcagcaatcaccgcgagggtttcttccaatcccgttcgttccgttccagttccagcatggcggagcagccgcaggaaggcggcgcgagccccaagcacgagtccctgatggagaagctcgccgacaagctccacgtcggcggcggcaagggcgactcctcgtcctcggactccgacagagacgagccgccccacccctcggtgccgcccaccgacgaggtcaagcagccctcattctccgactccgccgccacggcggccgccgaggccaaggccaaggtgttccgcctcttcggccgcgagcagcccatccacaaggcgcttggtggaggcaagcctgctgatgtgttcctgtggaggaacaggaacatctccgccggagtacttggtggagccacagcaatctggatcctatttgaattgcttggctaccatcttcttacttttgtttgccatggtctcatattctctctgggtgttctctttctctggtctaatgcttcatcgtttatccacaagtctcccccaaagaccccagaggtggtcattcctgaagatttagttgtcaacattgcggtatccactcgttatgagatcaacagggcctttgctaatctccgccaaattgctcttggccgggacattaagaagttcctaatggttattgctgggctttggttgctttctgtccttggaagttgctgcaacttattgaccttagtctacattgtgtttgtggtgctgcacacagtacctgtcctgtatgagaagtatgaggatcagattgacacctatggcgagaaggggtgggttgagattaagaagcagtacgccgtgttcgatgagaaggttctgagcaaagtaccaaggggtcccgcgaaagacaagaagcactagaagaagtgattcgaggtttggctctcagtagggaatactagcaatcggtttgagtctcatcaggagacagcgcttgtgggtatgaagcgccaatttgccacctatgcatcgtgttgtgtatggctgctttttgtttgatatttgatgggagtagccgaattgctagctttacccttcatcagcgatgcatacacagcatacggttttcggtagcgctgtttgattttgatctgtgttgtaagatgtcatgccaatactgtacctgagacactgtttttgataacgatgcagtttggaatt

SEQ ID NO: 20341 - DNA, 2077 bp, Zea mays
  Clone ID: LIB3180-038-D6_FLI
ttagccctgacacgacacggccgcgctcaccagtcacacacgacacgacacgcgacagtccccaccccaccaaccgcctctcgccgtcctcgctcgcgcagctgtcctgcaccagcactgcacccggctacatggcggccgcctccaccctcgcgttcgggcacccaaaaaccctagccgccgccggcgccaagcccctgcccgccgccacctccacgtccgtctccttcccggccacccaccagcccgcgtgcctgctctcctcgcccgcgcccgggtctctgcgccgccgggacgtcgccgccatggtctccgcgccgccggccgtcggcaccgccatgccgtcgctcgacttcgacacctccgtcttcaacaaggagaaggtctccctcgccggccacgacgagtacatcgtgcgcggcgggaggaacctgttcccgctgcttccggaggcgttcaagggggtcaagcagatcggagttattggatggggctcgcagggtcctgcccaagcccagaacctgagagattcactggctgaagccaagtcagatattgttgtgaagattggtctccggaaaggatccaaatcttttgaggaagcacgtgccgctggattcaccgaagagagcggaaccttgggcgatatttgggaaaccgtctccggcagcgatcttgtgttgctgctgatatcggatgctgcacaggctgacaactatgagaagatcttctctcacatgaaaccaaacagtatccttggtttatctcatggatttcttctaggacatttgcaatcactcggactcgatttcccaaagaacatcagtgtgattgctgtatgccccaagggaatgggtccatccgtccgcagactttatgttcagggcaaggaagtcaatggcgctggcatcaactctagctttgctgtgcaccaggatgttgatggaagggcaactgatgttgctttagcatggtcagttgcacttggttcccccttcacgtttgctactactttggaacaggagtacaagagtgatatctttggagagcgaggcatcttgctgggtgctgtccatggtatcgtggaggctctgtttaggaggtacacagaacaaggaatggatgaagagtcggcctacaaaaacactgtcgagggcataactgggatcatctcgaaaaccatctcaaagaaagggatgcttgaagtgtacaactctttgagcgaggaaggcaaaaaggagttcaacaaggcttatagcgcatcgttttacccatgcatggatatactctacgaatgctatgaagatgtggcctctggaagtgaaatccggagcgtggtgttggctgggcggaggttttatgagaaagagggcctcccagcttttccgatgggcaacatcgaccaaactcgcatgtggaaggttggtgaaaaggtgcgctcaacccgtccggaaggtgatcttggcccgctccatgccttcactgctggagtgtacattgccctgatgatggctcagattgagatcctgaggaagaaggggcactcctactctgagatcatcaacgagagcgtgattgagtcggtggactcgctgaacccgttcatgcacgcccgtggggtcgccttcatggtggacaactgctccacaacggctcgcctgggatccaggaagtgggcgcctcgcttcgactacatcctgacgcagcaggcctttgtggcggtggacaaggacgccccgatcaaccaggacctcatcagcaacttcttgtcggaccctgtccatggtgccattgaggtctgcgccgagctgaggcccaccgtcgacatctctgtgcctgccaacgccgactttgtgcgcccggagctccggcagtcttcctagattgaggcagtgagcggagagggagagggagagagaaagagaggatttcgtgtcccgagttagaacagagtgctgtatgttttgtgcgactgtttgtaagtcaagtctgaactgtgaacctatgtttgcttctatcagaggacccggagaaagcctgggcatctgtttccggaataaaatgggtccttcggaat

SEQ ID NO: 20342 - DNA, 1944 bp, Zea mays
  Clone ID: LIB3180-038-G9_FLI
atccctcccctctgccgttccttttctcgatttgattcttccaccccggcccttgtgttcactggccctctcccagtcccacccacctttgtgctcgtgcgatgtaggagcagggcatcggaaccgagcaagcaagcaagcagaagcagaattccggcagagggaggaggaaggaggaaggaaggcggtcgatcaatcggaagcgccgccgccgcaaaggatcgggcagacgagacgagacgaggttatctgaggcgcagagctcagggtgaaagaagaatctagtgaaagtggaaggatccgcgcacgggctccgtccgaagatgctgccctactttgatccggagtacgagaacttcaaccagcgcatcaaccccccaagggtttgcatcgacaacaccacatgcagcgactgcaccttggtgaaggttgacagcatgaacaagaatggcattctgctggaggtgctgcaggtcctgagcgatctggaccttcacatcttcaaagcctacatcacctctgatggtgggtggttcatggatgtgttccatgtcgttgataagcaagggcagaagatcactgatgacaagaccatcaagtacattgagaaggctttaggtccggagagcaatttgctgggcgcaaagggcagcaactcagcggggaggtcggtggggctgcactccatcggcgaccacaccgccatcgagctcaaggggcccgacaggaggggcctcctctcggagatcttcgcggtcctcgccgacctccagtgcaacgtgctggccgccgaggtgtggacgcaccgcatgcgcgtggcctgcgtcgtgtacgtgaacgacgtggccacggggcaggccatcgacgacccggaccgcgtggcccgggtcgaggaccggctgcgccacgtgctccgcgggtacggcggcggcggcggcgcgggggacgacgacgacggcagcggcgcgcacgccaacttcgcggccgcctcttcgacgccgcaccacgtggaccggcggctgcaccagctcatgcacgccgacgtggacgccgtccacggcgacggcgcgcacgcggcggccggcggcgagggcgaccggccggccgtgacggtggagcactgcgaggagaagtcctactccgtggtgaacgtcaagtgcaaggaccggtccaagctgctgttcgacatcgtgtgcacgctcacggacatggagtacgtcgtgttccatgccgccgtgtcgtccgaagccaactacggcatccaggagctgtacatccgccgcaaggacggcaaaacgcttctgaaagacgaagcagagaaggtgatcaggtgcctggaagcagccatctccagaagagtatccgagggattcacgctggaggtgtgcggccgggaccgggtgggcttgctgtcggacgtgacgagggtgctccgggagcacgggctcacggtgagccgcgccgacgtgacgacggcgggcgggcaggccacaaacgtcttctacgtccggaacccctcgggccagccagtggacatgaagaccgtcgaggggctcaggggccagtttggccagaccgccatgctcaacgtcaagagcgtgggcgtgcctgctgcggtggccaaagcggcggagccaagctccggcagcatggtcaggagcagcttcttctccttcggcagcctcttcgcgaagctccgggcctgacaactggtcaggcgattcgaactccagctgtgtgtagaagaaatgaactcagaactagggtagtggactagcgggggtgggcgggggagagaaacagggagcaactgtatctctatgtggcagctgtggttgttgtacagttcataaggagcctctaccagaagaatggtagttctgtggaatgcaggctgcggactgcttgttaaggtaagggtttatcccatctgcgcagaatttt

SEQ ID NO: 20343 - DNA, 1373 bp, Zea mays
  Clone ID: LIB3180-039-A9_FLI
aacttcgaaaatctcccaactcatatattagattatttaactcaacattagctatgttgtgagctatataattaactactcgagtgaggcctctaggattaggggcctagggcgaccaccctggtggccctatgtacagacccgaccctattatgtgcgtaccttggcagccccataggtcactggttggcgcacctagcaccccgtcaacccgtgcgcggcaatgcgacactgatcggccacaagccaatcagcgtcactaggcagatagaacctcctccattggtggctgtctggagacctcgctgccgctcgtcgcccgataacgccttcgcggtgcccaacgctcgcgccctcgtcgctgctgacaacgacgaggggcaggcgaagcagatgtcgacccacggtcaggggagggtgagttgtgaaacatctcgtcccaattgatcttgatctgccccatcgccaccactgccgatagtcctgagatcgaggaagagagaggaccttgttgccgcttgtcgccagataacgccttcgtggcacccaacacccgcacccacgtcgctgtcgacaacgacgaggagggagacgaagccaatgtcggcctcacggtcgggagagggtgagctgcgaaacatatccacacaattgatctcgatttgccccgtcgccgccactgtcgatagtcctgagatcggagagaagagaggaccccactaccactcgtcgcccaacgcccgcgccctcgtcgctgtcgacaccaacgagggggaagcgaagcagaggtcgtccatacggtcgggggagggtgagatgcgaaacatctccttccaattgatcccgatctgccccatcgccgccatcgccgatagtccttagatcggggaggagagacaaccccgccgccgctcgtcatctgataacgccttcgcggcgccaaaaactcgcgtcgctaccgacaccaacgacggggaggcgaagcagacgtcggccccatagtcggggagggtgagttgcgaaatatctccttccaatcgatcctgatctgctccatcgtcgccaccgccgacagtcctcagatcggggaggagagaggaccccgccgccgcttgtcgcccgataacaccttcgtggcgcccaacgtccgcgcccgcctgcacccgcgtagctgtcgatgacgaagatggggaggcgaagcagacgtcggcaccgtggtcgagggagggtgagttgcgaaacatctccttccaatcgatcccgatctgccccatcgccaccaccaccgatagtcttgagatcggggaggaaagaggaccctgtcgccgctcgtcgcccgataacgccttcacggtgcccaaagccaacgaggg

SEQ ID NO: 20344 - DNA, 984 bp, Zea mays
  Clone ID: LIB3180-039-D12_FLI
gcgcgggcggacaaggagcaggcggaggaggagctgtgccaagccacaatgggtatctcgcgtgactcgatgcacaagcgccgggccaccggtggaaagcagaaggcctggaggaagaagcgaaagtatgagcttggtcgccagccagccaacaccaagttgtcaagcaataagacagtgaggagggtccgtgttcgtggaggtaatgtgaaatggagggctcttcgccttgatactggtaactactcatggggaagtgaagctgttacccgcaagacccgtatcctcgacgtggtctacaatgcatcaaacaatgagcttgtgaggacacaaacccttgtgaagagtgccattgtgcaagttgatgctgccccattcaagcagtggtacctcactcactatggagttgacattggtaggaagaagaaaacccctgctgcaaagaaggataatgctgagggacaagaggttgaggcagcagctgaggaaacgaaaaagagcaaccatgtcacgaggaagcttgagaagcgcaaggagggacgtacccttgacccacacattgaggagcaatttggcagtggacggttgctggcatgcatttcttcccgccctggacagtgtggccgagctgatgggtacatccttgagggtaaagagcttgagttctacatgaagaagctacagaggaagaagggcaagagcgctgtagcttagagcattctcatggattgtcttgcaccgaaatgtgtgtcctgatgagtacactttttttggttaatcgtctcaagttcagagcgttatgccatgttttcagacctgattagtacactgttttctaaaagcgattgagctctagtccaatgtattgataatatctgctgttgtcctattgcggtgatgttgatttgccctgttcgctagctgcaatagttcctatttgttgatgaatttgtttgaagcataaacgcagaacatgtcgtaaag

SEQ ID NO: 20345 - DNA, 986 bp, Zea mays
  Clone ID: LIB3180-039-D5_FLI
ttcctctcccaccaccaacccccatcccggttatctccgccgccgcccgctttgggaaggcgcgacgaaggcaggcgagaggctccagccggacgaggaggaaagaggagcagcagggccggaggagagatgttcctgtgggactggttctacggggtgctggcctccctcggcctgtggcagaaggaggcgaagatcctcttcctcggcctcgacaacgccggcaagaccacgctgctccacatgctcaaggacgagcggttggtgcagcaccagccgacgcagcacccgacgtcggaggagctcagcatcggcaagatcaagttcaaggccttcgacctcggcggccaccagatcgcgcgccgcgtctggaaggattactacgcaaaggttgatgctgtagtatacctggtagatgcgtatgataaggagcgatttgctgaatcaaaaaaggagctggacgctctcctgtcagatgattccttggcaaatgttccatttctcatccttggcaacaagattgatatcccgtatgctgcctctgaagaggagctgcggtatcacctaggccttagcaacttcacaaccgggaagggcaaggtcaaccttggcgactccaatgtccggccacttgaggttttcatgtgcagtgttgttcgcaagatgggctacggcgatggtttcaagtgggtctcccaatacatcaagtagggcccttgccggggcgcttgctcagcccagcgatttttttgccttgttatttgttctggttggtatttcgtcacgtgaacgatgatcatcatatcatgacagtatcatggaggggtatgaagaggaaaaaacagtgcttaacattggggaacatgttgaatctttagcgtgaaaacattttgttatgtcagtcaaactcctggaattcttttgcttttccgtaggacctttactaaggacttgcctgcgatgcattataagattattgattgctt

SEQ ID NO: 20346 - DNA, 1079 bp, Zea mays
  Clone ID: LIB3180-040-B10_FLI
gtcgacgacctgcctactacttacttactgtacctgtgcagctgtgcccctgtgccaaccatcaatcaatctgacgcaattccgatcggtttttgcagctgtgaacggcaagggcttcatcgcgcgggacctgacgttcgagaacacggcggggccggcgaagcaccaggccgtggcgctgcggtgcgactcggacctctccgtcttctaccgctgcgccttcgaggggtaccaggacacgctgtacgcgcactcgctgcgccagttctaccgcgactgccgcgtcgcgggcaccgtcgacttcgtcttcggcaacgccgccgccgtgttccaggactgcgcgctcctcgcgcgccgcccgctgcccggccagaagaactccgtcaccgcgcagggccgcctcgacgccaacatgaccacgggcttcgccttccagttctgcaacgtctccgcccaccccgacctcctcctcctcctgcagcagcagcagcaggcccaggccagcaacgggaccgcgcccccggccacgcagacgtacctcggccggccctggaagccctactcccgggtggtgttcatgcagtcgtacatcggcgacgtggtgcgccccgagggctggctcgcgtgggacggggacttcgcgctcgacacgctctactacggggagtacgccaacaccggccccggcgccgccgtcgccgcgcgggtcaagtggcccggcttccacgtcatgaccagccccaccgaggccggcaacttcaccgtcgcgcagttcatcgagggcaacatgtggttgccgcccaccggcgtcaagtacaccgccggactcacgtcctgatcctctcttcaaacccttgatggatgtaggctttagtacgtacgtagtatttgcagccttatactcctagcactttatatgctagcacaatagtcctactacatgcatggtacctcgtatctgtggaggagaatgtaagggtgggttgattagttgtttgattgggccctttttaaacaaaagtactatgtggaaatggcggagattcaagtccacagattaaaaccatcatatgttccag

SEQ ID NO: 20347 - DNA, 3099 bp, Zea mays
  Clone ID: LIB3180-040-B2_FLI
ggcggccaaagcagcggcccccttatctccagggaccaggggaggtcgcacaccaacgcaccgtccttccctttcctcctcctcctccctctcctcggaaggtcaagtgacggtatttgtgaccatggcagggaccttactccagtcagttgccctgggaacaccatttgggggtcgcatgagaacccattgttggaggtcccatggcaccaggaggcctgcctctatgttggcagtgtcacttagccgccctgtcaagatgtcagcatttgtgggtctaagatcagtgcatagcttctcggtcacaccgacggtgtccaattccaggtcggcagttgcatcttacaggtcatcgcgacagacaagacgatctcgttttgtcactcgggcaatgtttgagaggttcacggagaaagctattaaggtcatcatgcttgcgcaagaggaagcaaggcgcctgggccacaactttgttggaactgagcagatcctcttgggtctgattggagagggcactggtattgcagctaaggtgctcaagtccatgggaataaatcttaaggatgcacgtgtggaggtggagaagattattggccgcggcaatggttttgttgctgttgaaataccattcacaccacgtgcgaaacgtgttttggagctctccttggaggaagctcgccaattaggacataattatattggatctgagcacctgctccttggactgcttcgtgagggtgaaggtgtggcggctcgtgtgcttgagagtctcggagctgaccccagcaatatccgtacacaagttattcgaatgattggtgagaccacagaagctgttggtgctggagttggcggcggcagcagtggtaataagatgccaactcttgaggagtatggaactaatttaacaaaattagcagaggagggaaaattagatcctgttgttggaaggcagccacaaattgagcgtgtggtacaaattttaggcagacgaaccaagaacaatccctgcttgattggagagcctggtgttggaaaaactgcaattgctgaaggacttgctcagcgcatttctacaggcgatgtacctgaaacaatagaagggaaaaaggtcataacccttgacatgggacttcttgttgctggcacaaagtaccgtggagaattcgaagaaagattaaagaagctgatggaggaaataaagcaaagtgatgagataatactctttattgatgaagttcacactctgataggagcaggagcagcggaaggtgctatagatgctgctaatatcttgaagcctgcgttggccagaggtgaattacagtgcattggagccactacactagatgaatataggaagcacattgagaaagacccagcacttgaacggaggtttcaacctgtgaaagtgccagaaccaacagtagatgaaaccattgaaatcctcagaggactgagggaacgatatgagatccaccataaacttcgttacactgatgaagctctgattgcagctgcaaagctgtcatatcaatatatcagtgatcggtttctcccagataaggcaattgacttgattgatgaagcaggttcccgtgttaggctacagcatgcacaggtccccgaggaagcaagagagcttgacaaggagctcaaacaagtcacgaaacagaagaatgaagctgttcgaagccaggattttgagaaggctggggaattgagagaccgtgaaatggaattgaaggcccagataacagccctcattgacaagagcaaggaattgagcaaagcagaggaagagtctggagagacaggacctatggtcaatgaagaagatatccagcacatagtatcttcatggactggcatccctgtggagaaggtttccagcgatgaatctgataagcttcttaagatggaagagactttgcacaagcgtgtcattggccaagatgaggctgtggtagcaattagtcgctccatccgccgtgctcgtgtgggtctcaagaaccccaacaggccaattgcaagctttatttttgctggtcccaccggcgttgggaagtctgagcttgcaaaggctcttgcagcctattactttggctctgaggaggctatgatccggcttgatatgagtgaattcatggagagacacacggtatccaagctgattggttcacctccaggatatgtaggatacactgagggtggccagctgacagaggcagttcgacggcggccatacacagttgtgctctttgatgagattgagaaggcacaccctgatgtcttcaacatgatgcttcagattttggaagatgggagattgactgacagcaagggaaggacggtggacttcaagaacacactcctgatcatgacctcaaatgtagggagcagtgtcatcgagaagggtggaaggaagatcggatttgaccttgactctgatgagaaggacagtagctacagcaggatcaagagcctggtcatcgaggagatgaagcagtatttccgacctgagttcctcaaccgtctcgatgagatgatcgtgttcaggcagcttaccaagctcgaggtcaaggagatagcggacatcatgctccaggaggtctttgacaggctgaaggccaaggacatcaatcttcaagtgaccgagaagttcaaggagcgggtggtggacgaaggctacaaccctagctatggtgcacgcccgctgaggcgagccatcatgaggctgctggaggacagccttgctgagaagatgctcgcaggggaggtaaaggagggcgactctgccatagtagatgtggactcggaggggaaggttgttgtgctcaatggtcagggcggcataccggagctctcaactccggcgatcaccgtttagctcgtacataacaaatgacaaaattaatagcatagtttttgttcaaacacattatcatttatggttagaatatctgtgtatatgtagtggtatagtcaatggggaaatcgttcctgcctctaaattcctttttttcaagttaaggtgtttcttttgtcgcaagttaatctgcctggttattaagatattattgtttacagagtgatgtg

SEQ ID NO: 20348 - DNA, 1940 bp, Zea mays
  Clone ID: LIB3180-040-E4_FLI
gacgagttccgccacctgctcatccgcggcgcgccgccacttgccgcggaggacctccaggtctcgctcctccgccgactctcgctcacggtaccctccttcaactcctccgccgtagacctagactgcccctcctttgcccaacaccacgccgccgtcgccgccgagggggtaaacgagcagcagggcggcaggagttccgcctccgacgacgagatctcgccctacctcatcgccccggacaccgtcagcgtcctcagggacatcgccgacgtcatgctgcgcgccggctacgcgcccgagctgtgccaggtatacggggaggtgcgccgggacacgctcatggaatgccttgccgtgctcggggtcgacaagatgagcctcgaggaggtgcagcgggtggagtggggcgtgcttgacggcaagatgaggaagtggatccaggcgctcaaggtcgtcgtccggggcctccttgctgaggagcgccgtatctgcaggcagatcctttcgccggacatgaacactgaggaggagtgcttcactcaggcggccaagggttgtgtcctgcagatgctgaactttggtgacgccattgcgattgggaagaggtccaccgagaagctgttccgcatccttggtatgtatgaggcgctcgctgaggtgctgccagagcttgagggtttgttctcgggtgatgcaaagaatttcatcaaggaggaggccgagggaatactcttgcggcttggggatgcagtgtgtggcacgatcgaagagtttgctaatgacatacagggagatacttctcggagagcactgcctggtggggagatccatccccttacccgctatgtcatgaactatgtgtggctgcttgcagactacaatgcctcgctaaataagcttctggaatgttgggatactgagctgaccggggttgataatccaaacatgactccattggggcactgcgtgctcatgctgatcacacacctacagtgcaagatcaatgagaaatcgaggctgtatgaggatgaagcgttgcagaacatatttttgatgaataatctgctgtatattgtgcagaaggtgaaagattcagagctcaagacattgcttggtgataactggattcgcaagcgtcgtggtcagattaggcaatactctacagggtatcttcgatcatcatggactagggtgttagcttgcctgagagatgatgggcttccgcacacgatgggttcatcaagcacactcaaagccgcattgaaggatagattcaaaaactttaacttggccttcgaggagttgcacaggacacagacatcatggagggttgtggatcctcagttaagagaagagctgaagatctcaatctccgagaaggttcttccagcataccgttcatttgttggaagatttcggggacaactagagggagggaggggttctgcaagatatataaagtacaaccctgatgatttggagaaccatgtctcagaattttttgaagggagaaagtcaaatgcttgatggtcaaggcatgttcatatcaactatgcagcctgaagacccgtgcaaattttgatgatgctagttccaagtccccttccaaatttcttggcactatacagggaacttgaccttcaaacatcttttgaaggtctgaagatggaaatataatcttctcctgaactgacagaaactttgtgaattgcaaagcaacccgaattgaatggtttagcttgtcattcttgatcctgtcacagcgagtggtgacgtcattgaggcttgcccatggaattatgacaactgcatctgccatgagctgtgtaattgcaattcttacattttacctgtcttttgtcaatggtaacatctcgtgactcttgtttgactaaaatggaatttcggtccctggaatttttatgtacaatcctacc

SEQ ID NO: 20349 - DNA, 2031 bp, Zea mays
  Clone ID: LIB3180-040-E6_FLI
ccggtcttgggttcctcctccacggctccacctccaccccagtccacagcacccctcccctccggcctcccttcccgcaccgcggaggacaagtcaaataccgcgcgtgtgtaccacttggagccatccggcaccacgccacgagtccacagtccgcgcgccccccacgggccgtcgtcgccccggcttctcctctccttcccccaacccctcgcgaaagctcgccgctgctgcgtccgcgccccgtggcggcacggcgcggcacctcgtggggaatccgacggaggccttcgccgagcctttgggggccggcgctttttcctggtgccgtccttctgtactgcctgcgggtgggttgttccgatcataaccgacaaggcgcggcgtgctctcttccctcgcgttgtagactctcgcgggatctgtctcggcggcggcggcgggggtgggggtgggttactgggctcgcttcatcctcccggatcacggcggcggtttgttcagaacatgttagaagccagggaagatcggtgaaatgctcgcattgatattataagtccaggctgaagttattgagctgacagcactaagatataatagtttgagaatctcaatgggttgcttttctacattttgcaagaaaagaagggcaacacggcaaccaagttcccaccataatgaagacgtacctggctgttcaaatataacaaaatacacttacaaggagctagtaagggcgacaaataactttaacccattgaacaaaattggtgagggtgggtttggttccgtttacaagggacagctcaggaatggtacagttattgctgtcaaggtcctttcgtcggagtcaagacaaggagtaagggagtttctgaatgaactcgtggcaatttccgacatctcacatgataatcttgtgaaactttatgggtattgtgcggaaggagaccaaagaatccttgtttacaatcatcttgaaaataatagccttgcacaaacacttctaggctccagccacagcaatatccagtttgattggaaaacacgagtaaatatttgccttggcattgcacggggattagcatacctccatcatggtgtcagtccccacattgttcatcgagacattaaagcaagcaatatacttcttgatagggaccttaccccaaaaatctctgattttggtctagcaaagcttcttccaccaaacgcaacacatgttagcacaagagttgcaggaacactgggttatttggctcctgagtatgctattcgaggacaggtgacacgcaaatcagatgtgtacagctttggcgtgctgcttctggaaattgtttgcgggagatcaaacagcgatacaagattagcatacggagatcagatactcctcgaaaagttcccagagatcaccaacggggctctcctcttgcagacgtggatgcactacgagcagggttgtctggagaggatcatagacaggtccttgggcggcggcgacctggacgtggcgcaggcctgcaggttcctgaaggtcgggctgctgtgcacgcaggacgtgacgaggcaccggcccgacatgccgagggtcgtcgccatgctgacgggcgagtgggacgtcgagccggagacggtcagcaagcccgccataatcagcgacttcatggaccttaaggtcaggagcacgaggaaagcgagcgacaacgtggccacgccgcctacgtcctcctcgacgttcctgtcctccctcatggcgcactcctcgcccttgctgtcgaacgagtccacgcaggcctccatggcgttcaccggggtgtcggatcgcgagtgatccatgatcccttcgtcgaagacaggtcaggctggtagtgacctgagttggttggaggtgtggaaggcatgtgtagtgtaggctaggcaggcacagatggatttaattgcttcgtttgtaggcgcaacatcattgttgagtcaaaaggttcaagtacatgtgagaaaactgctttgtgtgcaatttgggattgaggacgc

SEQ ID NO: 20350 - DNA, 814 bp, Zea mays
  Clone ID: LIB3180-040-H11_FLI
gggagctaagctgaaggacattctaggggtccctgatacttctctcgaagcaagatacatcactcttcatgtgtgcgaccttgtcgcagagagaggtgcacgcctggctgctgctggtatatatggtattctgaagaagctgggcaaagacaaattgcttggtgactttagccaacaaaggactgtagttgctattgacggtggcttatacgagcactacaagaagttcagtgcctgcctagaggcgacgctcacagacctgctcggcgaggaggttgcctcatcggttgttgtcaagttggccaacgacggctcaggaattggagctgcacttcttgctgcctcgcactcccagtatgctgaagctgcatagttctaggagctcgggggtcctagtgtaacctttttttttgtttcccaccatttcccccttcaatcgagaagcccccctcgtgcgattcgcatctctctattttctttcctcagcagcgggatatagctaggatggtgccattgagcttggagtacattatcactagcaacaagcattagcagcggcaggaaagaagtggaagcggaggcctgaataagccgttccattcctgccgattctttttcttcccaatcccttgaagtttgtattatgaggcgatatcacaaaacagccagttcttatctgtgtgatctcgtctttcaaaataaggagagaggtgggggaccaaatcatacagtctttactcattttttattgaatcgtgcagtgcttctgcctttatttcagaaacaactgcaatggcaatatttgcttgttctt

SEQ ID NO: 20351 - DNA, 1338 bp, Zea mays
  Clone ID: LIB3180-041-A11_FLI
gggacgatgaccgccgatttggcttcttctgtcgttctgctctagagtttctcctccaaagtggatcttctcctaacataatacattgccatgattggtcaagtgctcctgttgcctggctacacaaggaaaactacgcgaagtctagcttggcaaatgcacgggtggtattcaccatccacaatcttgaatttggagcgcatcatattggcaaagcaatgagatattgtgataaagccacaactgtctctaatacatattcaaaggaagtgtcaggtcatggtgccatcgttcctcatcttgggaaattctatggcattctcaatggaattgatccggatatatgggatccgtacaatgacaactttatcccggtccactacacttgtgagaatgtggttgaaggcaagagggctgctaagagggcactgcagcagaagtttgggttacagcaaattgatgtccccgtcgtaggaatcgtcactcgcctgacagcccaaaaggggatccacctgatcaagcatgcgattcaccgtacactcgaacggaacggacaggtggttttgcttggttcagcgccggactctcgaatccaagctgattttgtcaacctggcgaataagctccacggcgtaaaccatgggcaagtgaggctttccttgacctacgacgagcctctctcgcatctgatatacgctggctctgacttcattctggtcccatctatatttgagccttgcggcctaactcagctcgtcgccatgcggtatgggaccatcccgattgtccgcaagactggagggctcttcgacactgtcttcgatgtggacaatgacaaggaacgagcccgagatcgaggccttgagcccaacgggtttagctttgacggagctgatagcaacggtgttgactacgcgctgaacagggcgatctcagcttggttcgatgcccggagctggttccactccctttgcaagagagtcatggagcaggactggtcgtggaaccgacctgccctcgactacatcgagctctaccgttcagcgtccaaattgtaataatccaaccaacggccaatgtagtgtgttgtctgcaggtctcagatgcagccattcagcttttgcaggttcctgggcattgctgtacagcctccttgtctttagttagctccattccccgaggagcacagtgcaattttttatcctcagttattatgcatagattgtctcagtagaatgctttcttcgggcatgtatgtttgtttcctctgttgttgaattctggtgttaagtcgtgtataggaatctacaggaaatgaaaaagtccatttcctgcttc

SEQ ID NO: 20352 - DNA, 888 bp, Zea mays
  Clone ID: LIB3180-041-C11_FLI
cttcagaccattagctttatctactccagagcgcagaagaacccgatcgacaccatgagggtgttgctcgttgccctcgctctcctggctctcgctgcgagcgccacctccacgcatacaagcggcggctgcggctgccagccaccgccgccggttcatctaccgccgccggtgcatctgccacctccggttcacctgccacctccggtgcatctcccaccgccggtccacctgccgccgccggtccacctgccaccgccggtccatgtgccgccgccggttcatctgccgccgccaccatgccactaccctactcaaccgccccggcctcagcctcatccccagccacacccatgcccgtgccaacagccgcatccaagcccgtgccagctgcagggaacctgcggcgttggcagcaccccgatcctgggccagtgcgtcgagttcctgaggcatcagtgcagcccgacggcgacgccctactgctcgcctcagtgccagtcgttgcggcagcagtgttgccagcagctcaggcaggtggagccgcagcaccggtaccaggcgatcttcggcttggtcctccagtccatcctgcagcagcagccgcaaagcggccaggtcgcggggctgttggcggcgcagatagcgcagcaactgacggcgatgtgcggcctgcagcagccgactccatgcccctacgctgctgccggcggtgtcccccactgaagaaactatgtgctgtagtatagccgctggctagctagctagttgagtcatttagcggcgatgattgagtaataatgtgtcacgcatcaccatgggtggcagtgtcagtgtgagcaatgacctgaatgaacaattgaaatgaaaagaaaaaagtattgttcc

SEQ ID NO: 20353 - DNA, 1851 bp, Zea mays
  Clone ID: LIB3180-041-D12_FLI
ggcagtgtccctctcgttctcgtccatcttcttcctttcctccattccatgaaggagaagaagacatatatatcatagaatgatagtatgacggaggcttgacagccgcacatcacatggatccttctgtttccgtttgccgcctccacccgggcgtcgccgtcaccggcttctgccccgcctgcctccgtgaccgcctctccggcctccaccctccctccgccgctgacctacgccgctgcaagtccttctcctacgcgcgctctgcagccgcggtggagccgcagcgccgctcatgcgacctcttccgccacggtcagcccatcgcagcggcggtaccggaggaggaggaggaccagcaggagcacggccgctcacacagtcaccagtccaaaaagtcgtcgtctttgggtggcctcctgggcaagaagctgcagcaatggcgccgcaagaacaagaaggagccggagatggaggtgccctccagctgggacgcccggttgggacccgtgccggcgctcggccgcctgccggccacgatgctgtccctgcccgtggaagaggacgacgacagcatggcagcgccggcggtcccgcgctccgatgggcaaatccccgtggaggaagactactgctactactacgacaacgctaacaatatcaatgctgcggcggcggtgcccggcggctccgagcagacgagggactactacctggactcgtccagctccagcaggaggcgccgaagcgtggaccgctccaccacctccgggcgcaactccttctctgacgccaacagcagcgaggcggcgtgcaggatgatgatgatgatgaatgccgccgccaatggcaatgccagggtgtcaccggcgggcatcgccgccgcagagagtctgcaccactaccacgagtcccatcatcatcaccatcaccagagcgtgcttgtccatcatcagtgctacagagaagaagatgagcagcagcaggaggcctataatctccgcgccggcgacttctccggtagcaatggcgtgccggcgagcaagcctaataagaaggggattaaggggtggagcatctggggcctcataagcaagaagagcagcagcagcaggaagcactctgcagctgggggaggagcagtagcaggaggaggaggagagtacgagtacccatggccggagctccgggcaagggggtacaacgggcagatgctccggtgcaacagcagcataagcgcgagaagctccttcagcggcacaggcactgggagcgggaggaggagcgtctctggtgtggacatgcgcgataagtataacagtaacaatggcggcttgaggacgaggagggacgaggtccttctggagaggcacctcagcacgaggtcgtcttcttactcgagatcaggacatcatgacctggatccagcagctatggcaccgccgcagatgggaatgcagttgagcagccggccgcccaacatcccgaggcgctcctcttccaactccaagcatgaattgggcaagacaaggaggagcacacttggactctagctgcctgttccatcccaagtgcccgtagcattcagcatgacgtacgtacgtagtctgttctggctgacaaggtggactatagctggtgaactgaactgcaactcatagtcagtccttcttgtgttgggtactgtactctctagctcttagactgttacataaacactctacaacaggtactttaggtgggagggggacttatatatttatcacaggcacagcctttctttctccatgattaagcatgacttgctcttcccttgtctattcaagtcaagcactgtgtcaggccaggatc

SEQ ID NO: 20354 - DNA, 790 bp, Zea mays
  Clone ID: LIB3180-041-D3_FLI
cacacacagccccatcccgccgccgcaggcgagaaccagcgccaccttaggttagggcggccgccgccggagaagtgcgcggttgccaagatgcagatcttcgtgaagaccctgacggggaagaccatcacgctggaggtggagtcctcggacaccatcgacaacgtgaaggccaagatccaggacaaggagggcatcccgccggaccagcagcgcctcatcttcgccggcaagcagctcgaggatggccgcaccctcgccgactacaacatccagaaggagtcgacgctgcacctggtgctccgcctcaggggaggcgccaagaagcgcaagaagaagacgtacaccaagcccaagaagatcaagcacaagcacaagaaggtgaagctggccgtgctccagttctacaaggttgacgacgccaccggcaaggtcacccgcctccgcaaggagtgccccaacgccgagtgcggcgcgggggtcttcatggccaaccacttcgaccgccactactgcggtaagtgtggcctcacctacgtctacaaccagcaggcgtaggatgcccctcctttctgtcgggaaggaaaatgggaagtcttgctaggtgataatcctttttgctttgttttgttttgttgcaatggtagtagtttcttggaacagaacacctgtatctcttttggcgacgcgtagtttgggtttaattatatcatgttgttatgggtcctgtcaagcactgttgaattcgaatggtttttgaattaatcttgtactatgtttttatgatgcc

SEQ ID NO: 20355 - DNA, 1187 bp, Zea mays
  Clone ID: LIB3180-041-E2_FLI
cgcagccgcaaacgcgaaaccctagcctcgagctctatctccggccacagctggtcaggttagcggcgaaggatgagcaggcgctggagccgcacgatctacgtcgggaacctccccggcgacatccgggagagggaggtggaggatctgttctacaagtatggtaaaattgttgacattgacctgaaggtccccccaagaccacctggttatgcttttgttgagtttgaagatcctcgtgatgctgaggaggcaattgctggacgggatggatacaactttgatggacaccgtctaagagtggaggctgctcatggtggtagaggtaatgcttcctcgcatgatcgttcaagtggctttggtggcggtggtggagcacgtcgtggtgtgtcgagacactcagagtatcgtgttcttgtcactggactgccttcttctgcatcatggcaggatttaaaggatcatatgcggaaggctggtgatgtttgtttctctgaagtgtatcgcgaaggcggtggcaccgtaggaattgtggactacacaaattatgatgatatgaaatatgctataaagaagctggatgatactgaattcaggaacgcctttgggcgagcctatataagggtgaaggaatataacggcaaacgtggtcgctcctactcacgtagccgaagcccaagtcgtagttacagcaaaagcaggagtccgagtaaatcacccaggactcgccgttcatcatctagatcccggtcaagatctgtttcttctcgttcaaggtccccatcaaaaggacgttctccatcaagatcaccagcaagatcgaaatctcctaatgtttctccagcaaatggtgaagcagcaagccccaagaagcagagcccaaacaggagcccatctggctcacgctctcctgatgcgaagcctgaataaaattgctatgctgttaaaggattgcagatggagtcaggagctcttcttttcttaacatttgtcctctgttctagtaccatcagtgtcttattgcagtacgagattggatgatattaactatctgtatcagcttgtatcgatggactccaagtgttgtcactcttgttgtctagtgtgctgaaggacccatttacttttgctaaacttttccattggtgattgttggatgcatggtgtggatttgtgctgtgttggct

SEQ ID NO: 20356 - DNA, 997 bp, Zea mays
  Clone ID: LIB3180-042-A10_FLI
ttcatccgtcctgcgattttcgtttcctccgtgtctccgttcttcatcctgcgttagagaacaagacgaggtcgaggacccagacgcagacgcacacgcagcgcgccttctccaccgcgaagtcatcgttccgcgctgccgccgccgccctagcaaggtgttggattctgtgttgcggcttcggagtgtcattgctacccttctcctgacaacatggtttctttcgagatgaatgacctcaagaagattgggctaggcctaacaggctttggaatattcttctccttcctgggaatcattttcttctttgacaagggtcttattgcaatgggcaatatcctctttctatctggtttgggtttgacaattggtttgaaatccactatgcagttcttcaccaagcctaagaactacaagggtactatctcatttggtgctggcttttttctggttcttattgggtggccctttcttggcatgctcttagaagcatatggctttgttgtactcttcagtggattttggccaacccttgctgttttcctccaaaggattcctattattggatggatttttcaacaaccgtttgtcacatcgttccttgaccgctacagaggaaaacgagttccggtttagcttactcctgctatatttcaacatacttccctcacaaatatcatgcggttatggatatgttccgtccttgcctttttctttaacttgtttagttggtggtaggattttttgttgttgtgtaaattacccctcatccgtggttttccacagaccagaatgcattttccccgttaatacattgaagaaagttctcatgcaagcctctttgtggggggaaatgaagtcttagggatgttctgaaagtagtgactacccatcatgtctttttgtaacattacttaatgtaagcatatctgatataggtatgcaaaggctacaatagcttccgtttgctgtatgggaaagaaaggagacttggcag

SEQ ID NO: 20357 - DNA, 2116 bp, Zea mays
  Clone ID: LIB3180-042-E5_FLI
tcgggaggagccaggagcacacgcccaatgcggcagccatcccaccacctatcgcgtcggcttcactcaaacggcttctgcagcatcctataaaacctcctcaccaacctccgatggcggaaattcttgccctcccacaccgaccccctcccccacggcccgccttcccccgggagcacgagaccctcgttccctgcgccaccgactgagccaaggccgcgccttgccgtttccgacctaggtcgcgagatctcggaggagcggagccccgccgtgccgccacctgctacaggggggcacgcagggaccgcacggcgcgatggtggacacgggcggggggaggctctaccagcgccgtggcgcggtcgctttcgtcgcggccaacaaggcgctgctcgccgctgcgtgggtcgtcgggttcgcgctcgtgttcctatggcagagcgcctccatgtccttcggcagcgccggcggcggagggtacctcaggctcctgtcggcgccgcctccgccgccgcgccccgcgccgcggcttcgccccacggcgtacaacatcacggacttcggcgccgtcggggacggccgggcggtcaacaccgcggcgttcgagcgtgctgtcgaggccatcgcggcgctcgcggagcgaggcggcgggcagctcaatgtgccacccgggcgctggctcacggcgcccttcaacctcaccagccacatgacgctgtttcttgccgatggcgcggaaatccttggcattacggatgagaagtactggccattgttgccagcattaccgtcatatgggtatgggcgggagcgcaaaggaccacgatttgggagtctcattcatggacagaatttgaaagatgtagtcattacaggacataatgggagcataaatggccagggtgaagtttggtggatgaagcatcgcagaagaattctgaataacacaaggcctcctcttgtgcagctgatgtggtccaaggacattactgttgcgaatataacattgaggaactcacctttctggcacttgcatccttatgattgcacaaatgtgactgtttcgaatgttactatcctgtctcctgtttctggtgctccaaacacagatggcatagatccagattcttgtcaggatgtgcttattgagaattgctacatatcggttggtgatgatgcaatagctataaagagtggttgggaccagtatggtattgcatacggtcgcccatcttctaacatttcaatccgcaatgtaaccgcccgttctcttgtgagtgctggaatttcaataggcagtgagatgtctggcggagttgcaaatgttactgtggagaatgtgcgcatctgggaatcaaggagaggtgtgaggataaagactgccacaggaagaggcggctacatccgtaacatctcgtaccgcaacataactttcgacaatgtccgtgctgggattgtgataaaggttgactacaacgagcacgctgatgatggatacgaccggactgccttcccagacatcacgagcatatcattcaagggaatccatgggcagggtgttcgggtgcctgtccgagctcatggcagcgacgtcatccccatcaaggacatcagcttccaggacatgtcggtaggcatcagctacaagaagaagcacatcttccagtgctcctaccttgaggggcgtgtcgtcaggcccgtgttcccgaaaccatgtgagaacctggacgtctatgatgagcaagggcagcttgtgaagcgggcagtggccctgaacagcacagaacttgactacgatatatgaggtgcacatatcataccacagctttgatagttgtagtggaaattggtgctctctaccctcagaaatcaattttctccgattgtccatggctttttgggtctagaattgtagatagagaggagattctcctcttgataggtttgctgcttacagtggctgaatgtatctcaccggcgatttactgatttgtccatgaacatttgtaatcgccagaaccttcctggcgacaaatgtatgctgtcaatatattgtacacctgaagattgtattggagtatacacagtacatgatctctaaatatctgccagc

SEQ ID NO: 20358 - DNA, 1419 bp, Zea mays
  Clone ID: LIB3180-042-G2_FLI
ccaacaccacctcgcctgcgatctccgtagcctccgtcgcgtcgagcatcgatcatgtcggcctactgcggaaagtacaaggatgagctcatcaagaatgctgcctacattggcacccctggcaagggtatccttgctgctgatgagtccactggcaccattggcaagcgcctttccagcatcaatgtcgagaacgttgaggagaaccgccgtgccctccgtgagctcctattctgctgccctggtgctctccagtacatcagcggtgtgatcctcttcgaggagaccctgtaccagaagaccaaggatggcaagccttttgttgatgtcctcaaggagggaggcgtcctccctggcatcaaggttgacaagggcaccattgaggttgttggcactgataaggagaccaccacccaaggccatgacgaccttggcaagcgctgcgccaagtactacgaggccggtgcccgctttgccaagtggcgcgctgttctcaagattggccccaatgagccatcacagcttgccatcgacctgaacgctcagggtctggctcgctatgccatcatctgccaggagaatggtctggtgccaattgttgagcctgagatccttgttgatggccctcatgacattgatcgctgcgcttacgtcactgagaccgtccttgctgcctgctacaaggcgctcaacgagcaccatgtcctcctggagggtaccctcctgaagcccaacatggtgactccaggctccgactccaagaaggtgactcctgaggtgattgctgagtacaccgtccgtaccctccagaggaccgtccctgctgctgtgcctgctgttgtcttcctctctggtggacagagcgaggaggaggccacccgcaacctcaatgccatgaacaagctcagcaccaagaagccgtggtccctgtctttctccttcggccgtgccctccaggcgagcaccctcaaggcctgggctggcaaggtggagaacttggagaaggctagagctgccttcctcgccaggtgcaaggccaactctgaggctaccctcggcacctacaagggtgatgctgccgccgacaccgagagcctccacgtcaaggactacaagtactgagttgcttctctttgcgtgcccgttttggaactcctgcctacgagctaggttgcggagtgtggtttgctcgttagagcttattttcggacatccaaaaaacatgcttcctatgtgggatgatggttatctttatatttgtatgttaattagtctctttgctgttaaatttcgtgtaagttggtcctgccgatggagaatcgagcagccccctttttttgttctatcaactatgctgtaatgctggctatgtatcggcaaaaacaattctatatgctgagttggagtcggcaaaaattc

SEQ ID NO: 20359 - DNA, 1985 bp, Zea mays
  Clone ID: LIB3180-043-C8_FLI
cagccaagggtatctctttgggagattgaaccgttgacaacttttccaatgtatccatctccttttgctcttggattaaagcgcccatggcctgcaggcctgccttctttatacggtggaaggggtgatggcttgacctcttctcttatgtggcttcgagacagggcaaacccgggtttccagtcactgaatttcagcgggcttggtatgagtccctggatgcagcctaggctggataattccttacttggtctccaatctgacatgtaccagaccatagcagcagcagcagcattacaaagcactacgaagcaagttccaccttcagcaatgcagttccaacagcctcagaacattgctgatagatctgctcttctatcaagtcagattctgcagcaagtacaacctcggtttcagcaaatttaccctcaaaatctcaacgaaaacaaaattcaaggtcatacacaacctgagtacctccaacagcagcttcaacgctgccaatcatttaatgagcagaagcctccgatgcatccacagcaacaacagcaggaaccacagcagcagcaatgcgtccaaacaccacaggatcaacaaatgcaagaacagaagcatctgcacaacttccactccttgccagatgcattatcggccttttctcagctttccccagccactcactccccaccttccgcattgcagacagttccagcattctcgcatcaacaaaacttcccagatacaaacattagctctctctcaccatctactggcccttcaatgcatggcatgttggggagattaccttccgaagcagcttcgagcctcccatgtgtggcaataaacgcccatgtatcagtatctgacccatggtcatccaagagagttgcagtggagtctgttaacccttgtcggcctcatgtttcaccacagatagaacatttggatatggcaacgtgtaacatgccgcagagctctgcactagcaccattacctggacgagaatgcttagtggatgaagatgggtgctctgatcctcaaaatcacctcttgtttggtgttcacatagactcgcattcacttctgatgcaagggggcattccagcccttcagaatgataacagttcaggcactattccatactcaacctccaatttcctgagcccttctgagaacgatttccccttgaatcaaccgctacgcagcgcgggctgcttagatgagtcggattatcttccatgtgcagagaatgccgaacaggcaaatcaacagtttgcaacctttgtgaaggtttacaaatccgggaccgtcggaaggttgctcgacatcactagattcagcagctacgacgagctccgcagcgaggtggggcgtctgtttggcctcgagggccagctggaagaccctctgagatcaggctggcagcttgtatttgttgacagggaggacgatgtccttctggttggcgatgacccatggcaggaattcgtgaacagtgtgtcctgtataaagatactttcaccggaggaggtccagcggatgggaaagccgggcatccagctcctgagctcggctccttcaagaaggctgggcaatggctgcgacagctacgcgagcatgcaggagctgagaggcctggacgctgggatggcgccggtgggttcggtcgagttctgaagacggcggagggaagcccaccatggccctcgggtcgaggattactctccctcctgtatgtttctgcagcacttgctagctctgcgacttggaacaaagcacgtagatcaaatggagctctgtgctgctccccgtctgatgatgtcttatggtatagactcgtagcagtaactactacatgttgtatacatgccggcacttcagttcttatcgagtagcaataccgctagtttagtccatccaatcaactacgttcttgttcctatgatcctgttgttgcgatgcagtaaaactttttttttggtcat

SEQ ID NO: 20360 - DNA, 817 bp, Zea mays
  Clone ID: LIB3180-045-A6_FLI
ctcgtagagagaaggaaaaatatccccaaaccctagctcccgatctcgatggcgaaccctcgcgtcttcttcgacatgaccgtcggcggcgccccggcgggccggatcgtgatggagctgtacgccaacgaggtgcccaagaccgcggagaacttccgcgcgctgtgcacgggcgagaagggcgtgggcaagtccgggaagccgctccactacaagggctccaccttccaccgcgtcatccccgagttcatgtgccagggcggcgacttcacccgcggcaacggcaccggcggcgagtccatctacggcgagaagttccccgacgagaagttcgtgcgcaagcacaccgcccccggtgtgctctccatggccaacgccgggcccaacaccaacggctcccagttcttcatctgcaccgtcgcgaccccttggctcgacggcaagcacgtcgtcttcggccaggtcgtcgagggcatggacgtcgtcaaggccatcgagaaggtgggcacccgcaacggctccacctccaaggtggtcaaggtcgctgactgcggacagctctcctagatctctctgatctggtctgttcggccgccctccctccgtcatcgtcgactccccctgcgtccgttcctttggatctgaataagatggtggtgatctgagtggtggtcttagtttatcatgtatcgctcgcagtttaatttagcggtttaggtgtggatctgtgaaccccatggcgcctctgcttgattcgtgtttcacctgttatgttctgagattcatgataatgctatgagaactgaaattcccgttt

SEQ ID NO: 20361 - DNA, 1150 bp, Zea mays
  Clone ID: LIB3180-045-B9_FLI
gtcccctctagccgccgcctaccgctcgcgctctcctcgcgttcgggaaggtcgtttcgccatggcctcggagacggagacgttcgccttccaggcggagatcaaccagctgctctcgctcatcatcaacaccttctccaagaacctcaagcttggcatccacgaggactccacgaacaggaccaagattgctgagctcctgaggtaccactcgaccaagagcggggatgagctgaccagcctcaaggattatgtgaccaggatgaaggagggccagaacgacatcttctacatcactggtgagagcaagaaggctgtggagaactccccgttccttgagaagctgaagaagaggggctatgaggtgctgttcatggtggatgccattgacgagtattctattggacagctgaaggagtttgagggcaagaagctcgtctctgccaccaaggagggcctgaagctggacgagagtgaggatgagaagaagcgcaaggaggagctcaaggagaagtttgagggcctctgcaaggtcatcaaggaggtgctgggcgacaaggtggagaaggtggtggtctccgaccgcgtggtggactccccctgctgcctggtgaccggcgagtacggttggaccgccaacatggagcggatcatgaaagcccaggcgctgagggactccagcatgtctgggtacatgtcctccaagaagacgatggagatcaaccccgagaacgccatcatggaggagctccgcaagcgtgccgaggctgacaagaacgacaagtccgttaaggaccttgtcatgctgctgttcgagacggcgctgctcacttctggctttagcctcgacgatcccaacacctttggcagccgcatccaccgcatgctcaagctgggcctgagcatcgacgaggacgaggaggctccggaggctgacaccgacatgccccctctggaggatgacgctggcgagagcaagatggaggaggtcgactaagctgggtttattcttatggaggaaagagagagaacatcgggtctgttctgtgggtcttaccacttatgctattatgcaatctgttgttggtatgctagtgctactattgtctctgctgtcttctagttaattttgttgttgttttgcgtggtc

SEQ ID NO: 20362 - DNA, 1812 bp, Zea mays
  Clone ID: LIB3180-045-D9_FLI
gcgaagagtgctgttagttgatggatcattgcataacaagctgttcccttctacaacttcattgcatcaagagcttatttgttttgatcttccatcgttacattcaactttcttggatttgctgaatgcaactattaaaggcatgcgaagccaactcttacctcatggtgctagtatcatacggcttataacagagtacttcaaaatagcaaagctgcctactttgaggacaaaaacttatagcattttgcagctgttgctgacctccatgggtgttgggacgtctctgcacctgcttgaggcaacagtcagcaatgcagttgctgatctgaatgatgatggtgaaattaacatgactatgatcaacacaaattcatcgcaattgaccaatgaatcatcatcaaaagtttattcgaagaagaggaagcaagaaccacagatgcaaaactcaaccatctcaggttcagagaaagtagcaatcagcccaaggaaaagaaaaggttcttccataccaattgcatcaaagggagtggcccctgaaagtacaggagatgttacactatcaactccacattctgtcaaaatagctgcgcttgaaacattggaagttcttttgaatgtgggaggttcattgcggatggatcgctggaggtcagaagtggacatgctcttaattaacgtggctagaagtgcttgcggcatgggagggagttatgagcaaaagccatccacatttggggagccaaacatatcggacttccaacttgcttcgcttaagggcctgctggcatcttttctttcttctcatgcccgtcctccttatttagccaacggaattgaactcttcagaaaagggaagctagagataggcactaaggttgcagagttttgttcacatgctttgcttgctttggatgtccttgtccaccctcgagccctttctctggaaagaacagttcctgcaagctctgggttcaactacactgcacagaaaaaaacagtttttggtgctggtacacaccagatctcaccatttggggaccagcctcaagcaatggaggtcgaagacatgtacgatgactggctaatatccaacaacaatgaaccaccagaggttccagtgaacggtagtgatgctgtggtaagtaaagatgtgctggtggaggatggaaagcagctcaatcccatagcagaagatccaaaagtcgacccacccagaatcacagacgcagcacaagatgcaccagcatccaccaagactgatgtcaaggtggtcgatgcagctgcagccacagctgccaagccaaacacagcggagaatccttcgagttccaatgctgtcccctctccagtgcgcacaacagattctgattcacgtaagcatgcgtcatttcccgagcaggatagtcctcatgagaacaaaagcgcagccgtccatccaggtgaagcttctgcgactccaggtgttggttcaagccaccaccgccatcaagcacctgaggcccgttcagccagcttcacggaattgtttggttctgagtctggcatcgaatcagagtccgaagacttgatgccagatatcgtcgacggggaccctgactctgactaggtttggttacagttcgttttttttgggtaacatctgtatggctcgatccgttttttgtggactagtgacaacattgccgtcgtcatttgtgacatggcaatggaaatttttgtgatgttcctgttttgttttgagcaaattgtacggcattgccgggtcacagatgcagtatttgattgatagagatggagctaaattttgtg

SEQ ID NO: 20363 - DNA, 1125 bp, Zea mays
  Clone ID: LIB3180-045-F7_FLI
ggatggagcaagtacaggttgttggagttacttgcttgggaatgtatcatcctttattagcacataagaagtttgacacatgtatcatggatgaagctggacaaattacattgccggtttcactgggacctttgatgcttgcaacaaagtttgttctagtaggagaccattatcaacttcctccactggttcagagctctgaagcgcgagaaaatgggatgggcatcagcttattttggagattgtcagaagcacattcccaggcaatttcagcactgcgatgccagtaccgtatgtcatctggtatcatggagctctcaaattcgttgatttacggtaataggttgtgctgtggttcattggaaattgcaaatgccaaactcaagttttctggtagagaaccaatgcagttgaagttaaaagagatcttgaatcccgatagggctgtgatctttgccaacacagatcaaatacctgcacttgaggcaaaggaacacagaactgtgaacaatcctacagaagcacacattatttcatggatcatcaaagaattactaagaaggggtgtagctcaagatgctattggtatcataaccccatataacgctcaagtgaatatcattcagcaatacactgattgtttggttgaggttcatacgatcgataaataccagggtagagataaggagtgtataatagtatctttcgtgcgctccactgcaaactcaagggctagtggttcttctctgcttggtgattggcacaggatcaatgttctgttgacacgtgcaaagaagaagctcatcatggtgggatcacgtggaacgctttcaacaatacctttgctcaggcttcttgtcgacaaagtagctgagattggtggcctgttggatttgacaaataaggatgcacattctttttcgagaacttgaagttcttgtttgaatgcacaataggatgcacggtagatgaatctggaaggtttttataaggccaagctgtaaataagaatatgctgtaaattttgtttttggaaatgtatagtaaacctagccaagagccacacagctagaggttaggttttgtatattccttccgttagttataacttatttcaatttcatt

SEQ ID NO: 20364 - DNA, 1224 bp, Zea mays
  Clone ID: LIB3180-045-G11_FLI
cagagcagcgaaaagcatggatgccgaagccgccgccgccgccgagggccaggtgcggcactggaccgcggacgtcaacggcatttccctccacgtcgccgagcgcggcgccgccgacgcgccggcggtcctcctcatccacggcttcccggagctctggctctcgtggcgccaccagatggccgcgctcgccgcccgcggcttccgcgcgctggcccccgacctccgtggctacggcgactcgtccgtgcccaccgaccccgccgcctactccatcctccacatcgtcggcgacttggtcgcgctccttgaccacctccaactcacaaaggtgttcgtggttgggcacgactggggcgcgatggtggcgtggcacctctgcctgttccggccggaccgggtgcgcgccgctgttgtcctggggatcccctacttcccccgcggccctcgcccgatgacggactcatttgccaagctcggcgatggattctacatcaatcagttccaggagccaggaagagccgagagggcatttgctcgctacgatgttgcgacggtcctaaagaagttctacgccttgaaaatcgacgagatgattgctcctcctggagtggagatcatagactttctccaggcaccttcttcgccgattccctggatgacagacgaagaactgggacagtacgccgagaagttcgagaagactggcttcacaggacccctcaactactaccgcatgcttgaaacaaactggagactgactgcaccttggagtggatcgaaaatcacagtgcctgcgaaattcatactcagcaagaacgacgtcggcctgcagtccttcggaaccgagaagtacgtcaagagtggcgctctgaaggagaacgttccagaccttgagatttcgatcatcgaggggcaccatttcgtccagcaggaagaggccgggacagtgaattcggaaatactctccttccttggcaagtttcccagcgagggaggatcagcgtgattgttatttattgtttgcagccagtcccggactcctgagaggaagatggcctcagaatgatccgagggtttatgattgaataaagtgagagctcagatcgatagccgtctgttggcttgcattaaaaaaataaagagcttgcatgtaaaactatttatgaacgaataaacttctgtcatatactcgcaagtctcaacattgtttacatgccagcc

SEQ ID NO: 20365 - DNA, 1280 bp, Zea mays
  Clone ID: LIB3180-045-H2_FLI
aaaaggtgccagtgaggacgaatccaagcacacgcccccactcgcttgaaactgccgcagagccccgcaaaggcaacgactgaaactgctccggcgaccacgagcgcacctaaaccccgcctgcgtctcgtcgccgagaagaatcttcgccttcgcgaagcctctccatctcccctctccgccgccgccgcttcctcgccgggactcgggagtcgggagcaatgcagctgtaccaccacccctattcgctggacagccagaaggtgcggatggcgctggaagagaagggcattgactacacatcttatcacgtcaatcctctcaccggcaaaaacatgaatgtggacttcttccgcatgaacccttccgcgaagctccctgtcttccagaatggagcgcatgtcatctatcgcgctatcgatattattcagtacatagacagacttgcagtgcatttaagtggtgaaatcccccctgtgaacactgaggtccaccaatggatgcagaaagttgatgcttggaaccctgagatgttcaccctcacgcacaccccagccaagtaccgtgcgtttgtctccaagttcataaggcgggtgctgattgctcgcatggctcaagcccctgatttagccagcatgtatcatgtcaagctccgtgaggcttacgagacggatgataaagtgaaggaccctgacatcatgaagcaaagcgaggaagaactaagcaaactccttgatgatgtcgaagctcagctcggcaagaccaaatatctcgctggcgatgaattctcacctgctgattcgatgtttgtccctgttcttgcgcgcataactattctggaccttgatgatgagtacatcaactgcagacccaagatacttgagtactacaatttggtgaagctgcggccaagctacaagattaccattggcagatactttagtgggtggaagaagtaccggactctcttcaagacatctttcttcctttgtgttcgaaccctgttcaggaagtactagatagttcggcggatgaaatatctgaatcagtaccttgtgaactgacatgtatagtgagtttcggttaaaaaataatctgtatatcttccatgtgccttttgtggtcttgagttcagtttttacctgtaaaatcaatatgtttgtttgattatatatttctgcttcatgctggatgcaaaaatgaaggttatagaactgtatacagaataggactaagtatatattttggttttatcacttgttctagtccaattcatgtct

SEQ ID NO: 20366 - DNA, 429 bp, Zea mays
  Clone ID: LIB3180-046-H8_FLI
caacctgtgcgccatccatgctaagcgtgtgaccatcatgccaaaggacattcagctggcaaggaggatccgcggcgagagggcctaatcgccacctcaaacatcgtgacaaaaacatgaagtcctggggttattgttaatctggtgccattgtaaggacatatgagtagggtttgttttgtggatcgcaagtttctcttctgctactgttgctgctacctttgctggtgttattgctagggtcgaatacttaagttaactatgcgctgacagtctggactagcagtgttatgtgcgctgctggaccttgcgcgcaatgctgtggccgatttgttcgttaatgtcaagaattgtgttacagtgcgtgtatatatgtgtgtcgccgcatttttatttttgagaattgttttaagctgatgtttcgtcacc

SEQ ID NO: 20367 - DNA, 1198 bp, Zea mays
  Clone ID: LIB3180-047-B3_FLI
gggatgcaggaggtctctatcaagttggtcagtttcctcactggaacgtttggtcagagtggaatggaaaggccaacacttaggagtatgtttcaaacaatagcctcactgacaacattagtatcgcgataccgtgcgtcagttcatcaaaggcacagatggatttgctggtgcttttgctgaatgcctatgtggaagtccacagttataccaggcaggggggaggaagccttggcacagtatcaactttgtatgtgcacacgatggatttacactggctgatttggtcacatacaatagcaagtacaacttgtcaaatggtgaggacaacagagatggggaaaatcataatcttagctggaattgtggggaggaaggagaatttgcaagtctgtcagtccgaagattaaggaagaggcaaatgcgcaatttctttgtttgtcttatggtttctcagggagttccaatgttctacatgggcgatgaatatggtcacacaaagggagggaacaacaatacgtactgccatgaccattatgtcaattatttccgttgggataagaaggaagaacaatcctctgatttgtacagattctgccgtctcatgaccgaattccgcaaagaatgtgaatctcttggccttgaggacttcccgacttcagaacggttgaaatggcacggtcatcagcccgggaagcctgactggtcagaggcaagccgattcgttgccttcaccatgaaggacgaaaccaaaggcgagatctacgtggccttcaacaccagtcaccttccggtggttgttgggcttccagagcgctctgggttccgatgggagccggtggtggacaccggcaaggaggcaccatatgacttcctcaccgatggcctgccagatcgtgctgtcaccgtctaccagttctctcatttcctcaactccaatctctatcctatgctcagctactcctccatcatccttgtattgcgccctgatgtctgaaagaagcagatacaatagagtatactatagcggttgttctctaggctgtagcatgcagtggaaactggaaaatgttggggttgctctgttgtcggtagtttacatgcgcatgtcggtatgtgtagctaaagctggtggatctcagttctcagatcggactcgagacggggaaaaccattgcccagttggctggttctctga

SEQ ID NO: 20368 - DNA, 950 bp, Zea mays
  Clone ID: LIB3180-049-D5_FLI
ctcgacgccgcgggcaacaccacggccgccatcggcaaaggcttcgccatcggctccgcggcgctggtgtcgctggcgctgttcggcgcgtacgtcagccgcgccgggatcacggcggtggacgtgctgagcccgcgtgtgttcgtgggactcctcctcggcgccatgctcccctactggttctcggcgatgaccatgcggagcgtcggaagcgcggcgctgaggatggtggaggaggtgcgccgccagttcgacaccatcccgggcctcgccgagggcctcgccgtgccggactacgccacctgcgtcaggatctccaccgacgcctcgctcaagaagatgatggcgccgggcgcgctcgtcatgttcagcccgctcgtcgccggtacgctcttcggggtcgagacgctcgcggggctcctcgccggcgcactcgtctccggcgtccaggtcgccatctctgcctccaacagcgggggtgcatgggacaacgccaagaagtacatcgaggccggcttgtcggaggaggcgaggtcgctggggcccaagggatcggaggcgcacaaagcggcggtgatcggggacaccatcggcgacccgctcaaggacacctccggaccgtccctcaacatcctcatcaagcttatggccgtggagtcgctcgtcttcgcgcccttcttcgccgcgcacggtggcatcatcttcgaccacctctgatcaatgcatgctgctgacgttccatggcaaaggcgccggctgtcgccgcaagccgcctctttgaatttgccgtgatcagttagtaagaataatcgtcgtgtatgtagcctgtaacaagtaatgccagaccaccagagttggaggcttattcatgtctggccctcttatcttacccttgaatatgttgctcggtatgctgcaactgcaatacaaagcgcgaacactagtcggct

SEQ ID NO: 20369 - DNA, 3342 bp, Zea mays
  Clone ID: LIB3180-050-C8_FLI
cgaacccgtcccacaagcacgcgcgacgcgagccaaggaagacgagagcgaggtggagagagagagagagaggaaaaccctgccccgtccaggcagccgtcgtcgacgcaaacggcggaggccacagagacgccacgcgagggagccccgccgcagcagcacccgcgccgtcccaattcggcgccccgatcgccggatctcctcgccggcgccggggccctcgatcgccctctccccatgcccgtgcccctccgggggtttcattgcgcgggcgccggccatgtcggacctcgcttccagctgcaaggataaacttgcgtattttagaataaaggagctcaaagatatcttaaatcagctggggttaccgaagcaaggaaagaagcaggaccttgttgacagggtattggctattttatcagatgagcaaggtcaacatcatcatggatggggaaggaaaaatgctcttacaagggaggcggtggcaaaagttgttgatgacacatacaggaaaatgcaagtatgtgctcctgaccttccctctagaagccacagtggatcagatttcagtcatttcaggcccaaagaggaagcgcctgacttctaccatgtggatactaaggtccgctgcctttgcaatagcacattgctaaatgacaatatgattaagtgcgaagatggcaaatgccaggtgtggcagcatattacctgcgtactcattccagataagcccacggagggtgctggccctgatattccacctcatttttattgtgaactgtgccgactgaaacgggcagacccgttttgggtgactaccggaaatccattactacctgtgaaatttatgtcatctggtgttggaaatgatggagcaagtgtacctcaaattgtggagaagactttccaactttcccgagcagatagagaaacagttcagagacaagaatatgatctccaggtttggtgcatccttataaatgacaaagtccagttcaggatgcaatggcctcaatatgcagaattgcaagtgaacggtattcctgtacgagtaatgaccaggcccggttctcagttactagggataaatgggcgggatgatgggccactggtaaccacatgcagtagagaagggatcaacaaaattagcttatctagagtggatgctcgaaccttttgctttggagttcgaattgttaggaggaggactgttcctcaggtattaaatttgatcccaaaggaaggtgaaggggagtcttttgaggatgctcttgctcgtgttcgtcgctgtcttggaggtggaggtgctacggacaatgctgatagtgatagcgacctggaagtggttactgaatctgttacagtcaaccttcgttgccctaatagcggatccagaatgaggattgctggaaggttcaagccttgtgttcacatgggctgttttgatcttgaaacttttgtggaattgaatcaacgctcacgcaagtggcaatgcccaatatgtttaaagaattactctctcgagaacttgatgatcgatccttatttcaaccggattacatctttgttgcacaattgcagtgaagatgttaatgagcttgatgttaaacctgatgggtcatggcgtgtgaagggtgatgccgctaccagagatctatctcagtggcatatgcctgatggtactctttgtgactcaaaggaagatacaaaccctggtgtcgttagtgttaatgagttcaagagagagggtacttctgatggacatagaactttgaaacttggaattaaaaaaacccctaatggattatggcaggttagcagtaaaccagatgataagaaacccgtggttagaaatcacatccaaaacaacacggggtactcaataccaaacatagtacctatgatcagtagccccactgggagttgcagagatggtgaagatgtaagtgtgaaccaagaagggggtggtattcagtttgatatatcattgaaccaagagtttgacagttttgcgcataactttggtcaaacatacaatacagaggataggcaacaagagccacaacataatgctgcagatgtcattgttcttagtgattctgatgaagaaaatgacccgattgttcgcctgccagctgtctatgcaaatactcctacaaatggtgacagtttccctttcgtcactgatgctgctgtatctggatatcctgaagggtaccaggaggatgctggggttggtacaagtggccttggtttattgagcaacaatactggtgattttgaaataaataactggcaaatgcattcttatccacaaccagagcaagggttccagttttttgggactgatactgatgttggcaatccttttgttggtccgcataattcctttagtattacaccagaagactactcccttgactgtaatgttggcatagaggatccatctgcagctcacgatgtctcaatttgccgaaacagtaatgatgtgcatggaagcttggttgataacccattggctttagcaggtgacgatccatctttgcaaattttccttccaagtcaaccttctactgttccccttcaggaagaactgagtgagcgcgctaatactccaaatggagtccaccctgatgattggaggatatctcttacgcttgcggctggtggagggggtaatgaagaacctacaagtgttgatggcctaaaatcacagccaaaagttccatcaaaagaggcaggagttgaacctttacttgatgctgcttctgctctcccaagcatgaacaatgacagatgtaatggatctaatctaaacccgagaaggattgaaaatatattttctcatcctcgccaaccacggtctgttaggcctcgtttgtgtttgtcattagattctgattcagagtagttcggacatcacactgggatagctgaatttgctattaatctggcaaagttggcttccagaatcttgatttttattgtggagggctatcaagttattctggttgatacaaagagaaacaccagtgtggatgctttattgcattaacctggtaagattcaagtgttctatatgatccaagtgggatctccatagagttcatctaatggttggtacaggatattttctaactgggagtggtttaacgtggctagtggagcaggctgtacattttccctgacatttactgggtataaggaatagggggccatcacttggcacaagacaaatacatgtgaatgttttgtgtgtaccatcattgtatttagggttcgggtgttaatttagatgtttatgaccctgatgtttgatggaaaataaattattccttgatg

SEQ ID NO: 20370 - DNA, 582 bp, Zea mays
  Clone ID: LIB3180-050-D8_FLI
ttacccggcggcggaagcgtaagcgcaaaacgaagcaagcggccgccatggtgaagggacgcacgggacagcgcgtcaggctctacgtccggggcaccatccttggatacaagaggtccaagtcgaaccagtacgagaccacgtctctcgtgcagatcgagggggtgaacaccaaggaggatgtcgcgtggtacgctggcaagcgcatggcgtacatctacaaggccaagaccaagagcaatgagacccgctacaggtgcatctggggcaaggtcacccgtccgcacggaaactcgggcgtcgtccgtgccaagttcaagtccaacctcccgcctgagtccatggggcgcaaggtcagagtgttcatgtacccgagcagcatctaaggttttgttggagtaaagatggactagaaatggccatgtgtttatttctcacttttctctgaacttaaaatgccttgtgttggtaacttagattgttcaagtgctgaacctgtggaagttgtgccaaaatttgttgtcgaacggatgaactattgtcgtaatgttatgccagcagcagatcttaatttgccccgtt

SEQ ID NO: 20371 - DNA, 1182 bp, Zea mays
  Clone ID: LIB3180-051-E8_FLI
gcttatctcttctccctcttctctcacctttcacaaaatctctctgtctcacgcctctcccgcgcgcccttctcccacgcacggccggctccgccgccggtcgcgccgccccgaccgcgccccgccctcgaggagcccaccccggccgccaccgcggccgcctctcccgcccccgatcgcgccccgccccgcccccgtggcggcggtggcaggggtggccgcggcggtggcatgaagggcgggagcaaggccgtcgtggtggcgcacaagcacgccggtgtcttcatctccaagtccaaggaggatgcgctctgcaccaagaacatggtcccgggagagtccgtgtacggagagaagcgtgtctccgttcagaatgaggatggaacaaaagtcgaatacagggtgtggaaccccttccgttccaagctggctgctgctgtgcttggtggtgttgacaacatctggattgctcctggtacccgtgtgctgtatcttggtgctgcttctggcacaactgtatctcatgtgtctgatattgtagggccggatggtctggtctacgctgttgagttctctcacaggagtggaagagaccttgtcaacatggcaaagaagaggaccaatgtgatccccattattgaggatgccaggcatccggcaaggtaccggatgttggttggcatggttgatgttatcttctctgatgttgcacagccagaccaggctaggatcttagcacttaatgcttcatacttcttgaagaacggtggccactttgtcatttcaatcaaggctaactgcatcgactccaccctgcctgctgaggccgtgtttgcagcggaagtggagaagctcaaggcggatcagttcaagcccgcggagcaggtgacgttggagccctacgagcgtgaccatgcatgtgttgtgggtgggtacagggtgcccaagaagcagaaggccacctcttaggatcggaatccgtgctcgtcttgcctaccaaagatgcttcgttgtattgtggtttattaagaaactttgaaggattagtcaaagtatgtgaaccttctgcagtgaaggctggtttagcagcgacagctgttagggtctgatgcagtgtttgctggtttaacagcattattattattattgttgatgaaacatgggtttggtttcgttgatctc

SEQ ID NO: 20372 - DNA, 1901 bp, Zea mays
  Clone ID: LIB3180-053-B5_FLI
gccgccgccggcgccaagcccctgcccgccgccacctccacgtccgtctccttcccggccacccaccagcccgcgtgcctgctctcctcgcccgcgcccgggtctctgcgccgccgggacgtcgccgccatggtctccgcgccgccggccgtcggcaccgccatgccgtcgctcgacttcgacacctccgtcttcaacaaggagaaggtctccctcgccggccacgacgagtacatcgtgcgcggcgggaggaacctgttcccgctgcttccggaggcgttcaagggggtcaagcagatcggagttattggatggggctcgcagggtcctgcccaagcccagaacctgagagattcactggctgaagccaagtcagatattgttgtgaagattggtctccggaaaggatccaaatcttttgaggaagcacgtgccgctggattcaccgaagagagcggaaccttgggcgatatttgggaaaccgtctccggcagcgatcttgtgttgctgctgatatcggatgctgcacaggctgacaactatgagaagatcttctctcacatgaaaccaaacagtatccttggtttatctcatggatttcttctaggacatttgcaatcactcggactcgatttcccaaagaacatcagtgtgattgctgtatgccccaagggaatgggtccatccgtccgcagactttatgttcagggcaaggaagtcaatggcgctggcatcaactctagctttgctgtgcaccaggatgttgatggaagggcaactgatgttgctttagcatggtcagttgcacttggttcccccttcacgtttgctactactttggaacaggagtacaagagtgatatctttggagagcgaggcatcttgctgggtgctgtccatggtatcgtggaggctctgtttaggaggtacacagaacaaggaatggatgaagagtcggcctacaaaaacactgtcgagggcataactgggatcatctcgaaaaccatctcaaagaaagggatgcttgaagtgtacaactctttgagcgaggaaggcaaaaaggagttcaacaaggcttatagcgcatcgttttacccatgcatggatatactctacgaatgctatgaagatgtggcctctggaagtgaaatccggagcgtggtgttggctgggcggaggttttatgagaaagagggcctcccagcttttccgatgggcaacatcgaccaaactcgcatgtggaaggttggtgaaaaggtgcgctcaacccgtccggaaggtgatcttggcccgctccatgccttcactgctggagtgtacattgccctgatgatggctcagattgagatcctgaggaagaaggggcactcctactctgagatcatcaacgagagcgtgattgagtcggtggactcgctgaacccgttcatgcacgcccgtggggtcgccttcatggtggacaactgctccacaacggctcgcctgggatccaggaagtgggcgcctcgcttcgactacatcctgacgcagcaggcctttgtggcggtggacaaggacgccccgatcaaccaggacctcatcagcaacttcttgtcggaccctgtccatggtgccattgaggtctgcgccgagctgaggcccaccgtcgacatctctgtgcctgccaacgccgactttgtgcgcccggagctccggcagtcttcctagattgaggcagtgagcggagagggagagggagagagaaagagaggatttcgtgtcccgagttagaacagagtgctgtatgttttgtgcgactgtttgtaagtcaagtctgaactgtgaacctatgtttgcttctatcagaggacccggagaaagcctgggcatctgtttccggaataaaatgggtccttcggaat

SEQ ID NO: 20373 - DNA, 986 bp, Zea mays
  Clone ID: LIB3180-053-B9_FLI
gctccgcaccccaatctaatcgacacctcgccgagatgggccgcaagttcttcgtcggtggcaactggaaatgcaatggaaccacagatcaggtcgagaagattgtcaaaaccctgaatgaaggacaggttcccccttcagatgttgtggaggtcgttgtcagccctccttatgtcttccttcctgtggtcaagagccagctgcgccaagagttccatgttgcggctcagaactgctgggttaagaagggaggtgctttcaccggtgaagtcagtgctgagatgctcgtcaaccttggtgttccctgggtcattcttggacactctgaaaggagagctctgctgggagaatcaaatgaatttgttggagacaaggttgcgtatgccctgtctcagggactaaaggtcattgcatgtgttggtgagacacttgagcagagggaggctgggtctaccatggaggttgttgctgcacaaacaaaagcaattgctgagaagatcaaggactggagcaacgtagttgttgcctatgaaccagtttgggctattggaactggtaaagttgccaccccagctcaggctcaggaagtgcacgcctccctgagggattggctaaagaccaacgtcagccctgaggttgctgaatctactaggatcatttacggaggctctgtaactgccgcgaactgcaaagagctagcagcacagcctgatgtcgatgggtttcttgtcggtggagcttctttgaagcctgagttcatcgacatcatcaacgcggccaccgtgaagtccgcttaagatgttacgctgaagacgaacatactttttttttgctcaactgtgctatgtaagctagtagcttttgcgcaggagcagagactgttttgcctgcccccaacttttagcttgagcttgctaataatgtttacctctggacgtatcaataatggtgcttatgtaccccttttttgtgccgaattacggtgg

SEQ ID NO: 20374 - DNA, 865 bp, Zea mays
  Clone ID: LIB3180-053-C6_FLI
gaaaggccccgcttctatttttgacgcttataccctcgctctgctcatcgaaccaaaccctacaccgcggcgacaggtataaaagacatctcccgacccgtgccctactcgccgccgccgccacaccgccaccgccacctacgcaacaccaggcgctccagcagaacagcactcggagctcgcctgcccgacggcccaccatgatcatccccaagaagaaccgcaatgagatctgcaagtacctcttcaaggagggcgtgctgtatgccaagaaggactacaacctggcgaagcacccacagattgatgtgcccaacctccaggtgatcaagctcatgcagagcttcaagtccaaggagtatgtcagagagaccttctcctggcagtactactactggtacctcaccaacgatggcattgagcacctacgcaactacctgaacctcccgtctgagattgtgcctgccacgctcaagaagtctgccaggccactgggccgtccatttggctctggccctcctggtgaccgcccaaggggccctggtcgttttgaagacagaccaaggtttggagacagggatgagtaccgtggtggtcctcgtggtgcttccggtgactttggtggcgataagagtggagctcctgctgagttccagccatctttcaggagttctggcgcgaggtctggctttggccgtggtggtggcagcggctttggcgctggcccgacctcttcttccatggagtgaacagtgaagctgcccttagtttggacatgatgtttcccctcccgtgaggcgtttaattttgaaggacggttattatgtactagtaatgttttccggatcggctagtgctgacatgc

SEQ ID NO: 20375 - DNA, 913 bp, Zea mays
  Clone ID: LIB3180-054-A12_FLI
ctccaccgccagaatcatcgtcaccccggagcctctccttcccggtctcctccgcccgttgccttcgtcccctccatctccggctgcgacgccggcgagcccgacaccgcgaatcggatccgccgacaaggcgagagggaagagatggggctcacgttcaccaagctgttcagccggctgttcgccaagaaggagatgcggatcctgatggtgggactcgacgccgccggaaagaccaccatcctctacaagctgaagctcggcgagatcgtcaccaccatccccaccatcggattcaatgttgaaactgtggagtacaagaacatcagcttcactgtctgggatgtcgggggccaggacaagatcaggccactgtggaggcattacttccagaacacccagggtctcatctttgttgtggacagcaatgatagggaccgtgttgttgaagcaagggatgagcttcaccgaatgctgaatgaggatgagttgcgtgatgctgtgttgcttgtgtttgctaacaagcaagatcttccaaatgctatgaatgccgctgagatcactgataagcttggactgcattcacttcgccagcgtcattggtacattcaaagcacttgtgctacaacgggtgagggattgtatgaaggcctggactggctgtccagcaacattgcaaccaagtcctaaattgtcaagcaaggtttggatcatctaggagcttttggatgatgatgatggtgctggatatttagggttgggttggtatttccgtatgtaagatgtatgcccctgagctcggcagtttttgagctctgcttaagattctcacagttaaattgttttatgtaatttgggccttgagatgtttctgaaccaaacagctaaaagagttcagttgagttaactggtt

SEQ ID NO: 20376 - DNA, 2178 bp, Zea mays
  Clone ID: LIB3180-054-D2_FLI
tgggagtgtgccaacacgatccatagtgtctggaaatgcgccagtcaatcaagccttgggatcttcaaaagtcagtgctggcatggaaagccagtcacaacaattgagtgcgcctaagcctttagctgcaacaagcttaagtcagactcaatctcatggcattcaagaagagcctaaaattcaggggaagaaacaactattattcgagagtttgcctgcaaccgatctaaaggttagagcgagcggcatgtgatgcgggtatgtacatcgttgttccaaaattcatgtgtttgatgccggattgcctgtagctagctgttcatagtagggattagctctgaaaaaattgggggaaagcaaagtacactggtgacctcaagttcaatcgaatcaatatggcacatcggggcatggagctgcgtgagcactgccgccatatagttgacaacgatgaccgacactatagattccattctctgtgtgtacaccaaggtgctcgaaccattagttgggctaaggaacacggagcagcagcaacaatatcgtaaggagagtgcagacgttggacaaatggtatgccatatcttcagttctcttatgatgcttcagcgctgcatcttcagttttctcggctaaaaagagatcatagtcaatagtatacctatgtgtgaaatactgtcaaacttgcatggtatatggacctcagaaagtataggaaagcgctatgctatttgcatgtttgctgggagaaagaaaagatagatgaaggtaattatacagtttctaatacattgttcagcttttgttatttctgccatatgatacacactggtcatgaggacatgtcgattgtagttcactggtattgttttttttgaaaggaagcggcaaaagacttgcctcttcattgtattagattaggaaaaataagataatccacaggaccgaaacacacaccggaagagaaaaaacaaaatcaaaatacaaaaaaagttcactggtattgtaagctttgcagataagagcacaacttttccccctcttttctaaaagggaagctcatgttcatttcagcaattcagcttcaaccatttggcattcatgtaatatttcataggagttaaagtgcacatacctaatcaagtctgtgggtctccaattctgaaatagaaagataatttatgttctcatctttctgaaatgaacaagatgactggcttatgggttaaggtttttttatagagcaccatgacttatcaggtaaagttatagttgtgcacaaaatgtcattttttaatccttaatgtgtgtgctattcacacctgtcttcttttgcagttttgtgaacaaccctaacttatgtggtcctggcaccacaaaaccttgtcctgatgctcctcccttttctccacctcctccatacaaccctacaaccccgatgcaatcaccaggtgatttattcagattgtccaataaaatccttgagttcaataggacctttccttccttactctttcatctaaatgacatcctaattgggaaaatgtatacctccaaaacaagcataatgctatcaaggctggagagcggtaaggaataactgcatgttttcttgaaaattaagttgaaaataatttgtaatcaggagctagagtgttacatggtactatgattctgtgctgctattagtctgtggctcagcggtatgtgtgttgtactgctgttaatttgctatactggaatacaataggaagctactaacctatacctcgtgggattcaggaatgcagaccaagtcaataactaccttgtccttttggttttccctaccctacattagtatgggagtgattaagggtatggaacatatggctttgtcgttgacatcttttattttgtgcaggaagtagctcttccactactggagcaattgttggtggagtggctgctggcgcagccttgctatttgctgttcctgctatcagttttgcctattggcggcacaggaaaccacaagagcaagcatttttttcaatgtatctggcttcaaagttagtctttgattattatctttctcgcaacataagggcaaacaacgtttatatgtagcaaacaaatacggtttgcaaacgttttaggaacatgtttttacaataaagatatacttatagtttcacc

SEQ ID NO: 20377 - DNA, 1391 bp, Zea mays
  Clone ID: LIB3180-054-E1_FLI
cgtcggcgtcgctggcgtcgctcgtcgaggcacgcgcgtcgtctgcggacgccttcacgtgcgtcgtgtacgactcgtacgaggactgggtgctgcccgtggcgcggcgaatgggcctgcccgccgtccccttctccacgcagtcgtgcgccgtcagcgccgtgtactaccacttcagccaggggaggcttgccgtgcctccgggggcggccgcggacggcagcgacggtggtgctggtgccgccgccctgagcgaggcgttcctggggctgccggagatggagaggtcggagctcccgtcgttcgtgttcgaccatggtccgtacccgaccatcgccatgcaagcgattaaacagttcgctcatgcgggaaaggatgactgggtgctgttcaactcgttcgaagaactggaaaccgaggttttggctggcctgacaaagtacctgaaggcccgagccatcggcccatgcgtgccgctgcccaccgctggaaggaccgccggcgccaatggccggatcacctacggggccaacctggtgaagccggaggatgcgtgcaccaagtggctagacaccaagcccgaccgctccgtggcctacgtctccttcggcagcctcgcgtccctgggcaacgcccagaaggaggagctcgcgcgcggcctcctcgccgccggcaagccgttcctgtgggtggtgagggccagcgacgagcaccaggtcccgcgctatctcctggccgaggcgacggcgacgggcgccgcgatggtcgtgccctggtgcccgcagctggacgtgctggcgcacccggccgtgggctgcttcgtcacccactgcggttggaactccacgctggaggcgctcagcttcggcgtgcctatggtggcgatggcgctgtggacggaccagccgaccaacgctcggaacgtcgagctcgcctggggcgcgggcgtgcgcgcgcgccgcgatgctggcgcgggcgtgttccttcgcggggaagtggagcggtgcgtgcgcgccgtcatggacgggggcgaggcggcgtctgctgcacgcaaggcggcgggggaatggagggacagggctcgcgcggcggtggcacccggtggcagctctgaccgcaacctggacgagttcgtgcagtttgtgcgcgccggcgccacggagaagtgagaggcgctggctgtgaagtgtgaagggaggtgatgttgcagggtcccagatgtgacgacgcgatgcgaaggagaaacgtttcgaaactggaagcaaaaaacggtcgaaagttggtgcctctacttggtttggtttatgctttgggtccaccagccataataatatactttgcttgaggattctaccataacaattattcagccttttattttctaccctatg

SEQ ID NO: 20378 - DNA, 1637 bp, Zea mays
  Clone ID: LIB3180-054-F2_FLI
cgcatgccaaggaagagtagtaacatggttgataataggtacttgtagctaaggaaggagtcagttcaagcatgtttggacgcatgccaaggaagagtagtaacaataccaagtattacgaggttcttggtgtgtctaagaccgcaagtcaggatgagcttaagaaagcatacagaaaagctgccataaaaaaccatcctgataagggtggagaccctgaaaagtttaaagagctgtctcaagcttatgatgttcttagtgacccggagaagagggagatctatgaccagtatggagaagatgcccttaaggaaggaatgggaggaggcagcagcagtgatttccatagccctttcgacatttttgagcaactttttccgggttctagcacctttgggggtggtagctcaagaggacgcagacaaaagcgtggtgaagatgtggtgcatactatgaaggtttccttagacgatctgtacaatgggacaaccaagaaactatctttatcgcggagtgctttgtgctccaagtgcaaggggaaaggatccaagagtggggcatcaggaacatgccatggttgtcgtggtgctggaatgagaacaatcacaagacagataggccttggcatgatccaacagatgaacactgtttgccctgaatgcaaaggatcaggtgagatcataagtgacaaggacaaatgcccaagctgtaaaggaaacaaggtagtccaggagaagaaggtgttagaggttcatgtggagaaaggaatgcaacataaccaaaagattgtattccagggtcaagctgatgaagctcctgatacggttacaggagacattgtttttgtcttgcaacttaaagaccatccaaaatttaagaggatgtacgatgacttatatgttgagcacacaatctctctcaccgaagcattgtgtggcttccagtttgttcttactcatcttgatgggcgacagcttctgatcaaatctgaccccggggaggttattaaaccaggtcaacacaaggccattaacgatgaaggtatgcctcagcatggccgtcctttcatgaagggccgtctgtttgttgaattcaacgtcgagtttcccgagcctggtgcgctctcccctgcccagtgccgatcgttggagaagatccttccgccgaaaccagggagccaactgtcggacatggagctggaccagtgcgaggagaccacccttcacgatgtcaacattgaagaggagatgaggcgcaggcagcagcagaagaagcaggaagcctacgatgaagacgaggaggaggatgctcaaccaagggtgcaatgtgcccagcagtaaaatccgtgttcgttggaactgttctccaaaagtttcagcaggattttttatccatctgatcatctcgattctttttggcaaaaatataatcgttttataaactttaaactgttagttccatcctagtgtcagggaaaaaatgagagcccggaatggcatgttccttgtttgaactgcaatgcgtgattggtgttagttaagctctgctccatgttattttgttgtacccgtgaaaaaggtatcatgttcatggtgtgctactatttttgatgtgtaagaaacattgagcttgctggt

SEQ ID NO: 20379 - DNA, 976 bp, Zea mays
  Clone ID: LIB3180-055-A2_FLI
cgagatcgaccaaagcgtcgacgcctcctcgatggccatctcggcctccatggagaatgctgcgggcgcggtggcgggggcaagtggcgccggcggtggcagcgggagaggcaagaagaaagggatgccggccaagaacctcatggcggagcgccggcgtcgcaagaagctcaatgaccgcctctacatgctgcgctcggtggtgccgaagatcagcaagatggatagggcttctatccttggcgacgcaattgagtatctgaaggagctcctgcagaggatcagcgatcttcacaatgaacttgagtcagctccgagctcttcgcttgttggaccaacatcagctagcttcaacccatcaacaccgacattgcagacatttcctggccaggtcaaggaagaactttgcccgggctcattcccaagccctactggacaacaagccacagtcgaagtcaggatgagggaagggcatgcagtcaatatccacatgttctgtgcgcgtaggccaggcatcctgctgtcgacaatgacggccctcgacagcctaggcctcgacatcgagcaggcggtcatcagctgcttcaatggctttgcgatggacgtgttccgagctgagtgcgcggatggtcctggaatggtgcctgaagaaattaaggccgtgctgatgcacaccgccggcctccacaacgcaatgtagccggtccgaaaacgggccaccgccaggatgacgacgatcctcctcctttctactaagggcttcggttcggaagcggcataagattaagctgtggtggccattggttttctggggcaagtgatgaattttaagatgatgaggctcgccatctcgggcatgaggcatgagtgatgatgtaactatgggattcttttttttcttctcattagcctaatgtcggattttctcctctctgatacacttgtggtgtaatagaatctatgctgcgtgttgaac

SEQ ID NO: 20380 - DNA, 648 bp, Zea mays
  Clone ID: LIB3180-055-B6_FLI
gtctagtcttgcttcgccgaattccaaaccctagcctcgcctgttgcggccgcggcggagatggcgaagtctctgcgatccaagcgcgagaagcggctgcggacattgcgccgggagatagcggagcccttctacgacaagaaggaggccgccaagctcaccgcgcaggccgccgcgcttgctgctcccccgctccaggtccgcgggcccccgccgtcccaggatgccggcagctcccgcggcgctagctcagcctcggctatggatgtggagatgtccgatgaaggaaacaacagatctaaaaccttcttgaagccacttggcatcattagcaagaagaaggtacagcttcatttgaagatcaagaaagacaagagaaaagctaggaagaaggggaagttttcttttaaaaagtagacgcgtaaagcttgtagtcttataaatcatgtagttctgtttccagtttgaacaacaaatctaaaggcagtcatgagcacctaagtggctaagtccattcatggctagcctactatgtcgaaatgagtatggaaaagatggcgctgacctatcagttgtgttcatcttcacatggtatcgttgtgaactatttccttcatgccattttatgactgtatattcttgtcttgc

SEQ ID NO: 20381 - DNA, 1292 bp, Zea mays
  Clone ID: LIB3180-055-C7_FLI
gcggccgccgcgctgctgctggccgcggcgccggcgccggcggccgcggtcgacttcggcgcggaggacctggcgtcggaggaggcgctgtgggcgctgtacgagcgctggcgcggccgccacgcgctggcgcgggacctgggcgacaaggcgcgccgcttcaacgtcttcaaggccaacgtgcgcctcatccacgagttcaaccgccgggacgagccctacaagctccgcctcaaccgcttcggcgacatgaccgccgacgagttccgacgccactacgcgggctccagggtcgcgcaccaccgcatgttccgcggcgacaggcagggctcctcggcgtcggcgtcgtcgttcatgtacgccgacgcgcgcgacgtcccggcctccgtcgactggaggcagaagggcgctgtcaccgacgtcaaggaccagggccaatgcggtagctgctgggcgttctcgacgatcgccgccgtggagggcatcaacgcgatcaagaccaagaacctgacgtcgctgtcggagcagcagctggtggactgcgacaccaaggccaacgccggctgcaacgggggcctcatggactacgcgttccagtacatcgccaagcacggcggggtggcggcggaggacgcgtacccgtacagggcgcgccaggcgtcctgcaagaagtcgccggccccggtcgtcaccatcgacggctacgaggacgtgccggccaacgacgagtcggcgctcaagaaggcggtggcgcaccagcccgtgtccgtcgccatcgaggccagcggctcgcacttccagttctactccgagggggtgttctccggcaggtgcgggacggagctggaccacggcgtcacggcggtcggctacggggtcaccgcggacggcaccaagtactggctggtcaagaactcgtggggccccgagtggggcgagaaggggtacatccgcatggcgcgcgacgtggccgccaaggagggacactgcggcatcgccatggaggcatcctaccccgtcaagacctcgcccaaccccaaggtccacgccgtcgtcgacgaggacggctccagccatgacgagctctgaattgcgcactacactactacgtactagctatagcctatatagctatactatgattgatccatgtatgctcggacaggaacatcgccgactgtgaatgtctgaatggcatacgcacatcatacacctgcattcatgtaataccagtcgagacttgatgtaccagcaactttcatttcattcggttattattatattatttaact

SEQ ID NO: 20382 - DNA, 1151 bp, Zea mays
  Clone ID: LIB3180-055-D5_FLI
ctcacacacacatcgttgtccaaacaagagcggcgcggctcacggcggcctagctcgccggcctaacgaggccagatattccttaacctagctagctaacagctgactagatagatcgatccatcagctggcagccatgaatatgatcagggcagtacggcgccggttcaccgtcggccacctggctacggccaaggaccccgccacgctgcgccacgcggccgccgagctcctcgccaccgccatcttcgtcttcgccgccgagggcgccacgctctctctcgggaggatgcaccaccatgacaagggcggcggcggcctggcggcggtggcgctcgcgcacgccctcgcgctcgcggccgccgtggggtgcgccgccaacatctccggcggccacgtcaacccggccgtcaccttcggcgcgctgctcgccggccggatctgcctcgtccgctccctcgtctactgggccgcgcagctgctcggcgccgtcgccgccgcgctcgtgctcaggctcgccaccggagggatgcatctgccggagtacgcgctggcggggggcgtgagcggatggaacgcggcggtgctggaggcggccatggcgttcgggctcatgtacgcctactttgcgacggtgatggacaaagcgcggagggtccgcgccggcgccggagcgctggcggcgccgctcgccgtggggctcctggcgggggccaacgtgctggcctgcggcgcgctggagggcgccgtgatgaatccggcgcgcgcgttcgggcccgccgtcgtgggctcccgtcgctggagacaccaatgggtgtactgggtggggcccatggtcggcgccggcctctccggcgtcgtctacgagcacctcgtcgccggcacggccgccgaggaggaggaggagcccgcgccgagctgcggcgaccgccgtcgtgcgtagaggactacatgcatgcaggagcagcaggacgtcgtcgtcgtccccgctcctcggaatcttctgaataaaaaaaaacagcttgcatgcgtgctcaattgttgtgtgtcgtggtcgatcatgagtagaattaatgtttcatgcatgcactcttaccgtcttctacttatgtccttgtttgcttcaataatctggctgttgcgctgggtgt

SEQ ID NO: 20383 - DNA, 1129 bp, Zea mays
  Clone ID: LIB3180-055-F6_FLI
caagtacccgacggggctgagggcgaaccgggccaccgaggccggttactggaaggcgacgggcaaggacaaggaggtctacaacgccgcggaaggggtggcggtactggtcggcatgaagaagacgctcgtcttctacaggggcagggctcccaggggtgacaagacaaactgggtcatgcacgagtacaggctcgaaggcagcggcaggctccccgccggcctcgcgtccgcaaccggctcagccgccgccaacgccgcggcggccttgaaagcttctgcttataaggatgagtgggtggtatgtcgtgtgttccacaagaccactgggatcaagaagaccaccactgctgcaccggcgtaccaggtggccatggccggcgctgagatggatcagaatcagaacaacatccccttccccatgccgatgcaattttccatgctgcccgacttctccttggacccggtgcccccctactacccgtaccccaacgctggcgcggggatgccgatgcttcctatggcagcaggtataggtggtggcgccggtgggctccacctcaacggcgccgccctgttcggcaatccgatggccgcgccccagcccatgagcttctaccaccagatgggcacggggactgcttgcgctggcggcttcgatgtttctgcgccggagagtaggccgtcctcgatggtgtcgcagaaggacgaccaggctaatggcgctgagatctcgtcgatgatgtccgtggccggcccagggcctgcgaccaccaccaccatagagatggatggcgtgtggaagtactgaaaacgtggagggtcgagggcaaagacatgaattcgcataaattaaatatgcatgtaatatctatatctgcattgcattttgtgaaatatgatgcatgcatggtttgtatattccgtaataaccagtagttggtaagctatgtgtgtgtatggatgtactagctagtacatgcaccgtatcattgcatgtgtggtatatgtctcgtttggtgttagtaatctgcttggttgtgctgatgactgatggttgtaagaagcagattcgagtttggtacaatattatcgtgaacctatatattatatatatgttaattatagt

SEQ ID NO: 20384 - DNA, 748 bp, Zea mays
  Clone ID: LIB3180-059-B3_FLI
cgttccgtcgccgccgcgcgcctcggagaagagatagaggcggccgctgcatcgaccccgcgccacctccgcctgcctcccccggcaccgatcgggtttgatcgatggcgtcgaagaggatcctgaaggagttgaaggacctgcagaaggacccgcccacctcctgcagcgcaggtcctgttggtgaggacatgttccattggcaagcgaccatcatggggccttcggacagcccatttgcaggtggggtattcttggtgaacattcacttcccaccggattaccctttcaagccaccaaaggtgtctttccgcaccaaggtattccacccgaacatcaacagcaacggcagcatttgccttgacattcttaaggaacagtggagtcctgctttaactatctcaaaggttctcctgtcaatctgctcactgctcacggacccaaaccctgatgatcctcttgtccctgagattgctcacatgtacaagaccgacagggccaagtatgagtccaccgcacgctcctggacacagaagtatgccatgggctagaagcaaggctaaaagctggccaaactggtgaatgtgccggaccccaaatcgttatcacctaaataaccagtcaagtcgcaagtatgaatggacttttgaggaccattgtgccctgttgaactcatgtattaccttgtgaagtccgttgtgtctggtttctacctgaccgtttcgttatctgatgctgtttctttaat

SEQ ID NO: 20385 - DNA, 1407 bp, Zea mays
  Clone ID: LIB3180-059-C2_FLI
caccacctcgcctgcgatctccgtagcctccgtcgcgtcgagcatcgatcatgtcggcctactgcggaaagtacaaggatgagctcatcaagaatgctgcctacattggcacccctggcaagggtatccttgctgctgatgagtccactggcaccattggcaagcgcctttccagcatcaatgtcgagaacgttgaggagaaccgccgtgccctccgtgagctcctattctgctgccctggtgctctccagtacatcagcggtgtgatcctcttcgaggagaccctgtaccagaagaccaaggatggcaagccttttgttgatgtcctcaaggagggaggcgtcctccctggcatcaaggttgacaagggcaccattgaggttgttggcactgataaggagaccaccacccaaggccatgacgaccttggcaagcgctgcgccaagtactacgaggccggtgcccgctttgccaagtggcgcgctgttctcaagattggccccaatgagccatcacagcttgccatcgacctgaacgctcagggtctggctcgctatgccatcatctgccaggagaatggtctggtgccaattgttgagcctgagatccttgttgatggccctcatgacattgatcgctgcgcttacgtcactgagaccgtccttgctgcctgctacaaggcgctcaacgagcaccatgtcctcctggagggtaccctcctgaagcccaacatggtgactccaggctccgactccaagaaggtgactcctgaggtgattgctgagtacaccgtccgtaccctccagaggaccgtccctgctgctgtgcctgctgttgtcttcctctctggtggacagagcgaggaggaggccacccgcaacctcaatgccatgaacaagctcagcaccaagaagccgtggtccctgtctttctccttcggccgtgccctccaggcgagcaccctcaaggcctgggctggcaaggtggagaacttggagaaggctagagctgccttcctcgccaggtgcaaggccaactctgaggctaccctcggcacctacaagggtgatgctgccgccgacaccgagagcctccacgtcaaggactacaagtactgagttgcttctctttgcgtgcccgttttggaactcctgcctacgagctaggttgcggagtgtggtttgctcgttagagcttattttcggacatccaaaaaacatgcttcctatgtgggatgatggttatctttatatttgtatgttaattagtctctttgctgttaaatttcgtgtaagttggtcctgccgatggagaatcgagcagccccctttttttgttctatcaactatgctgtaatgctggctatgtatcggcaaaaacaattctatatgctgagttggagtcggc

SEQ ID NO: 20386 - DNA, 1533 bp, Zea mays
  Clone ID: LIB3180-059-C7_FLI
gcttcctcctccgcgcttccttcgccgaggcgtaagcgtcagcgagggcgtataaatcgctcccctccgcacattcgccaccgcctctccgctcctcgacaagaccaatggcggctgctgcgtcctctgctctgcacgccgttggcgccgtcgcctccgccaagcctagatccgtcgtccccgcggtggcgacgaggaggagcgtgcgcgtggcgcccgcggccaagcgaggaccaggctcgggaggaggcaggctcgtggctcgcagcgccgttgcagccaaggcggatgaggcggccgcggcggcgggatccaagtcaggcggccatgagttgctgatgtttgaggcccttcgtgaagccttgatagaagagatgaatttggatccaacagtgtgcgtcatgggtgaagatgttggtcattatggaggttcatacaaggtgaccaaagggttggctgagatgttcggagatctccgggtccttgatacccctatcgccgagaactccttcactggcatgggagttggagcagcaatgaaggggctgaggcctgttgtggaaggcatgaacatgggcttccttctccttgcctacaaccagatctcgaacaactgcggcatgcttcattacacctcaggcggccagttcaagatcccggtcgtgatccgaggccccggcggtgtcggtcgccagctcggtgccgagcactcgcagcggctagagtcgtacttccagtcgattcctggccttcagatggttgcctgctccactccttacaacgcaaagggcctgatgaaggcggccataaggagcgagaaccccgtggtgctgtttgagcacgtcctcttgtacaacctgaaggagaaaatccccgacgaggagtacatctgctgcctggaggaggcggagatggtgcggccaggtgagcacgtgaccatcctcacgtactcccgcatgaggtaccacgtgatgcaggctgccaagacgctggtgaacaaggggtacgaccccgaggtcatcgacatcaggtcgctgaagccgttcgacctgcacacgatcgggaactcgatcaagaagacccaccgcgtgctgatcgtggaggagtgcatgcggacgggcggcatcggcgccagcctgcggtcggccatcatcgacaacttctgggactacctggacgcccccatcatgtgcctgtcgtcgcaggacgtgccgaccccgtacgccgcgacgctggaggacgccaccgtggtgcagcccgcgcagatcgtggccgccgtcgagcagatctgccaatgatcagtgatatcatggctttgttgagtacctgatctgtggagtcagattaccgtggttttgtttctctgtcgcatcgcgactgtcaccgtgccttagacaagacatgtttttgtattttgcaacgcagaagccatactcgtactggatgccgtttgtgggtggcctatttgttcattgtgcaaagttggatgccatactcgtacactattattatcaggtttcagcattcttttgt

SEQ ID NO: 20387 - DNA, 1073 bp, Zea mays
  Clone ID: LIB3180-059-D7_FLI
tccctcctagagcaaaagtcctaaaggcctcaattagattagacaaaaaagacgcgattggatcactggcgagggaggcgtgtttaggggggtggcgaccgaagttagccgccgagctcggcagcgttttgcgtgattgattgcgtccctaatcctcactctttatgcttcgttcgctttgtccctttcatcatcccctgtgcttgtctcgcccgctctctctcgccttccacaaccctctccctcttccatctcatttccgctgcggctgcaacaataaaataataagtctcgtgcaggcgaaggacgtacgacgacgcggacgcaccgtcgaagtctacaggctgcgcaatccctttctccctcttatccccaaggcgaggagctgagggggggcccttctgctgctgttcttgtttccccgctctccaagatgtcgtccccgagcaagcgccgcgagatggaccttatgaagctgtgaggatgctggacctctcttggatgatgagcgactacaaggtggagatggtgaacgatgggatgcaggaattcttcgtcgaattcaaggggccggccgaaagtatctaccaaggcggtgtctggaaggttagggtagaactgcctgatgcatatccttacaaatccccgtccatcggcttcatcaacaagatttatcaccctaatgttgatgagatgtctggctctgtatgtttagatgtcataaaccaaacatggagcccaatgtttgatctagtaaatgtttttgaagtattccttccacagctgttactatatccaaatccttctgatccattaaatggggaggctgcagcactgatgatgcgtgatcgtcctgtttatgaacagaaagtgaaagaatattgtgaaaagtatgccaaaccagaggacgctggcatcactccggaagacaagtcgagtgatgaagagcttagcgaggaggaagacgactccggtgatgaagctatacttggcaatcctgatccctagtctgagttggaataagccagtccagctcatcaatacaatgtttattgcagaaattgcaattaaac

SEQ ID NO: 20388 - DNA, 1030 bp, Zea mays
  Clone ID: LIB3180-059-E11_FLI
ccaatctagaagcgcccctctccctctctctctctctcttcgccgtccgaagctccgcaccccaatctaatcgacacctcgccgagatgggccgcaagttcttcgtcggtggcaactggaaatgcaatggaaccacagatcaggtcgagaagattgtcaaaaccctgaatgaaggacaggttcccccttcagatgttgtggaggtcgttgtcagccctccttatgtcttccttcctgtggtcaagagccagctgcgccaagagttccatgttgcggctcagaactgctgggttaagaagggaggtgctttcaccggtgaagtcagtgctgagatgctcgtcaaccttggtgttccctgggtcattcttggacactctgaaaggagagctctgctgggagaatcaaatgaatttgttggagacaaggttgcgtatgccctgtctcagggactaaaggtcattgcatgtgttggtgagacacttgagcagagggaggctgggtctaccatggaggttgttgctgcacaaacaaaagcaattgctgagaagatcaaggactggagcaacgtagttgttgcctatgaaccagtttgggctattggaactggtaaagttgccaccccagctcaggctcaggaagtgcacgcctccctgagggattggctaaagaccaacgtcagccctgaggttgctgaatctactaggatcatttacggaggctctgtaactgccgcgaactgcaaagagctagcagcacagcctgatgtcgatgggtttcttgtcggtggagcttctttgaagcctgagttcatcgacatcatcaacgcggccaccgtgaagtccgcttaagatgttacgctgaagacgaacatactttttttttgctcaactgtgctatgtaagctagtagcttttgcgcaggagcagagactgttttgcctgcccccaacttttagcttgagcttgctaataatgtttacctctggacgtatcaataatggtgcttatgtaccccttttttgtgccgaatt

SEQ ID NO: 20389 - DNA, 1078 bp, Zea mays
  Clone ID: LIB3180-061-H11_FLI
ctgcccctttctcaccgccgcggccgccacgcgcagcagcaaccgagcaggagcgcagccagcaagctcaggcccgagccctactgcaaccgccgctgctaccgcactgaacaccatggccgacccggcggagcaccgtccagcggaggaggacgaggaagccgcggcggccggcgaggatgaggacaccggcgctcaggtcgcgcccatcgtgaagctggaggaggtcgccgttaccaccggagaggaggacgaggacgtacttgtcgacatgaaggcgaagctctaccggttcgacaaggaggcgaaccagtggaaagaacgtggcacaggcactgtgaagctgcttaagcacaaggagaccgccaaggtccgcctcgtcatgcgtcaggcgaagacgcttaagatctgtgctaaccatctagtggtggcgacgactaagatgcaggagcacgcagggagcgacaagtcgtgcgtgtggcacgctctggacttcgccgacggtgagctcaaggaggagatgtttgctatccgttttggatctgtcgagaattgcaagaagttcaaggacactgttgaagagatagctgaagagcaaggaaagaccgaggtgaaagaaaacgaggaagtctccactgccgccgcagatttggtacagaagttaacagtgacagaggcgagcaaggagggaaatgcagaggaagaggaggctcctgcatctgacgataagaaggatgctaaagggtaaaggttgaaggcaaacaaggccaaatgattatgatttcattcatttcgttgtcaaggttcatcttccccacaaattttcatcgcaaagtttcattgcgttttctccgagatgatttttgtgtgtgtgtgtgtgtgtgtgtgtgtgtgtgtgtgtgtgtgttgggtgaaatctgagttgtcagtcatctacatgtctttcttggttgatagacttattctcagtcgcctgtttatctgggatggctaggtacagcatgtttgtacaattatttggggttgcttttggaatggctctaaagctcgagatgagatagatggtggtgaagatttc

SEQ ID NO: 20390 - DNA, 682 bp, Zea mays
  Clone ID: LIB3180-061-H2_FLI
gttggcttctcctcccccaccggttcgtgttcaggttctggttcgtgggcgagagggaagagatggcggcgtcggacgttgagtaccgttgcttcgttggcggcctcgcctgggccaccgacgaccactccctcaacaacgccttcagcacctacggcgaggtcctcgagtcgaagatcatcctggatcgggagacgcagaggtcccgcggcttcggcttcgtcaccttctccacggaggacgcgatgcgcagcgccatcgagggcatgaacggcaaggagctcgacggccgcaacatcaccgttaacgaggcccagtcccgcggcggccgtggaggcggcggtggcggatacggtggcgggcgccgtgatggaggcggctacggcggtggcggtggaggctacggcggtggtcgtggaggctacggcggcggtgggggatacggtggtgcaaaccgcggcggcggctacggcaacaacgacgggaactggaggaactgagcggtggggtccgctgaggcctagttatcttgttcgcttctgctaccgtgttcaccctagtctagagggggtttatcttcgtctgtggtcgtctcgtgtccgtatgtttcgtttcgtgttcgttgttgttgttgcccatctgtgtttttgaccgcaagctcgctcctctgatgttgttagtg

SEQ ID NO: 20391 - DNA, 2673 bp, Zea mays
  Clone ID: LIB3180-062-A12_FLI
gtcttgcttgtggagagtgatgattcaaccaggcaggtcgtcagtgccctgcttcgttgctgcatgtaccaagttatctctgccgaaaatggccagcaagcatgggcttatcttgaagataagagaaacaacatagatcttgttttgactgaggtttttatgcccggtgtatctggtatttctctgctgagtagaatcatgagccacaatatttgcaagaacattccagtgattatgatgtcttcgagtgatgctatgagtacagtctttaaatgtttgtcaaaaggtgctgttgactttttagtcaagcctatacgtaagaatgaacttaagaacctttggcagcatgtgtggagacaacggtgtcacagtctctcctgcgtgttcgaaaaaaaaaaaaagtttacttatttggaactcagtccagtggtagtggaagtgaaagtggcattcagacgcagaagtgtaccaagtcaaaaggtgccaatgaatccggtaacaacagtggtagcaacgacgatgaagctggcatgggacttaatgcaagggatgacagtgataatggcagtggcactcaagcacagaactcatggactaagcttgctgtggagatcgacagtccacaagctatgtctctggaccagttagccgatccagccaatagcacctgtgcacaagtaatccactcaaagtcagagatatgtagccacagatggctaccaggtagcagcaacagaaactgcaagaagcaaaaatacactaatgatgactttaagggaaaagacttggagatagatggtcctggaaatctatatatggatcaccaatcttccccaaatgagagacccatcaaagcagcagatcatgaaaacaattccaaggagtcaatgatgggaaatttaggggatgcaactgttcgagctgctgacctaattggttcaatggccaaaaacatggatgcccaacaggcagcaagagctgcagatacccctaatttctcttctgaagtgccagaagggaaaggtaagaatgatgactttaagggaaaggacttggagataggtggccctagaaatttatatatggatcaccaatcttccccaaatgagagacccatcaaagcagcagatcatgaaaacaactccaaggagtcaatgatagaaaatttagaggagccaactgttcgagctgctgacctaattggttcaatggccaaaaacatggatacccaacaggcagcaagagctgcagaagatacccctaatttctcttccaaagtgccagaagggaaaggtaagaatgaccagcatgataattatgttttgccatcacttgagctgagtttgaagaggtcgagatcatgtggagatggtgccaacgatacagtcaatgacgatgaacagcggaatagtgcattaaggcgatcgaatctctcggcttttacaaggtaccatacatctgcggcttccaatcaaggtgggacaggattggtaggtagctgttcgccgcatgataacagctcggaggctgtgaaaacggattctacttacaacatgaagtcaaattcagatgctgccgcaataaaacaaggctccaacggcagtagcaataacaatgacatgggttccactacaaaggatgttgtgacaaaacccagcacaaataacgagagggtgatgttgccctctgctattaaggctaatggatacacgtcaacattccatcctgtgcagcagtggatggttccagataatgcgacagcagggaaagcgaaggctgatgaagtggccaacaatgcaggcagaaatagtcatcctggtgacgtgcagagcaacctgacgcaacaacatcgtccaacccttcattacgtccattttgagaatagtggatcaggtgccctgcaatgtggttcctccaatgtatttgatcccccacttgaaggccaggctaccaataactatggtgtgaaagccgggagcaactcaggcagcaacaaggggcagaataatgggagtacagctggtgcgagcacggctgctgcaaatgctggacggacagatacagagatacgggctatcgataaaagtggacctggaggtggcagtgggagtggcaatgacacatatgtcagacggcttgctgcgagcatgacaccacgacaagaacagctaaagaaatatagagagaaaaagaaagatcggaactttgggaaaaaggtgcggtaccagagcagaaagaggctagccgaccagcggccaagggttcgtggacagttcgtgaagcaagctgtgcaaaatcaagagggagatggagagagatgacccccccccccctctggcttcagctcatggttgttagacgtggcggttgatgattcttccttctctggtgtgatctgatatgatcgacaacacaccatccttccttttcttcattggtttcttcacatctagaatttactgcctgaccgggaaaaaataagctaggaacttctatacatgtgtatgcatttctaatcatgtagaagaataagtgtgtcttgactctagataattttaggtagagtcatgctcgctctcctacattatgtgatgtaactgaagtgttgttgtgttgtcatgtatggtcttggatcactttctgtcaatatattactagcccacaactactatt

SEQ ID NO: 20392 - DNA, 1816 bp, Zea mays
  Clone ID: LIB3180-062-C12_FLI
cagcggcagctgtgtccaactaccaagtcaaggtgaccgttgggctgggtggcacgagacgcaacaaaacccttgtcagtcgcccgagccccaaggctcgcacccacgccagcggcaccgcacccccacccacctcggcggcgagtccgagccccaggaacgaagggcgatggcggcgatgatgatggccacgtccgagtcaaagtcccccgcccgcgcgctgaggcggctggctggcgccgcggtcgccgccgtgctgctccgccgcaccttcagcgcctccaagtgcaagacggaggcgcggatggcgacggcgcggatgaagctgctgcggaaccggagggaggcgcaggtgcgccagatgcgccgcgacattgccgcgctcctccgcgacaaacaggaggataccgcacgcatcagggttgaacatgtaattagggaacagaactttatggcagccaacgagatcattgagctcttctgcgagctgattgttacacgccttcctatcatcgcaaaacagaaggaatgtccagcagacttgaaagaaggtatctgcagtttgatatttgcagctccaaggtgctctgagctccctgaacttggtcgcatacgtgacatttttgaaaagaagtatggcaaagattttgtttctgctgcagttgacttgcgcccagatgctgctgttaacaaccttctgattgagaagctgtcgattaagaagccttccgggcaaattaagctgaaagttctaaaggatatagcaaaagagcatcagattgattgggataccgctgagagtgagcaggagcttctgaaacctcctgaagagttgattaaagggccaagtacatttcttgaagcttccaacatgcctgttaagaatattctgacaccatataccgtgcagccagatccagttaacttcagctataggtgttcggatgacgaatatgatgacaggggcactatgcaattcaaagatgcagcttcagctgctcgagcagctgcagagtctgctgagagagcagcatctgctgcaaaggctgcagctgattttgtcaataataacaataacaaccatccatttgatgaagatgaagatcgcaaagcttcaactcatgaattcactcataccctcaagagacagtcgatgagcaactcgagtagatcctccttgaaagaagatgcaaatgcctttgatgaacaaaaacctcatgaagggaaaacatacagtacaagaaggttcagtggaaagaaccatgtagaatatgacaaagacggctaccctgcagatttggactctacgaagacacggagaaggaactgccgtgctgctcggaaggtgcactccgagataaagtttgatgattctgagggactgtgttcagaatccgaaggtgaaaatgatgtggagattcagtctgtggaaaggctattgcctcctaagagtgagctgttttcagaaaaccgtcactcagaagacgaagagcatgatcaagatttccctgaattgccaaagacaaaccttcgttctcgtgttcatccaaatatgcctcttgactatgaaactctcactgcacgctttgaggctctcaaatctggcaagcttccgtagtgaaacaaaaagaacagcatcactggatgttacaattccttcttgctgtttctgtataatatgacatgttatagtagggtatagtgtctaatgattttgatttttgctgagcctacggatttgtcgtttcaaactattgctgcatttgaactgttcgggtatataaaggttggttgaaatgataatttgaactgtttc

SEQ ID NO: 20393 - DNA, 1436 bp, Zea mays
  Clone ID: LIB3180-062-G8_FLI
cagaatcggatcaaagagcaagcgacggggatgagagagaagagaggaccgtcgtctccccttcctccctcacaagtcacaactcacacgccagacggagacgcggccgcagccgagcttacccccgccggcgagttcacccccacatggtcggccggatggagcggcagaccgcgtcgtcgccagcttcgtgctcctcctcctcctcctcctcctcttcctcctcggtctgcggcggcaagaagcgccctgatatcctcaacatgatccggaatgcagcctgtcttaattcgtcatctactgataccggcaagggaaggagtaaattgtcaaccaacaaagttacacatggattccacctggtggaaggcaagtccggccatggcatggaagactaccatgtggcagagtacaaatatgtgaagaaccatgagcttggtctcttcgctatctttgatggccatttgggagataaggtgccaagttacctgaaagctaaccttttcagcaacataatgaaagagcctctcttctggtctagtcctgaagaagcaataaagaatgcatactgctctacaaacaaatatatcctggaaaatggcaaacaacttggaccaggtggttcaacagcagttacagctattgtagtcgatggtaaggacatgttgatcgcaaatgtaggcgactctcgagctgttgtgtgtgaaatgggctctgctaatcagctcactgttgaccatgagcccgatacaactgaggaaaggcagaggattgaaaagcacggtggctttgtaacgacatttcctggtgatgttcctcgggtgaatggccagcttgctgttgctagagcatttggtgaccaaagcctcaaggcccacttgagctctaaacctgatactagacatgtaccaatagactcaagtatagagttcgtcatacttgccagtgatggattgtggaaggtaatgaagaaccaggaagccgtggatctcgtgaagtcaatcaaggatcccaaggcagcagcgaagcgattgaccactgaagcgttggcaaggaagagcaaagatgacatctcttgcattgtcatccgtttccgctgctgacttaccccctcaacagcacttttttatttccgatccacgcctcatgatatggattgagacaatctgtctgtaatcatctgccttgccgattttttttctggtagaatctgctctacctaccgtagttgtggacagacctggaactaattaggacagtgaagacttgagagctggtaggtgagtgtgtgcagggtgcccattccattcgcatgtgcatatatacacccagcgtggactgtgcatccgttgaccgggacttgggagtctgtcaggacctagtgcttgtgtgcttgtggtgctaatttacttaatggtgcgaaggaacttgtcgat

SEQ ID NO: 20394 - DNA, 1095 bp, Zea mays
  Clone ID: LIB3180-062-H5_FLI
ggagaactagcaatacttgaagatgaacaaccatatttccattctagtgattctcatcgtcgatgtgtctgttgtcctcctgctcaattcccatgtagggttatgcagctgctacaaccgcatctttagttttggtgacgataccatggacactggaaatttcattcacttgattgggaaggccccatctaagtacaaggaagccccctatggcaagacattttttagacatgcaactggccgcatttctgatggtcgtgtcctcattgatttctatgcggaagcactaaaactgccaatgataccacccattttacctgagaagaactctgggtgtttcccacatggcgccaacttcgctgtgtttggtgccacggcacgtggcaaagtcttcttttcagggagcccctggtgtataggcacacaaatgtactggtttgatcaattggtagatcgtatagctcccggagatggtaaacctcccaaggatggaaatatcatttcagatgtcatcgcagacataagccatttcatcgaggagcttattgtcgttaatggggcgaaagcattcgtggtcgccaataactttcccgttgggtgtttggcatcatacctaagtaggttccacagtgacgaccatgaggactacgatgagcatgggtgccttaagtcgttcaatgagttctcccaaaagcataatgagcaactttattctgccatcggacaaatcagatactcttacccaaatgtgaaggtaatctatgctgactactacaacgccaccatggaattcatcaagaagcctagcagatttggtattggtgatcctctagtagcatgttgtggcggcaatggaccataccacaccagcatggagtgcaatggcacagcaaagctttggggtgacccacaccactttgccaattgggatggcatgcacatgacagagaaggcatacaacatcattatggaaggggtgttaaatgggccatttgctgatcctccatttccacttagttgctaggattgttacgctaggaattccttacaacatgtagccaatattttttataataatggaagtattttggattt

SEQ ID NO: 20395 - DNA, 992 bp, Zea mays
  Clone ID: LIB3180-062-H8_FLI
cggtttgggaaggaggagcactacgagtggttcaaggacttctcgcacttccgccacctcctcgcgccgctcctctccccgtccctctcggtcctcgaggtcgggtgcggcaactcgcggcttggcgaggatctcctgcgggagggcgtcgccggcggcatcacctgcgttgacctgtcccccgtcgccgtccagcggatgcgcgaccgcctcgccgctctaggcaccaaaggcgtggatgctgtggtggcggacatgcttgatctgccgtttgagcaagagagctttgatctcgtcattgaaaagggcaccatggatgtgttgtttgtggacagtggcgatccatgggaccccaatcctacaacagtggaaaacgtgatgaaaatgcttaatggtatccacagggttttgaagccagaaggcatctttgtatcaattgcctttggacagccacactttcgacgccgattttttgaagctcctgagttcacatggtctattgagtacagtacctttggcgacagcttccattatttcttctacactcttaagaagggcaagaggtcactggagtccagcagttaccaaaacacattaccatcacctgttgctccaagaataaatatggtccacgaagagctcgagagcgaggattttatattcctcacaaaccttgatgggttgtgagtggctgcttaaacaagcatctggctaacagcctaacacatcaaaagggtgaccaggccagcgttggtgaccctgcagtgatgtttttttcctgggcggcaaatgagaatgatgcctgtaaaatgtgtaatttaggatagatttaaattttgagctttgttgtctagtaatactataatactctatattactgcaggctagaggtctgtatgatcttgtaaaaattagtattactttccttttgaaatctaatgcttcgacttaacttatgcattgtttcggctgttatatgaaatccatagatg

SEQ ID NO: 20396 - DNA, 2002 bp, Zea mays
  Clone ID: LIB3181-001-B11_FLI
tgcgcgatggtgttgtgggtcttcggctacggctccctcatctggaacctcggcttcgacttcgacgacaaaatcctcggcttcatcaagggctacaaccgcacctttaatctcgcttgtattgaccacagaggcacaacagagcatccggcgaggacctgcacgcttgaaaccgacggcgaggcgacgacgaggccatatgccatggtacaagcctacaaggagaaagtttatccaaaaaacaagttgaactgctgcagcatgagccagaagttggttatgaactaccatataaggttcccttccagagtctcccatgctatatcgtgaattttcccaagcaaagcacctgccaggcgccaatatgccaccggggtagccattaaaatacttaaaatcaactccaaggctcatcgaacgttatccagtgcttcaccgtgtttctgaactccctaaagcagatgttgtcatgttggtcagtttggtgttggtttaatttctacgggtgtcgtatatcagagtcaatcaaaaagtttgactagcaactaatggtgcctatacatgtatttatggagcttcttctggtcatatgtgtagtggatctctcctcctgttgttcccttcaatcatgtccaaggtcaagaaccattcaggtcataaacccctacgacaggggccacgagggctcatcttcgccactgcccctactcccaccttctgcatgtcctgctcggtgctgttccattccctagcgatgttctccggctaaagacgcttggagtttgtggtgtggtgacacttaatgaatcatacgagaggcttgttcccacatccctatacgaggctgccatttgcattcaattttggtcaacattatgaactgaccagagattgatagtgatagtgttggatcacgattgcaggataaaagaagtaggcgcaatgaggagtcatgttcattcacaagctctaacagagaaagttggggcagatgttcatctttaggtgcagccagtgatgaattattctcaggcaataataatgataagcagatatgagcccttgggcctccagttcgggcaacaagcatatggcaaagagagtgagggggcatgatattgttttccaattccaaactgtgatgatgtgtagaggcaaaggatccttcagagttcatcactcatcgagccaaagattttgtgtcaagcatgaaggacattgaaacccggtttatgtgtatagttgaagcaggaaataaggtttctagaatgcttgaaaccaagaagatcttgcttgacatatgtgctaaaataccaggattctaggttctccagttaagctacctactgcccgattgtgtcagcacttcaagtgtgctgcaattgtgatgttattctcaaccatggtaaccagggatgaggacgttgttggactttgatgaacctagaactcttgcaccaacttgtctttttgttggaggtacaaaatacatggtgatccaaggtgaacctagagtggtcatccgaggaaagaagaatattttgccagtgatgacgtgtgtttagaggatgggatccttgcaattgtcaaacaaggagatgagagaccccttgaattgcttgctaaagcatatgctatcaaatcttttgacatagatccccagaacccctctgatgttgttttcacgttagaatgggaatcaatcggtgtcctaccttgtggcgagatggcgagaagaaagataatttttactaccaagggatcttaatcagaattctaggctcattcatacattcactacaatgccttcgaactcatgaacatttatctctggctctattgtggtgggttacatgaatagagtttttgcatgttcttcgttttatatggtgacatacttgttactatgtgacattgtttgatgaaacccttgcggcattgtattatttattttgttctatatagtcttaacattttatcaaataaaaatttatgtgacgtc

SEQ ID NO: 20397 - DNA, 814 bp, Zea mays
  Clone ID: LIB3181-003-H4_FLI
catcctccccctccgccgcttcgtcgccgcagtacccaccgggcaagatgaagacgatcctggcgtcggagacgatggacatcccggagggcgtcacggtcacggtggccgccaagctggtcacggtggaggggccccgcggcaagctcacccgcaacttcaagcacctcaacctcgacttccagctgcaggaggccggccgcaagctcaaggtggacgcctggttcggcacccgccgcaccatggccgccatccgcaccgccatctcccacgtccagaacctcatcaagggggtcaccaagggctaccgctacaagatgaggttcgtctacgcccacttccccatcaacgcctccatcaccaacagcaacaccgccatcgagatcagaaacttcctcggcgagaagaaggtcaggaaggtggacatgcttgatggcgtgaccatcctccggtccgagaaggtcaaggatgagctcatccttgacggaaacgacgtcgagctcgtatctcgctccgccgccctcatcaaccagaaatgccatgtgaagaagaaggatatccgaaagtttttggacggtatctatgtgagcgacaagggcgtcatcgaagaggagcagtgagcgacagtgtagccgaaatgccaggagatgaatatgaatgtcgtttgagttgcaattttgcgagactgaatgtgaacctttttctcattccttaaatagttgactgccagtgttcgtgggttcaaacgaaatttagtcttattaactgaatttgcgtattcaaatggattgcgtggctgcctggttatgttttg

SEQ ID NO: 20398 - DNA, 1607 bp, Zea mays
  Clone ID: LIB3181-008-F4_FLI
ccacttcatcaccaaggccgtcgtctctccccacgccggccgaacggatggcggcggcgccgactgcggatgccatggacgtcgacgcgccggctaggacgctgactacctctccggccaccaagttgcgctcccctcacgacctcctcgcagagacacgcgcctccatcgagaaagtcgcagcccggatactcgccatcaagaaagacggcgcccccaagtcggagctccgcgagctcgtcactcagatgtctctgcacctcgtcacgctacgccaagtgaacagagagatactgatggaggaggacaaggtcaaggcggagacggaggccgcgaaggcgccggtggactccacgacgctgcagctgcataacctgttgtacgagaagaaccactacgtgaaggccataagagcgtgtcttgactttcagacgaagtatccggggatagagcttgtgcccgaggaggagttccagcgttccgcgcccgcagacatccttgagaagaccctcgctgccgacgcctcccacgacctcatgctcaagcgcctcaactttgagctcgtccagaggaaagagttatgcaagctacatgagaaattaggacaacagaggggcagcttgctggagacaattgctaatcagaaaaagtttctttcaagcctgccatcacatttgaaatcattgaagaaagcatcactgccagtgcagcaacagttggggatgcaacataccaagaaactaaagcagcaccatgctgctgagttacttcctactccgctttatatagcatacactcagttgctagggcagaaagaagcgtttggagagaatattgaagtagagatcgcgggaagcacaaaggatgcccaaatatttgctcaacaacaagccaagaaggaaaacagcactctttcaagtggcgacaacagaatggatgatgatgtgattgatgatgaagaagatgctcagagaagaagatcaagatccaaaaagaatgtggtgaaggaagctaataatccagcagtggcctatcaacttcacccacttaaaattatacttcatgtatatgatactgaagattctggtagcaaacgccgtaaactcatcaccctgaggtttgaatacttggcaaagttgaatgttgtttgtcggaattgaagattcagagggtctggacagtaatatcttgtccaacctatttccagatgacactggtttagatctgcctcaccagatggctaagatttatgttggggaggttccaaacttcagcgacaaggattcaaggccatacaagtgggcacaacatttaggtggtatcgactttttgcctgaagtgcttccatctgttggggatgattctagcagagcattaaacactgctgatttgtcatctgggcttgctctgtaccgtcagcagaaccgtgcacagactattttgcagaggatccgcttgcggaaagttgcacagatggctcttatgtgagtcactggtctatgttttttgctgtttgggacatcgatgaaaaaacccggatggtagattagcctgagagtgaccgtgtaatttgactgacgattttgagctaatgatgcttttgcttc

SEQ ID NO: 20399 - DNA, 1234 bp, Zea mays
  Clone ID: LIB3181-014-E1_FLI
tcgaatcaagtcagattcagggaggggaaggcaaaaccctaacctctctcactccgccgccaccgggggagcgcgaggaggacccttcatcgacccgccgcacgaacaaagctcccatggccaacctcggcggtggcgccgaggcgcacgcgcgattcaagcagtacgagtatcgcgccaactccagcctcgtcctcaccacagactcccgcccgcgcgatacccacgagcccaccggagagcccgagacgctctggggcaggatcgaccccaggtccttcggcgaccgcgccgtccagaacaggccgcccgagctcgaggagaagctctccaagtcgcgcaccaaaaagtctaagcgcgacgctgctgccgcgctcgactccgccgacctcccccgtcgcgacgccaagcgcaggcgccgcgctgcttccgcccaggaggtctccgtcctctccctcaccgacgacgccgtgtacaagccccagaccaaggagacgcgcgccgcctatgaggccctgctcagcctcatccaacagcagcttggcggccagcccctcgatgtccttgctggggcagctgatgaggtgctcgctacactcaagaatgacaaggtcaagaaccctgataagaagaaggacattgagcagctgctcaaccctatctccagccagctctttgatcagcttgtctccattggcaagctcatcaccgacttccatgatgcggcagccggtgatgcttccggtgcgccttccgccgacgctgtggacaccactctggatgatgatgttggtgttgctgttgagtttgaagaagacgaagacgaggagagtgattttgatcaggtgcaagacgagctggatgaggatgaggaagatgacatggctgagttgaatggtcctggaggtatgcagatgggtggtgagttagacgatgacgacatgcagaacgccaatcaggggctgaccgtcaatgttcaggacatcgatgcttactggctccagaggaagatatcccaggcatacggggatggtgacattgatgctcaacagagccagaagcttgctgaggatatcttgaagatcattgccgagggtgacgacagagacgtcgagaatcgccttgtcatgctcttggactatgagaagtttgatctcattaagttgttgctgcgcaaccgtctcaagattgtttggtgcacccgcttagccagggccgaagatcaggaacagag

SEQ ID NO: 20400 - DNA, 545 bp, Zea mays
  Clone ID: LIB3182-001-A11_FLI
gagaggttcactaatgccctcttccactatgcgaccatgtttgactctttggaggccatgcatcgttgtaccagtggtagagacatcaccgactcactcacagaggtgtaccttcgaggtgagatttttgacattgtctgcggcgagggcagtgcacgcaccgaacgtcatgagttgtttggtcactggagggagaggctcacctatgctgggctaactcaagtgtggttcgaccccgatgaggttgacacgctaaaagaccagttgatccatgtgacatccttatctggctctgggttcaacatcctagtgtgtgatggcagccttgcactagcgtggcataatcgcccgttatatgtggcaacagcttggtgtgtgacaggaggaaatgctgccagttccatggttggcaacatctgtaagggtacaaatgatagtagaagaaaggaaaaccgtaatggacccatggagtagcaggaagaataaccatgtcatgagcaaatcgatcaagtaataaaatgcactgatgacatgcatggtgatct

SEQ ID NO: 20401 - DNA, 1263 bp, Zea mays
  Clone ID: LIB3182-004-E8_FLI
ccattagctttatctactccagagcgcagaagaacccgatcgacaccatgagggtgttgctcgttgccctcgctctcctggctctcgctgcgagcgccacctccacgcatacaagcggcgagacagcgggggacggtgaagtggttcaacgacaccaagggcttcgggttcatctcccccgaggacggcagcgaagatctcttcgtgcaccagtcgtcgatcaagtcggagggcttccgctcgctcgcggagggcgaggaggtggagttttccgtctcggagggtgacgacggccgcactaaggccgtcgacgtgaccggccccgacggatccttcgtcaggggcggcggaggcggaggaggaggcggcggcggctacggctcccgcggcggtggcggatctggcggcggcggtcgcagctacggtggtagctggggcggcggccggagatccggcggcgggggcggtcccggcgcgtgctacaagtgcggcgagcccggccacatggcaagggactgccctagcgccgacggcggaggcggctatggcggaggcggctacgggggcggcggctacggaggaggaggaggaggcggtggctgcttcaagtgcggcgagcctggccacatggccagggactgctccagcggcggcggcggctacggcggtggcggcggcggtggtggtggcggctgctacaactgcggccaggccggccacatggccagggactgcccaagcggtggcggcggtggcggagggaggttcggcggcggcgggggtggaggcgaccgctcctgctacaactgcggcgaggccggccacatcgcccgcgactgtcccacgtgaggtgtgtccgcgtccgtccagccagccagatcggatcggatcgctccaccacctgctggtctgatggcgccgcccccttctagatctcgcttaaaaaaacatccccctctcgctgtgtgtcggagtaccgctttagttttgccgatccgggcacgagtgcccgctgcctctttcgtaagaggatcccgtccgccgttttcagatttcgttcggttcgtagaagaactctcaagttaagttaagttatcatggtgtgtgcttggtcgtcgtccgtcgttcgtcgtcgtcgttaaggttttaagagatgatttggtcctgtgttgccgaggggaagtccaatctgcttttcttttcttttttgtggtttgttccatcagactgaggaaggagatgagatgattattctcccagatt

SEQ ID NO: 20402 - DNA, 1964 bp, Zea mays
  Clone ID: LIB3182-005-G10_FLI
ccagcggataataaaagtaggcaggaattgaagaaagcagcaacttctttcctttctgcagagctgcctgaggactgcaagttttacttggcagacacaaaggatgatttgcataagttcatgtggcttttcaaggagcagcatctttcctcgccacattggagaaaccagagatcttatgttatgtctgagcaggtctgcataaatcctgatgaaaatacgggattgtgcacattgctcgtgtctggatatttgcgggcccacaatctttcagtgaatcagcttgtccatgtttcaggtgctggtgattttcagttaggccaaattgatgtcctcaaggatccatgtcctcttagtgagcggaaaagctctgatgtaatggaaacagaagataatggaattcagattgttaacacttttgttccagacccttcaagtcaggaacccttacttgttgaaaatgtgccagatcctcttgccggggagcagacttggccaacggaagaagacatggaggaggtcgacataaacaacaaacagagaaaattggtaaagaggaagcttccccaaggcacttcagagtaccaggctgcttggattgttgaggacacagatgatgaagataacgactttgatgatgacaaccagactgaatctggaatggtcattgatgagcaaggtcactcagaccaaggaagtgatggttcagatatagatgcagtgtctcactttacggagaagtttgatggagaaactattggggatactgagatggcagatgaagaaaatttgacgaaagaccagatagaggcagagattaagaaaatcaaagaagctaatgctgatgatgaagaatttcctgatgaggtggagacaccattagatgtcccagcaaagaagcggtttgcaaaatacagaggactaaagtcatttaggacatcatcctgggatcctaaggaatcgttgccactggactatgcaagaatatttgcatttgataactttacaagaactcaaaagcatgtctttgctaaaattgctgagttagatggaggcatgaagaattgtgctcaagtgggatcatatgtaaggctttatgtgaaaaatgttcccactgatatagcctccaaactctgtcatccatcaagaagaatacctgtggttgtttctggtcttcttcaacatgagtccaaaatgtcagttcttcacttcagcataaagaaacacgactcttacgaagctcctatcaaatctaaggagcctttgattttcaatgttggattccgacaatttacggcaaggccactgttttcatccgacaacatcaactgcaataaacacaagatggagagatttctgcaccatggccgattttcggttgcatctgtatatgctccaatttccttccctccacttcctctaatagttttgaagaacagagatggcgagcaacctgccattgctgctgtaggttcgctaaaaagtgtggatccagaccggatcattctgaagaaaattgttctgaccgggtatccacagagagtctcgaaactgaaatcgatcgtgcggtatatgttccacaatcccgacgacgtaaaatggttcaagcctgttgagttgtggacaaaacatggtcgtcgtggccgcatcaaggagactgttggtactcatggtgccatgaaatgcttattcaatagcagcattcagcagcatgatactgtgtgcatgagcttgtacaagcgcgcgtatccgaaatggcctgaacagctctaccacgtataagattgcttgacgtttggctggatatgtaccagcaggcagaagcagaacgacgggaatgaaacagccttggagcttgcgtgccgtttagcttaaactaaatattttaggattaggaaaatgttttgttggtcgcctgagctaggaggccgaattttgtattggtccttcatatacttttgaac

SEQ ID NO: 20403 - DNA, 435 bp, Zea mays
  Clone ID: LIB3182-009-E10_FLI
gtgcagcccgacggcgacgccctactgctcgcctcagtgccagtcgttgcggcagcagtgttgccagcagctcaggcaggtggagccgcagcaccggtaccaggcgatcttcggcttggtcctccagtccatcctgcagcagcagccgcaaagcggccaggtcgcggggctgttggcggcgcagatagcgcagcaactgacggcgatgtgcggcctgcagcagccgactccatgcccctacgctgctgccggcggtgtcccccactgaagaaactatgtgctgtagtatagccgctggctagctagctagttgagtcatttagcggcgatgattgagtaataatgtgtcacgcatcaccatgggtggcagtgtcagtgtgagcaatgacctgaatgaacaattgaaatgaaaagaaaaaagtattgttccaaatt

SEQ ID NO: 20404 - DNA, 935 bp, Zea mays
  Clone ID: LIB3182-012-B9_FLI
ttcagaaacacaccaagcgaagcacattagcaacaacctaacaacaatggctaccaagatattatccctccttgcgcttcttgcgctttttgcgagcgcaacaaatgcgttcattattccacaatgctcacttgctccaagttccattattacacagttcctcccaccagttacttcaatgggcttcgaacacccagctgtgcaagcctataggctacaacaagcaattgcggcgagcgtcttacaacaaccaatttcccagttgcaacaacaatccttggcacatctaacaatacaaaccatcgcaacgcaacagcaacaacaattcctaccagcactgagccacctagccatggtgaaccctgccgcctacttgcaacagcagttgcttgcatcaaacccacttgctctggcaaacgtagttgcaaaccagccacaacaacagctgcaacagtttctgccagcgctcagtcaactagccatggtgaaccctgccgcctacctacaacagcaacaactgctttcatctagcccgctcgctgtggccaatgcacctacatacctgcaacaacaattgttgcaacagattgtaccagctctgactcagctagttgtggcaaaccctgctgcctacttgcaacagctgcttccattcaaccaactgactatgtcgaactctgctgcgtacctacaacagcgacaacagttacttaatccactagcagtggctaacccattggtcgctgccttcctacagcagcaacaattgctgccatacaaccagttctctttgataaaccctgtcttgtcgaggcagcaacccatcgttggaggtgccatcttttagattacatatgagatgtactcgataatggtgccctcattccggcatgtgtttcctagaaataatcaatatattgattgagatttatctc

SEQ ID NO: 20405 - DNA, 924 bp, Zea mays
  Clone ID: LIB3182-014-C1_FLI
cctgtgcacttctccatcaccaccactgggtcttcagaccattagctttatctactccagagcgcagaagaacccgatcgacaccatgagggtgttgctcgttgccctcgctctcctggctctcgctgcgagcgccacctccacgcatacaagcggcggctgcggctgccagccaccgccgccggttcatctaccgccgccggtgcatctgccacctccggttcacctgccacctccggtgcatctcccaccgccggtccacctgccgccgccggtccacctgccaccgccggtccatgtgccgccgccggttcatctgccgccgccaccatgccactaccctactcaaccgccccggcctcagcctcatccccagccacacccatgcccgtgccaacagccgcatccaagcccgtgccagctgcagggaacctgcggcgttggcagcaccccgatcctgggccagtgcgtcgagttcctgaggcatcagtgcagcccgacggcgacgccctactgctcgcctcagtgccagtcgttgcggcagcagtgttgccagcagctcaggcaggtggagccgcagcaccggtaccaggcgatcttcggcttggtcctccagtccatcctgcagcagcagccgcaaagcggccaggtcgcggggctgttggcggcgcagatagcgcagcaactgacggcgatgtgcggcctgcagcagccgactccatgcccctacgctgctgccggcggtgtcccccactgaagaaactatgtgctgtagtatagccgctggctagctagctagttgagtcatttagcggcgatgattgagtaataatgtgtcacgcatcaccatgggtggcagtgtcagtgtgagcaatgacctgaatgaacaattgaaatgaaaagaaaaaagtattgttccaaatt

SEQ ID NO: 20406 - DNA, 988 bp, Zea mays
  Clone ID: LIB3182-014-G11_FLI
gccgccaccaggtgcagagtctttcgtcatctcttctccggcgaagaacccccagtcgcccaccagatcacttgttaaactttgttgaggggtgatggcggtttctttcgcaaacctcaacaccgaggcagggcttaaaaagcttgatgagtaccttctcactcgcagctacatcactggctaccaagcttccaaggatgacttggctgtctacacttcgttttcgtctgctccctcgtccaagtatatcaacgtagcaaggtggtttaatcacattgatgcgctcgtgaggctgagcggaattactgcagagggccaaggtgtgaaggttgaatcctcagcagttccttcagccccaactccagatgttgctgaagcacaggccccagctgctgaggaggaggacgatgatgatgttgacctttttggtgaggagaccgaagatgagaagaaggctgctgaagagcgtgctgcagctgccaaggcttctggcaagaagaaagaatctgggaagtcatcagttttacttgatgtgaagccatgggacgatgagactgacatggccaagcttgaggaagctgttaggagtgtccagatggaagggctgctctggggcgcatccaagcttgtcccagtcggatatggtatcaagaagctgcaaatcatgatgaccatagtcgacgatcttgtctctgtcgacactctcattgaggactatctgtgcgctgagccagttaacgagtacgtccagagctgcgacatcgttgccttcaacaagatctaggcgtgactttcgatcagtccttcccctggggtgctggcgatggtggtggctgggcaatgcaccagcctaatttttccatagctatatgtctgctttgtgtggccagtgatattgccgtgagtatttttggatcctattcgagtcgaatgtaccagtaccagagttaatttgctttaattcgaaacaccgttccggttggaattc

SEQ ID NO: 20407 - DNA, 279 bp, Zea mays
  Clone ID: LIB3182-015-H5_FLI
agcggccaggtcgcggggctgttggcggcgcagatagcgcagcaactgacggcgatgtgcggcctgcagcagccgactccatgcccctacgctgctgccggcggtgtcccccactgaagaaactatgtgctgtagtatagccgctggctagctagctagttgagtcatttagcggcgatgattgagtaataatgtgtcacgcatcaccatgggtggcagtgtcagtgtgagcaatgacctgaatgaacaattgaaatgaaaagaaaaaagtattgttcc

SEQ ID NO: 20408 - DNA, 791 bp, Zea mays
  Clone ID: LIB3182-016-B6_FLI
gtcagcctagcaattagctcatcgactccagattggagaactcgacaccatgaaggtgctgatcgttgcccttgctctcctggcgctcgctgcgagcgccgcctccagtacaagcggcggctgtggctgccagacaccaccgtttcatctaccgcctccgttctatatgccgcctccgttctatctgccgccgcagcagcagccgcagccatggcaataccccactcaaccaccgcagctaagcccgtgccagcagttcggatcctgcggcgtcggcagcgtcggcagcccgttcctgggccagtgcgtcgagttcctgaggcaccagtgcagcccggcggcgacgccctacggctcgccacagtgccaggcgctgcagcagcagtgctgccaccagatcaggcaggtggagccgctgcaccggtaccaggcgacatacggtgtggtcctgcagtccttcctgcagcagcagccgcagggcgagctcgcggcgctgatggcggcccaggtagcgcagcagctgacggcgatgtgcggcctgcagctgcagcagccaggtccctgcccttgcaacgcagctgccggcggtgtctactactgaggaaactatgtactgtagtaataatgtaatggagccgctgactagctacctagctcgctagtttactcatttagcggcgatgagtaacgtagtgtcacccatcaccatgggtggcagtgtgagcaatgacctgaatgaaccattgaaatggaaaggaataatatataaggaaaaaagatgattggaaact

SEQ ID NO: 20409 - DNA, 1973 bp, Zea mays
  Clone ID: LIB3182-016-H7_FLI
gttgagaaatatcaaatatgaaccaatcaatgacaagtcggacccactggattgacagcctctgacaccgaaaaagccacagatcggatcgcggcgagcagcggccacctccggattcgggcgctcggcgtagccgcgcagtggtgtgtctgcctccctccttgtatcctcctcgaattcgagcgacggcgacggcgggaagggagatggaggcggttagaggcgatgggaggtggtgcgtggtgactggcggccgcgggttcgccgcgaggcatctggtgacgatgctgctccgctccggcgagtggcgggtgcgcgtggccgacctgggccccgccatcacgctcgaccgcgacgaagaagagggtttcctgggtgctgctctccgcgaaggccaggccgtctacgtgtccgccgacctccgtgacaaggcccaggtcgccagagcttttgaaggggcagaagtagttttccatatggctgctccagattcatccatcaacaacttccaccttcattatggagtcaatgtcgatggaacaaagaatgttattgacgcttgtatccgttgcaaggtgaagagactcatctatactagttcacctagtgtcgtgtttgatggagttcatggaatttttaatgcagatgaatcaatgccttacccagataagtttaatgattcatattcagaaacgaaagcggatgcagaaaagcttgtgatgagagctaatggtagggaagggcttcttacatgctgtatacgcccaagtagcatttttggccctggtgataagctaatggttccatctttggttgctgctgcaagggcagggaagtccaaatacattattggtgatgggaacaactactatgatttcacctacgtggaaaatgtggcatatggccatgtttgtgcagagaaaactctatcatctgaagatggtgcaaagatagccgctggaaaaacctatttcataacaaatatggagcctataaaattctgggagttcatgtcattgattttagaaggtcttggatatgaaaggccttcagtaaaaataccagtctctgttatgatgccagtggctcatgttgtagaatggacttaccagaaatttgccaagtatggaatgaaagttcctcagctgaccccttcaaggatcaggctgctttcatgtaacaggacattcagttgctcaagagcaaaggagcagcttggttatgaacctctcgtgtcccttaaggatggagtgaagagaacagtagagtcgtactcccatctacaagctcagaatcataggagtatatcaaaggcttcaattttcctcgggaatggaaatcttgcaaaaacagtactttgggaagatgcgaagcaaactgtgacagtgcttctactgttggctgttatctactaccacttatttacatgtggttacaccttcatcacagcgatggcaaagcttttgtcactaactgctctgttcttattcattcatggcatgctgccatcaaatctgttcggtcacaaggttgagaaactcgaggcctctaattttcacatcacccaggcacaggctcatcatattgctcattccattagttcaaattggaactctttagtcggtgcgctaagatctctttgtagaggaaatgattggctattgtttctcaaggtttcactatctctgctggttgtcagcatccttagttccatgtcttctcaggctgcatttaaaataggtactgctctggttttcacaggcttcaaagcgtatgagaaatgggaggacagcattgatagtatggtgggcgacgcctgtaccattcttctgcactttggttctgccaaggaatcatctagctagaaacaaacgtaggtgtagcttgcagactgccagttgctttgtttactgatattatcttcagctccagctgtttctgggtttcgttgacctaaattttcttctgtattc

SEQ ID NO: 20410 - DNA, 1007 bp, Gossypium hirsutum
  Clone ID: LIB3196-048-A11_FLI
atttcatcagtttctccgctgctaccatgagcctctccttatccttcactcatccaatcttaagccgccacgtctattccgccgtatttcctcctccccgttttctcttcctctctcctctcatccccaccacgtcccgtttccctattctctaccgcgcgccccaacgcgccaccgcactctcagccaccgctgtaaccgcctctatcttccgagataccgctgcttccgcctctgtctttgctggcgcttatgctctcgtcttcaccttcgatattctcactcaaaaggagctcattcagcagaatttaagtagaaaattggtgcatatattatctggattactttttgccatttcctggccaattttcagcaacgccgatgaagctcgttactttgcatctctggttccacttttcaattgcttaaggcttgtaattcatggtctctctttgactgatgatcaaagcttgatcaaatctgttactcgagaaggaaatcccaaggaattgcttagggggcctttgtattatgttgcgatgttgatgttatgtgctcttgtgttttggcgtgaatcccccgtgggtgtcatctgcttggcaatgatgtgcggcggagatggtgttgcagatataattggaagaaaatatgggtcgtccaagattccttataatcaaagtaagagttgggttggcagcatttccatgtttgtttcaggattcatcatttctattgggatgctgtactactactcagctctgggttatttacaattggattggggatatacactgcatagggttgctttcatttctctagtggcaactgtggttgaatctcttccaatttccatgctaatagatgataatatttctgttcctcttgcttccatgcttgctgcctatttaacttttggtcactaatttcttcctggctaatctacttttatattcattttatttcttttacttttttagaaaataagattatcgtactcgagtttagat

SEQ ID NO: 20411 - DNA, 1205 bp, Gossypium hirsutum
  Clone ID: LIB3197-026-B10_FLI
tctttccttgttctattatatatatttatcttcatcatcagacatatatacgtgtgttgcgtgaatgctcattacatattttcacaccataggagaggaagatattatatcaagctagaacatctcccttttacatcaactaagtaaagcatgcaaattcccacagagaggaaaacaggcgtctacacatacataggtcaatggccaatttactccgtggcatggtccgtccgcaacgacaaaagatctcgccttgccattggcagtttcctcgaagactacagcaacaaggtggaactggttcagttcaatctctatacatccgatttcacgactgacaatcggttagttttcgatcacccttacgctcccaccaacctaatgttctttccgtccgaggatacctctaatcccgatatgattgccacgtccggcgactaccttcgtctttgggaaatccacgacgatcacattgagcttaagtccttgcttaatggcaacaagagcagcgaattcagttccgccataacttctttcgattgggctgatttcgacactcgccgtgtggccacctccagtgtcgacactacttgtaccatttgggacattgagagggaggctgtagacactcaattagttgcgcacgacaaggaagtgttcgacatttcgtggggcgggttcaatgtgtttgcatccgtgtctggagacgggtctgtaagagttttcgacttgcgagacaaagaacgatcgacaataatttacgaaaacccgatccccgaaactccattgctgagggtagaatggaacaaggcagaccctaggttcatggctacagtagggatggatagcaataaaattgtgatagttgacatccgatttccgacaacaccattgatggaattatgcaggcataaagggagtgttaacgctatttcatgggcaccattgatgggaaaacagctttgttcggctggagatgattcgagggctctaatatgggaggtggtgggctccaattatcgagcagaaaatggagttgcagtgatggaaccagagatgtggtatggatcagcggctgagatcaatcatgctcgatggtctccaattgagttggattggattgctatagtttttctcaacaaattgcagctgttgaaagtttaagaaaatttttgacttctaataacaatagtttcaagttagcc

SEQ ID NO: 20412 - DNA, 2447 bp, Gossypium hirsutum
  Clone ID: LIB3197-044-C8_FLI
caaagttaaaccccattcaacattcacatgtaagcttctttttttttctttctctaattcatttacagtcatcaagatctatttagtttctactactgggttttcaaaaacaagcaaaaccccattatttagtgatcaaattctgtttgtttggttgacttattttgagatctgattagtttttgaaattgggttttgaaaaatgaggaaacccacaaaagaatcagagttaaacactgagccaatcggtcaaaatctgatcaaattgattagtaatctctgtttctctgtttttgtgttgtcggttcttatatttacagccattgctatcacttatcaaccaccagatccatggctggaatcagctccttctttaaccaagctcttcactcaaactgaaaatgccacttttaaaatcgatgattccattgttaaaaccggtgaagatttggtttcttcgccggttccggctattccccctgctttagcacctaatcccattactgaaaccgatgattccattgttaaaaccggtgaggatttggtttcttcgccggctccggcaattccccctgcattagcaaccaatgattccgttgtaaaaaccggtgaggattcggtttcttcgccggttccggcaatgtcccctgttttagcaaccaatgattctgttgtaaaaaccagtgaggattcggtttcttcgctggctccagctatgtcccctgttgtagcacccaatccggttactaaaaccaatgattcggttgttaaatccggtaaagaaagcaaatcttcactagctccggcaatgtcccctgctttagcacccaatcctgttactaaaaccaacgattcgctggtcagaaccggtccggctccagctccggcaacgtcccttgctttggcacccactcccattgttgaaaccgaagcaaaatccccgaaatccgattgtgaggagttaaaacacgtgaattgttcagatccactggttttacgcgcaatcaagaaattcaactcaaaaactttcaagtccattgtgattttggagtatcaaacaccggtcaacagctcgaaaccggatgaatgtgatgttgcttggaggtttcggaataaaaaggaaagatcttggagaaagtacagagattttagaaggttcgagttcgggatcggagtgaattgtacttacagagtgatccatacaggccgttggcattcgggaatcaacgctcgacgaccttggattcggcctaacccaaagttcactcaaccgatacgtgatgaagagataaacgatacaatcccgactttaccggaaacgaactttaggaaagggaagtatttgtattatgcaagaggaggagattattgtaagggaatgaaccattacttatggagtttcttatgtggtttaggggaagctgtgtatttgaatagaacatttgtgatggatttaaacatgtgtttatctgcaactcatagttcgagtcacaaagacgaagaaggcaaagatttccggttttatttcgacttcgagcatcttaaagaaacggcgtctgttgtggaagaaactgagtttttacgagattggaagaaatgggataaaggtcataaaagaaaagtaccattgaagaagataaagagccataaaactacaccaatgcaactcaaaaaggataaaagcacaatcatatggagacaatttgatggaccagagcctgataattattggtacagagtatgtgaagggcaagctgctaagtacattcacagaccgtggcatacaatatggaaatcgaaacgattgatgaacatcgtaaccgagataagcggacgtatggattgggatttcgaagctattcacgtcatccgtggtgaaaaagcacaaaacaaacaactttggccgaatctggattccgatacctcccctaacgcaatcttaaccaagcttcaacaactggttcaaccgtggaggaacctttatgttgcgacaaacgagcctttctacaattacttcgataacttgaggtcacattacaaggttcatttgcttgatgattacaaggaattgtggaacgaggcgagcgagtggtacaacgagacgacgttgcttaacagcgggaaaccggtcgagttcgatggttacatgagagctgttgtggataccgaggtactttatcgagcgaaaactcgggttgaaaccttttataatctgactaaagattgcaaagatggaattaatacatgttgaacaggttgtttaattgattcatattgctttgattatattacaaaatgtaattggttgatgtattcttgtattgttcttttattacaatttatgtcattatcagttcatcatatgtttgttgtttttttttttttcacaagtgtgtattcatatatagactttgaaaatgtttaaggtataattccggttttggtcc

SEQ ID NO: 20413 - DNA, 2484 bp, Gossypium hirsutum
  Clone ID: LIB3197-059-F3_FLI
attttgggagctctcattcttctaattcagctcagcatcagtcagtctctgtgaatgagcagttggaagagaagtggtatgctagtccagaggatatcaatgaaggtgtttgcacaattttatctaatatatacagtttgggtgtgctgctttttgagttgctttgtcaatttgaatctgagagaggacatgctgctgcaatgttggatctacgccataggatttttcctccaacttttctgtcagaaaatctcaaggaagctggattttgtcttagactacttcacccagaaccttctttgcgcccaacaaccagggatatcctacaatctgaagtacttaatggattccaggaagtatttgcagaagaattgtcgtcatccattaaccaagatgatactgaatcagaattattattgcatttccttggtttatcaaaagagcaaaagcagaagcatgcctcaaaactaatggaagatattgcttgcttggaagcagatattaaagaggttgagaaaagaaggcacttttctagaaaacctttaacttattcttccatcaatgcgagggaatgtaggcaccatagtaaagaacctccaatctcggagatgcattcaagtttatacccgttttccagtgacaatgaaatgaggttaatgagaaatatcaatcagcttgaatctgcttatttctctatgaggtcaagagtcccttttcatgagaccgattctatgagacggccagataaggatttactgaaaaatcgtgacaatgggcatttgacacaaaacaatgaagaaataccgaatcctcctgattgccttggagcattctttgatggtttgtgtaagtatgctcgatatagcaagtttgaagtccgtgggataatgagaagtggggagttcaacaactctgcgaatgtaatctgttctttaagttttgatcgtgacgaggattattttgctgctgctggtgtctctaagaaaataaagatattcgaatttaatgcactttttaatgactctgttgatgttcattatccagtcattgagatgttaaacaaatcaaagcttagctgtgtttgctggaataactatatcaagaactatctggcttcaactgactacgacggtctggttaagttatgggatgcaagcaccggtcaagctatctctcattacattgaacatgaaaagagagcctggtctgttgacttttctcaagtgtatccaacaaaattggctagtggcagtgatgactgttccgtgaaactatggagcattaacgagatgaactgcttgggaaccatcaggaacattgcaaatgtctgctgtgttcagttttctgctcactcccctcatttactggcatttggatctgcggattacaaaacgtattgctatgatcttcggaatgctagagccccatggtgtgttcttgatggtcatgataaagccgtgagctatgtgaagttcctggactcggaaactgtagttactgcttccactgacaacacattaaagctttgggatctcaataaaactagcagtgggggcctgtcctctaatgcttgcagcttaacattttctggacatacaaatgagaagaattttgttggattatccgttgttgatggttttatagcatgtggctcagaaacaaatgaggtttatgcatactataggtcactgcctatgccaataacttctcataaatttgggtccattgatcccatttctgggaaagacacagatgatgacaacgggctgtttgtatcaagtgtttgctggagagggaaatcagacatggttgttgctgcaaattctagtggatgtattaaagtattgcagatggtttaaggagaaggttaattgcttagagtcatcaattactggcgtcatttggttgccaagttttattctcgaggcttattcttaagcattgaagccatcttgggttcaggcaaatatgtcatacatggatgacttggtctgctcggtggctcattataataggcttggctttgattcatagaaaattatatacagagtagagtcgagccaaactggagttatggttccaggttatcaagattatccagagctaggttccagttattcttttacatgcttaagaatccagaatatcatgacacttcctgagtcttgagaaagaggatcaaaccgtaaatacgggaatgcaaaatcaagattgaggtaacttctgctaagaggctttccatctcggttgtgggagcgagagtgtatgctatattagtacgtgtctttacttctgctggtgatccttgaaactaaggtgcagtccttttaagcgttgtaatatatatatatatatagagagagagagagaggtataattggtaatttactcaaatgtagggtattctttattgagatgtaagtaagcattctatgattctatgtaactgatgttttaccagtgtaaatctataaattttgatgt

SEQ ID NO: 20414 - DNA, 2212 bp, Zea mays
  Clone ID: LIB3205-006-E12_FLI
ccgccgcgcttttgctgatccgtgtgctctgtgtgtgtgtgcgggcgcgcgcgcgcgcttcaacttgaagaagcgcgggcgatcaagatggcgcacgaccccagcctgggcttcgcggactacttctcggcggcggcggcggcggcggcggcgggcgccacggcgatggacgacgacgtcggggcgtcggagctctatggcctgcatgccgacgacatggagttcctcggcatgcgtgggctggccgccatgccccccgccgcggcacaccaccagcaccaccaccatcacggccacagcaaggccggtgcgctcctcgacgacgacgacgcgggggtggggccagacgtcagcggctccgcggacgacgccaccatgcgcttcctgagcgagcagcagcagcagcagcagcaccaggcgccgctgtcgctgtcgctgtgccggccggacgtgacgacgacgttgcacgagcagcaccacctcgccggcggcggctcctcgtcccggtaccatcaggagcagcagccggcggcgtgggtgcagcagcagcagcacgactactcgccgtcgccgcagatccaggccatggacgcgctggagctgcagcggctcaaggacaagctctacatcatgctggaagaggtggaccggagataccggcggtactgcgagcagatgcgggcgctggcgggcgggttcgaggcggtggccggggagcgcgcggcggcggcgtacacggcgctggcgtcgcgcaccatctcgcggcacttccggagcctccgggacggcgtggtggcgcagctgcaggcggcgcgcagggcgctcggggagaaggacgtggcggtgcccgggatgacgcgcggggacacgcccaggctcagggtgctcgaccagtgcatccgccagcacaaggcgctcacccaggccgccggcatgatggagagccacccgtggcgcccgcagcgcggactccccgagcgcgccgtcaccatcctccgggcgtggctcttcgagcacttcctgcacccgtatccaagcgacgtcgacaagcatatcctggctcgccagacgggcctctcacggagccaggtgtccaactggttcatcaatgcgcgggtcaggctctggaagccaatggtggaggagatgtacgtggaggagatgaaggccgagggccagcaggacggcgggggccagcagcaggcaggcgtcgccaacaaccctaaccctagcagcgccgcccacgcccacgcctccgaggcggctgaggacgatgggcgcggggacagcggcggcgcagcagccgtcgtcgaccggaagccgacgcgggcgcagctcctgcacgacgccggctcgctcgcctcggtcgtcaacatcggcggcggatcgcgcgcgggattcggcatcatggaccacctcgacttcgacgcctacggcggccaccacgccggcgccgtgtccctcacgctgggcctgcagcagcacgactcccacgccgacaccggcggcgtcaacatcgcgttcggcgcgccgccgcccgcgcaccaccacgggtacctgttcgctccgacgacggcggcggcaggccatcagatgggcgccggcgtgcacccgggaatacaccaccacgtccagttcagcggcgccggcgccggcatcgacggcggcgaggcggcgcacgggcaggagcactaccggggcctgcagggcggcggcgggttccacctcctgcgtgacctggccgggtgatctgctccatccaccaccgcccgtgcatccgcggtcggccgcacgcgagctctagctgcgactccgagtgagctgagcgatggggacgtcgtgccggcgcctagctagctaccgggtgtccgccggattcatggcacgcactcgatcgcgcgtgcgctcatccggccacagcggatttgtttggcttgttgcttgcctggctcgtgccggtctccatcggtctcgatcgccgccggcggcggcttggccgggcccgggtctagctggctagctagctgccctagttatacataatatatgtatttgtagcgtgtacagatcgggtcgcgatcgagcagtttggacgcgcgcaggtgcagctagtactagtagctagcccgccggaactgcgtagttgatcaaacacgcattgcatgcaggttaattgcattgtttatcaaattcttgaaggattcgacgacgt

SEQ ID NO: 20415 - DNA, 888 bp, Zea mays
  Clone ID: LIB3205-013-E7_FLI
gcggccgcggcggcggcatcgtcgtcgcccaacaacagcgcgagctccttcccgacggacttctccgcgcacggccaggtggcgcccggcgccgaccgcgcgtgctcccgcgccagcgacgaggacgacggcggctccgcgcgcaagaagctgcgcctctccaaggagcagtccgcgttcctggaggacagcttcaaggagcacgccacgctgaacccgaagcagaagctcgcgctggcgaagcagctcaacctccggccgcgccaggtggaggtgtggttccagaaccgcagagccaggacgaagctgaagcagacggaggtggactgcgagtacctcaagcgatgctgcgagacgctgacggaggagaaccggcggctgcagaaggagctatccgagctccgcgcgctcaagacggtgcaccccttctacatgcacctcccggccaccaccctttccatgtgcccctcctgcgagcgcgtcgcctccaactccgcgccggcgcccgcgtcatcgccgtcccccgctactggcattgcggccccggcaccggagcagaggccctcgtcgttcgcggctctgttctcgtcccctctgaaccgcccgctggccgcccaggcgcaaccgcaaccgcaggcgccggccaactcgtgaggcgctctctactctatctccggcgacgcgaacggaggtggatctggctgtaaatacgatcacctttttttggcttcctttttcttttgttttcacttgatgcggttcttgagattttttttttgtggattgccgatgggttggtttaccggtttattagagcgcatcatctggccgtcggattggactgcggacggccgggtgcagaaaggaagtgctgcgatagagtttatt

SEQ ID NO: 20416 - DNA, 1100 bp, Zea mays
  Clone ID: LIB3205-035-D8_FLI
gctctatctgaatcattgaagtagccacaataattacagagtctgtatctcatataggcccgattctgaattgaagtaaagcaatccacatttgtacataatgcaaactaattaaacattggggaacggaggcacgctgcacccactataaataaaagccgccgaccaccgccagccagccagccagagcctccagcagtcagtcggccggcgatacatatatatactagagtcatggagacgatggcggcgaggtacggcggcggggagatcagggacctgcagagcaagcaggaggcggggggcgggtgcgggagctacttccagatgccgctgcactacccgaggcacagccgggaggactacgaggccatgcccgagtggcagctcgaccgcctcctctccgagtacggcctgcccgtcgccggcacagtccaccagaagcgcaccttcgccatgggcaccttcctctggggcgccggcggcaatatccactgagctccaggtcttgtttgctgtgacatgcttgacataacgagcttgtatgattgtatcccaattcccaacagaacgccgtccgtgtgctctttctattttctctccgtctctcgctcttgctcgctgtcacttctcacctgtgcccgctgtcgccgccatgccccttctccgtgccaccacccgcgctttccgcgtgccgccgtccataggcggatccaggattgatctaaaaggggctactaagctaaggctgtcacatttcatcattttcatctccattccgcatgtacgattgctagggcaaattaaaccacagcttaacgatacggtcgcggagctcgtaggtgagcatgatgacaccactgcgggcgagcgcgctgcggcctgcggctccgggcgagcgctgcggcggcctgcggctccgggcctccggcgctacgcgactggcacctggtggtggcgagcgacggggcgagcgcgctgtggccgctgtgggcggctgtgcctggcggcggcctggcgggcgagcgcactggtctggagcctggacgaaagttgaaggaaggaggtggccaggcgggtagagagaggcagggagcggc

SEQ ID NO: 20417 - DNA, 1340 bp, Zea mays
  Clone ID: LIB3205-046-A6_FLI
gcgagcgagagcaaggcgcccaagcaaccaccgcgagaacaagtcgcagccaaacagccccgtctcccagcgaagcttgagcttgcattattctaccatgtcttccatggagctgctccacgccgtcgtcccggagaagcagagcgaggaggaggtcgcgcccgcagcgacgaccacgagcagcagcgccaccgccacgggcggggacgagggcgcccacgtgccccaggggtgggccaagaggaagcgctcgcgccgccagcgatcggaggaggagaacctcgcgctctgcctcctcatgctctcccgcggtggccaccaccgcgtccaggcgccgccaacgccggtcccgtccgccgcggagttcaggtgctccgtctgcggcaagtccttcagctcctaccaggcgctgggggggcacaagaccagccaccgggtcaagctgccaacccctcctcctcctgctgctgccgccgccgctgtaactgtcccggcagcagtgcccgtcccggaggcccccgccccgatcaccgtcgtcgtcccgccgctgccgccagtcgaggtcggccgcgagccggccacgtcatccaccgccgcgtcctccgacggggcggcctcgagcagagtccaccggtgctccatctgccacaaggagttcccgaccggccaggcgctcggcgggcacaagaggaagcactatgacgggggcgtcggcagcgccgccgcgtccaccgacgtcccggcggcgcccgccgagacgtccgccgaggtcgggagctccgccgcgcgtgcgttcgacctcaacctcccggccgtgccggagttcgtgttccggtgcggcaagcccggcaagatgtgggaggaggacgaggaggtgcagagccccctcgccttcaagaagccccgcctcctcatgaccgcgtgaaaccgctgcgcgcgcgggcggcggatctcatctcatcacccgtccaagattttggtctgcagctgccgagttcagcggtggaagtggaacacactattcgttcattcatttcgtatggtgccagtagcgctattgtttgatttttgtggctgctcctcttgtacagtaccgagtgcgagaaaagatgcatagtcatcgtatacataccaatacaataccgtacctataggtcttcctattcctgtggaagagtagaacttgtatccttattagctgtcagttcatacacacttggttctcattaccagagatcattggtgaattagtggttttgtatcataagcttattgtaaatgatggattggagattagtatggaatcagataccccatttgttccatgcctggttcaagtc

SEQ ID NO: 20418 - DNA, 848 bp, Zea mays
  Clone ID: LIB3205-122-F11_FLI
ctttcctgactcacctcactcgatcatcctccagtcttgtcgtcgcctgctagcttgaatattacgccagcatctcgccaggaaaatggcgggcactactccgcgccgcttgctcctggtcatcgtccccctcgtcgccgtcgtgccggcgtccgcaaaagactacatggtcggcgactcgtccgggtggaagtccggagtggactacgctgcctgggccaagggcaagccgttcgccatcggcgacacgctctcgttccagtacagctcggcgcactcggtgctggaggtgagcgaggcggaccacggcgcgtgctcgccgagcaacccgctgcgctcgcaccagggccagagcaccaccatcccgctcaccaaggccggcacccgctacttcatctgcggcgcccccggacactgcgcctcgggcatgaaggtcgccatcaccgtctccggcggcggcggcggcagcagcagcagcgccgacaacaccgcgacgccgtcgggtccctccgtgcgggcgacgaacacgaagccggcgtccggtggcgcgacgacgacggccgagtcggactccagcgcggctggcagcggcgcccgcctcgcgacgggcctgctgttcggggccgcgggcctcgctgcaatgatgggctgaattgaggacccgctagggaaaaggcagtgcggtttcacaaatttcctatttagtttcctgcgttctctgcttgcgtccccgagtcgcgaggctgagtgtccgggcgtgcatatttttcgtatacttttgctgtgttttttttggggcttctcgttgttcaatactgttgtttcagaataaaatttcatccttgacc

SEQ ID NO: 20419 - DNA, 2736 bp, Zea mays
  Clone ID: LIB3205-339-C3_FLI
aaaagcaattcccgttcccgtccttcctgagacgagaaggctaggctagctagagaaagggggggagggggcgacaccgaggcgggggcaacgggagcaagcaaggcaaggcaaggcagcagcatgggggagaagcgaacaagaccgcggggcgcgcggacgcccatgtggacgccatgcgcggacgcggcgcggacgtcgtgacacctgccgccccccggcacccggcctgcaccgccatggccctgccgccgccgcattgcgcctcaaaacccccctccgcgcctcccgccctctaggctccccgctcgccaaggccaaagcccccgccgttcggttcctgatccggcctcccggcctctccgctggaggtaggggacatggcggaagaggcatcgcctccgcctccgcctccgccgcccaagctgctctacattgccgtcgccgacggcgggggccgccgggcgttccggtacacgcgccccgtgctgcagagcaccctgcatctcatgggatgcaagcctcgccatgccttcaagattagcaagagagtattcgatgtaatgaagagtgaattcttggctcaatcaaagtcagacggggcaggcaaacaagaaaattatcctgctcttggccttggagatggaacagatactcaaaaaatgctggagagaagcgatagcagcataccgtttgaattatacaagaaccagactaccgttgttatctcaagagaggagtttgtaagtgttgtatgcgatgccctctctttgtacaagtatgttggacccaaccagaaagcagacctgctcctcgcttgcagaattaaagagagaaaggaatcggtgacaatactcttgtgtgggacaagcggatgcggcaagtccactttatcatctttgctgggtagtaggctgggtatcacgacagtggtttctactgattccatacgccatatgatgagaggcttcgcagatcaaaaacagaatcctcttctctatgcctcgacctaccatgcaggcgaatatctagatcctattgcagttgctcaggcgaaggcaaagcacaaggcgaataaacccacggttgtttctcatccaaatacctgtggaggcacttcttcagacgacaaatcacagcaagggtcctcggaactacctcctagagccgaactgattggcagcaagcagatggcggtagaaggctacaaggcgcagagcgagatggtgatcgacagcctggacagattaattacctcctgggaagagcagaaagaatccgtgatcgtcgaaggagtgcatctaagccttaacttcgtgatgggattaatgaagaagcatccttccataataccattcatggtatacatcacaaacgaggagaaacacatggaacggtttgctgtgcgtgcgaagtacatgacactagacccagcgaagaacaggtacatcaagtacatccgaaacatcagagccatccaggaatacctgtgcaaccgcgctgacaagcacctcgtgccgaagatcaacaacaccaacgtcgaccagagcgtggccgccatacacgccacggccttcagctgcctccgccggcgagcggccggggagcagctgtacgacctcaacacgaacactgctgccgtagtggacgaggagtacaggaaccagcgtgcggccaacaccttgggttccaagggcatgttccagctgatccagaggcaggggtcttcgaggaaccttatggcgctcctcaacaccgacggctcagtcaccaaagcctggcatgtaggtgccactgacggcggtggggaaaatcttggtggtaatacaagcagcggcaagaagcccgatgaaaatcgtgtgctggatgcctcgcagattgggaaggcagaggcggtcaacctccagttcggtcctttcgggatcagcgcctggatgagcgacacgggtggaaccagccatgctggaagtgtggaagacctgagggctgatggcgtggagactggtggtaggaattactcgtcgtgctgcagttcgccgaagacgtcggattccacttcgaaggagcttatggaggactattcggtctatgtcagcgaagaagaggaagaggaggaagctgacgacccttgtgatgctgaaactgatgaagatctatccgatgaagaaagagacatgcacgagatagatgcaggctctgtggacgagcactcgaccaagtcagacgaggagtatgaggacctagccatgcgcgatgtgatggagagtggcgactggtccgacgatgagcagcaaggcgtcagcaaaaccaagaactcacctaccctggagtgcagcattcatgggagtggggcagctgaagatgatggcataaatggccggtaccaccacaacctggacctgttcctgaagatgtccaaggaggtggtagccagcaacagaatgccttgcgcgtcgtcatagccccaccggccggcgacacgctgccctggtcccggcgggtgatacgtttcttgggctggtgctgtagagtggtggctgtgtctttgtagcgtgtacctgtgcaaactacaagatgccctcacctggatgtaaagagagaccctgatgctttgtccaggcaaccatgttcatccataccatgtagtagtaggagtattagggggtgtttgggaacaaagtttttctgcagttttggaagaatactgcagtattctcaaatactgcagtattatat

SEQ ID NO: 20420 - DNA, 1420 bp, Zea mays
  Clone ID: LIB3205-339-D9_FLI
gaaggggagacgaacgcagactgcagcaggagcggagcgggcggagaggttcagggcgttcgggagatgcctcccgtgaagaagtccaagaaggggaagcggaaatccaaggatggcaagctcaagattgtcagggcgcggggcgcgccgccggcgctgccgccggagctccgcgccctcgacaccgagtggtggtacgctttcctgaacaagcaagtcgagctagagcatgctgtgcctccagatgagggggaagcattcaggcacttcttcaggacttcaaggaagacttttgactacatctgctccattgttagggaagatctgatctcaaggccaccgtctggactgatcaacattgaggggaggctgctcagtgtggagaagcaagtggcaattgccatgaggaggcttgcgtccggtgattcccaggtgtcagtagggactgcttttggtgtgggccagtctactgtttcacaagtgacatggaggtttatcgagtcgatggaagatagggctaggtatcatctggcatggccaagccaagagagacttgagcagatcaaagctgtgctggaggatgcttatggactgccgaattgttgtggtggtgttgatgccacccacgtaatcatgacgcttcctgctgtcgagtcatctgcagattggtgtgatcatgcaaagaactacagtatgttcctgcaagggattgttgatgatcagatgaggtttattgatattgttactggttggcctggcagcatgacattctcacgcctgatgaaatgctctgggtttttcaagctctgtgaagctggggaacgtttgaatggctctgtcaaagtttcagcagagggtgcagagatcagggaatacattgctggtgactcatgttatcctctactcccatggcttatgactccattcgaaggaaaacatctccctgccccattgcaaaactttaatgcccgccaaaaagctgcaaggctgcttggaacaaatgcgttggcgcggctgaagggatcctggaggatcttacacaaagtcatgtggaggcctgacaagaacaagttgccaagtataattcttgtttgctgtctgcttcacaatatactcatagactgccatgatgaattgcttccaagtgttcaacttcccgaacatcatgatactggatataatcgagaaaactgcgagcaggtggatcctaatggcaaagtgatgagagaaaacattacagcacatctccaacactgtgaagcttccaagtttctctgcaactgagctaagttggcttgttgttttgctgggatttggatgatgcatcattattccttttaccttatgcaatttcccttagtttctgttattgtagtgagactttctgattgcaattcagtaaagattctctagaaatggc

SEQ ID NO: 20421 - DNA, 1168 bp, Zea mays
  Clone ID: LIB3206-075-G4_FLI
agaagctgtaccgcggcgtgcggcagcggcactggggcaagtgggtggcggagatccggctcccgcgcaaccgcacccggctctggctcggcaccttcgacaccgccgaggaggcggcgctcgcctacgaccaggccgcctaccgcctgcgcggcgacgcggcgcgcctcaacttccccgacaacgccgcctcccgcggcccgctccacgcctccgtcgacgccaagctccagagcctgtgccagagcatcgccgcgtccaagaagggcgccaagaagccggcctccgccgcagctgccgcgtcgtcgtccgcccccaccagcaactgctcctcgccgtcgtccgacgacgcgacctcgtcctgcctcgagtccgccaccgagtcctcgtgcccgtccccgtcgccgtccgcctcgccagggccgacggtgccggagatgcagcagctggacttcagcgaggcgccgtgggacgaggccgccggcttcgcgctcaccaagtacccgtcgtacgagatcgactgggactccctcctcgccaattaatcgtcgccccttgttggctggctggctggctggctcccatcctacccacactgccgtcgtgcagcaggaggagggttaaagaaggttaacggccgtcgcgcagatgggattttagacatcctgcgcgggcactagttggatcattagtgctaatccccgtccgtccgttcgttggttggttctgtgtagatgtccgtccgattcgtttggtccttgtcactggtgagtcagttgtagatctcgggttatttagggtttggttctccggaggaggagagaaccacaaccgacgggaagccggcgtttttgtgtccggcgttctccggtggtggccggtacgtgtcacactggtcagtgaccccacccccccggccgttcaggtgtccgttgtcctggtagctgtttttgttgtgctagatggtgtgctgtgctctacaggttgtaaagagcagcacggtgtgatgtgaggagatgcttgtcaagcagtagtgctccgtatgatgtatgttgtaaaatcagctagctagctgtgtccaggagttgtaatttgatgaactgctactgttggtgctactattgtatggtttattgttgtataaacaatctgtgttcggctgttcccc

SEQ ID NO: 20422 - DNA, 814 bp, Zea mays
  Clone ID: LIB3206-117-D12_FLI
gtttgagttgctcgtcctctccccactttctatcacgcaattcctatctcgcagtcgtcgccgctccccggccgggacccagcagagcagagcaggcagtgtcggcgcagcatggggaactgccaggcggcggaggcggcgacggtgctgctccagcacccgggcgggcgggtggagcggctctactggtcaaccagcgccgccgaggtcatgcgcgccaacccaggccactacgtcgcgctcgtcacgctccgcgtcgccgaggagcggcaggacgcccccggcggcgagcggcgcaccgtgcgcctcacgcgcgtcaagctgctcaagcccaaggaggcgctgctcctcggccacgtctaccgcctcatcaccacccaggaggtggcgagggcggtgcgggcgaggaaggaggagaagcagaggaaagcgcagcagctgcttgagtcgaggcagggtgtcgcgaggggcgcggccgagggggaggacgacgacgacgaggcagccctggacgccagccttgatcagttggcgcgtcaggacaacagcagccggagctccagtgcagggcaacggcagtggcggccgtcgctgcagagcatcgaagaggccacgacctgatgtcagctcagctcagtacactcataccacgcaaccgtaggggtagggccgtaatcactgaccgctggacctgtatcttctcggtgattcacctggcctcgattagttcatcgcagggggttgctattggcttactcctacatttgcacgctgtgagtttgacaccctgggacgagaggactacttcagatgc

SEQ ID NO: 20423 - DNA, 1101 bp, Zea mays
  Clone ID: LIB3206-117-D9_FLI
gccagtttccgtcaatggcactggccatggccacggtgctgatggcactgggcggggtagccgccacagcgcgcgccggcggcggcatcgccatctactggggccagaacggcaacgaggggacgctggcgcagacctgcgccacgggcaactacaggttcgtcaacgtggccttcctcccgacgttcggcaggggccagacgccggcgctgaacctggcgggccactgcgacccggcgagcggcgggtgcacgggcgtgggcgcggacgtcaaggcgtgccagcgcatgggcgtcaaggtcctgctctccatcggcgggggcgtcggcagctacggcctctcgtcccgggccgacgcccggagcgtcgcggcgtacctctgggacaactacctcggcggcggcgggtccgagtccaggcccctcggcgacgccgtcctcgacggcgtcgacttcgacatcgagagcggcgggggcatgtactgggacgacctggcccggttcctcaagtcctactcccggcgcgggcgcgggcgcgcgcggaggcccgtgtacctgtcggcggcgccgcagtgcccgttcccggacgcgtcgctgggcaccgcgctcgccacggggctgttcgactacgtgtgggtgcagttctacaacaacccgccgtgccagtacagcgcgagcgccggcgtgggcagcctggcgcaagcgtgggcgcagtggacgtccatcagggcggggcgggtgttcctcggcctccccgccgcgccccaggccgctggcagcgggttcgtgccggcgagcgacctcgtggcgcaggtgctgccggtggtcaagaactccaccaagtacgggggcatcatgctctggtcgaggtactacgacgggctcacggggtacagcgacgcggtcaagtcctacgtgtgagctaggcagcctcgtgtcatgtcgggcgtgcaggagggagtaggactgtaggaggcacatgcttccatgtgcgtgcacgtgcggggcgttatcatacctatgggtatactgggtcgctattcgctaaggaagagactggaaagaagcaaatcgcaaatacagcttcttactactactttgc

SEQ ID NO: 20424 - DNA, 1866 bp, Zea mays
  Clone ID: LIB3206-117-H3_FLI
tgctagtcccgtagcttctctccctcctcgctcctcggctcctcgcttgtcgctcctcctcagccctcaccgcgttccctcggtcccaccttccccgcgaagtaaccaccactaggacatcggtccacacgctaagcatctagtgcatctaggtctacgcggcgcgggcacgcggccggtacagcttccccctgccccccatcctcctcgtcgccggatgatcgccgccggcgccgcctcgatggggcgcgcagcgactccagcccccggggcccagtcctcccggttgccgcgcgccgtctcgaggctgcggcttgtgcttcgctcctcggaagcagcagcgaggagcggcagcaagagatggatagggtgcttccggccgtcgccatcgccggccaccgccgcggcgggggcggccgtggtgaaggaggcgaagggaaagcggccggaggtggaggtggagccggcgcgcggcggaggggaggacgtgtggagcgccgatgctgagaccgaagtggctcagggtggggcgttccccgagcacctcgtcatcatggtcaatggcctcgtcgggagcgcggacgattggaagttcgcggcagagcagtttgtgaggcggatgccggacaaggtgatcgtgcaccgaagtcagtgcaactctgccactcagacatttgatggtgttgatttaatgggtgaaaggttagcaaatgaggttctatcagttgtagagcaaagacgaggtgtgaagaaaatctcgtttgtggcacattctcttggtggccttgttgccagatatgctataggaaggctctatgaacctaatagtagaaggaaatcttctgggggggagagcagagatgatgttgtgcacttgaatggtcacattgctggtttagaacctatgaatttcataacatttgcatcaccacatttgggttcaagtggaaacaaacagctaccttttttatgtggccttcctttccttgagcgaagagcttcagaagctgcgcatttgattgttgggagaactggaaagcatttattccttacagacaatgatgatggtagacgcccacttctccttcgaatggttgatgactctgatgatttacagttcagatcggcgttgcgttctttcaaacggcgcgtagcatatgctaatgctaattttgaccatatggttggatggagaacatcatcaatccgacgtcagcatgagttgccaaaacatcgtcttcttgttcgtgatgaaaagtatccacatattgtttatgttgaaaaggaagttacagacaacaatgaaacgaaggcccatgctgatcattatgatccagaagaggagatgataagaggccttacgcaagttccgtgggaacgtgttgatgtgagcttccagaaaagcacccaaagattagttgcgcataacacaattcaggtgaaaagctattggctaaactcggatggagcagacgtgatcaaccacatgatggacaatttcatcgtctagtccatggaggcatgaagcctacgttgtgtcgatggaggttcagtctacgctgtgggtttgacgaatgtccgtcgaaatttgttgatcagtgaccattcaattttgcctcggccaatttttccttctaggttgcagtttcccatcccaggaaatgtggttgattctttaggcccgtttgctgcaggcgcagagcagagccccgccctcgatgcttatcatcctgcaccatcagcaaggctagttcgttcaactgtatcataatctgtcccctcctttgtatacttgtattccgcaactaagctagtaaatagatgttgctggaaatagaattcttctatctggttcaattggagttg

SEQ ID NO: 20425 - DNA, 1291 bp, Zea mays
  Clone ID: LIB3206-118-F3_FLI
ggggcaccgaagtgttggtatacgcggcagccgggatagcgagcgtatggccacctacttcgtcctcaacaccggcgcgaagatcccgtcggtcgggctcggcacctggcaggccgacaacgggctcgtcggcgacgccgtctatgccgccgtgaaggcaggttacaggcacattgactgtgctcaagcatacaacaacgagaaagaggtcgggtttggtctcaggagagtgctggacgagggcatagtcaagcgtgaagatctcttcatcacctccaagctttgggacattaaccatgcggcggaggacgtcccggttgcactgaacggcacactgaaggacttgcaaactgactacgtggatctctacctcatgcattggccggtgaggatgaagaaaggcgccggcttcggcccgcacgccgtcgtcccgtcagacatccccgcgacgtgggccgcgatggaggagctgtacgacgccgggaaggcgcgcgccatcggcgtcagcaacttctcgagcaagaagctggcggacctgctggccgtggcgcgcgtgcgccccgccgtcgaccaggtggagtgccacccggtgtggcggcagggcaggctccgcgcgttctgcgcctcccaagggatacacctctccgcctactcgccgctgggctcgccgggcacggcgacggtgaaggcgggcgcggtgctggagcacccggccgtcgtctcggcggcggagacgctggggaagacgccggcgcaggtggcgctgcgctggggcgtccagatggggcacagcgtgctcccgaagagcaccgacgaggggaggatcagggcgaatctcgacgtcttcggctggtccttgccggaggacctgctcgccaagttctctgagatcgagcaggaacggctgattcgtgcgggcttctttgttgatcccgacggcgtgttcaaatccatcgaggagttttgggatggcgagatctgaacaactgtcctgactgggaggagctgagtgacggaatttggccactggcaaggcgtactgtgcctgtggaagaataaatttatgcgtatgaactctgaaaggcagcgtagttttcaggtagtttgtgctcggcactccaataattcctcgatgctcaagtggtctatctatcctctaaactctaaaggccatgccgctcaagcggtcttttaagccagcatatgcacaatgggaaaataggtgctaagactctctccagcaagatccggtaaaaggtccggtactctaaatttatcgtttctttggctc

SEQ ID NO: 20426 - DNA, 1333 bp, Zea mays
  Clone ID: LIB3206-119-E3_FLI
caaaaccaaactgtaagcgcaccgcccaaaaccctataaaccatctcccatctctctggctcgctcgtctagcagatgcacagcagcaggcgtcccctgtcttcgtccttccgaaatcccaatcctccctccgagtcccccatcccaaaactcggagctccgaagctggcactggcatcgcggcaatgccgaggccgcccacaatggtgatccaggacgactacatcgacatggacctgaccccggcagccacaccggagccctcgccagcctcgccccgcttcgagttccagagcgccggcgccggcgccgccggcgacaggcatagggaggcggcgttcgcgtcccccgcggacgagctgttctacaagggcaacctgctgccgctccacctgccgccgcggctgcagctcgtgcagaggctcctccaggaccaggagcagccgccgccgctgcgaggggcgaagcgggatgcggagtcggatgccacggcggcggcggcggcagagcgaggagacgccgacgctgccgctgccgccagcaaggtgtgcgccgccaagaagccgtcttgggccaagaagctcaaggtggttaagcggtgggcgtcgaaggagtacatccggtcgctcttcctggccaggccgccgttgccgagcgacatcgtcgccgccgccggtggcgccagcgccagcggccacggcatcggcagcgtcagcgcgagggggagcgtcctagagcaggaggaggtgtgccagtgccagcaccgcaagtccttctccggcatcatccgccgggtgcgcctcgtggcgaccaaggcgcctgggacctcgccgctgtgctcctcctcgtcctcgtcctcctcgtcgtccacgccgtcgtgccgcaacgcaaacgggttcttcttccggacgccggcgtcggcggcgggggcgacgccggcgctgaagcggagcagcagcgccgggtcgtccgaggagggcgccatccagggcgccatcgcgcactgcaagcgttcccagctgctgcagcccgggatggtggcctcggcggcggcgcggaggagcgtcagcgacgtcatgttctactcggtgaccaacacgcccagagcctcttccgtgaccgccggcgaggtggcgcaggagaggaggcaggagatgtgcaggggctgatgatggccgatgacatgccacccatggatcaaaagcgacattcttttgtttcttttcttttttgtttattttgcttgtgaagatgatgagcaatgtgatgtgggttgctctggtgatgatcaggacgcaatgtgctgtgactgtttccccggttcccttgattc

SEQ ID NO: 20427 - DNA, 1049 bp, Zea mays
  Clone ID: LIB3206-119-G9_FLI
ctccactccagcactgaacacttgattgattcagtgggtagctagctagctgaatcacaatggatcctaccaagttccgtccgtccagcagccacgacacgacggtgacgacgacgaacgcgggcgctcctgtgtggaacgacaacgaggcgctggacgacaccaagacgtggccggaggacctgctgccgctccgccccgtggggaggctggtgctggacaggaacgtggacaacttcttcaacgagaacgagcagctggcgttcggcccggggctggtggtgccagggatctactactcggacgacaagatgctgcagtgccgggtgttcgcctacgccgacacgcagcgctacaggctgggtcccaactacctgatgctgcccgtcaacgcgccgcgctgcgcgcaccacaacaaccactacgacggcgccatgaacttcatgcaccgggacgaggaggtggactactacccgtccaggcacgcgccgctgcggcaggcggcgccgcccacgccactgccgcccaggccggtcgcggggaggagggagaaggcaaccatacgcaagcccaacgacttcaagcagccaggggagaggtaccgctcctgggacgccgaccgacaggaccgattcgtgaggcgattcgccgactcgctcggacacccaaaggtcagccaggagctcaggtccatctggatagacctcctcgccaagtgcgacgcgtcgctggggatgaagattgccacccggctcaacatgaaggcaaacatgtgatgcttctgctgaatagaataataatgaagacgcatgcatgtcgtcgccaggaacaagagaaataatacaagaccaccacgcatgggcatactccatatatatatgtatagcccgtgcccgtgtccgcctttgtaccaatacaagccaagactagtggatgtattattattattattattgcgctatcacatacatgtacccctgctacctgaagatggatgtgtatcgagttatcaaattaagacacctgcagcaaaaaactatatatgttgc

SEQ ID NO: 20428 - DNA, 2710 bp, Zea mays
  Clone ID: LIB3206-121-A12_FLI
cactttttgcctttttcggaggccacgggtcaccgctaacctccatccatccatttgccgattcacctacacagcaggaacaaacgaggagccctccaaggatatgcgccccgccgcttatacattaaccaaagacttgcctccaatcaatcccaccactcgtgtctacctcttcgagttgcgaggatgcctgcgaatgaccaccatcccaacggcctgctccaggagtcagcccctggactccagcatgatgatatggaaaaccagcagcagcaagtctgctgggagcgcttcctcctaaaggacactctcaacgtcttgctcgtggagagtgatgcttcaaccaggcaggttgtcagtgccctgcttcgttgctgcatgtaccaagttatctctgccaaaaatggccagcaagcatggagttatcttgaagataagggaaacaacatagatcttgttttgactgaggtttttatgcccggtgtatctgggatttctctgctgaataggatcatgagacacagtgttttcaagaatattccagtgattatgatgtcttcgagtgatgatatgagtacagtctttaaatgtctgtcaaaaggtgctgttgactttttggtcaagcctatacgtaagaatgaacttaagaacctttggcagcatgtatggagacaacggtgtcacagctccagtggtagtggaagtgaaagtggcattcagacccagaagtgtgccaaatcaaaaggtgtcaatgaatccggtaacaacagtggtagcaacgatgacgaagcaggcatgggacttaatgcaagggatgacagtgataatggcagtggcactcaagcacagaacttgtggactaagcttgctgtggagatcgacagtccacaagctacgtctctggatcagttagccgatccacccaatagtacctgtgcgcaagtaatccactcaaagtcagagatatgtagcaacagatggctaccagataagagcaacagaaactgcaagaagccaaaaaacactaatgatgactttaagggaaaggacctggagataggtggccctgaaaatttatatatgggtcaccaatcttccccaaatgggagatccatcaaagcagcagaccatgaaaacaattcaaaggaatcaatgatggaaaatttagaggagccaactgttcgagctgctgacctaattggttcaatggccaaaaacatggatacccaacaggcagcaagagctgcagaagatacccctaatttctcttccaaagtgccagaagggaaaggtaagaataaccagaatgataagtatgttttgccatcacttgagctgagtttaaagaggtcgagatcatgtggagatggtgccaacaacaaaaatacagtcaaagacgacgaacaacggaattgtgtattaagacgatcaaatctgtcggcttttacaaggtaccacacatctgcggcttccaatcaaggtgggacaggattggtaggtagctgttcgccgcatgataacagctcggaggctgtgaaaacggattctacctacaacatgaagtcaaattcagatgctgccccgataaaacaaggctccaacggcagtagcaatgacaatgacatgggttccactacgaaggatgttgtgacaaaacccatgttgccctctgctattaaggctaatggatacacatcagcgttccatcctgtgcagcagtggatggttccagctaatgcaacagcagggaaaacgaaggctgatgaaaatacagccagaaatcactacgtccattttgagaatggtgggtcaggagccctgcaatgtggttcctccaacgtatttgatcccccacttgaaggccaagctaccaataactatggtggtgtgaaagccgggagcaactcaggcagcaacaaggggcagaacaatgggagtacggctgctgcaaatgctggactggcagaaacggagatacaggccatggacaaaagtggagttggaggtggcaatggcaatgggagtggcagtggcagtggcaatgacacatatgtcagacggcttgctgcgaacatgacaccgcgacaagcacagctaaagaaatatagagagaaaaagaaagaccggaactttgggaagaaggtgcggtaccagagcagaaagaggctagccgaccagcggccacgggttcgtggacagttcgtcaagcaagctgtgcaaaatcaggacggagctagagagagatgaccgacatcccccctcccctgtggctgtgctgctctctggcttcagctccctactgactccgactccacctctgctggcatgcatggttgccgctttggactcaaaacacttgacagttagacgtgcggttgatgattcttccttctctcgtggtgtggactgatatggtcgacaacacagcctccttccttttcatcattggtttcttcacatctagaatctactgcctgaccgggaaagaataaacaaggaacttcttctatacatgtgtatcagtgtatgtatgtatgcattcctaagcatgtaatgtagaagaataagcgcgtggcttgactgtagatggactttaattttagacagagtcttgctcgctctcctacatcatctagtgtaactaaagtgttgtcatgtatggtcttggatcactgtctatcaatatatttatatcgtggcgttccttgat

SEQ ID NO: 20429 - DNA, 1965 bp, Zea mays
  Clone ID: LIB3206-121-C7_FLI
ctcctcccccgtctttcgtctccggttgcatccccgacgtcctcgcctgcggtgggagggcggggcggaggagctggaggttcctggtagcggctgccgccggccatggagaagaggaagcggatcctggagctgcgggatcggctggaccggacgctggcgatgcccgacctcgcggaggaggcctcgctcagggcgctggtgaagaagcagatcctggcgtcgtccctgcccggctccgatcaaggtgacatcgatctcattgctgaaacgcgggcaaaagaagtctctgagtttcttgaaatgctagatacttcgagggacggacgatcttccaaggtccatgggctgccacagaaggagtggaaggtgaagcaagatacagaccaattaagagtgatgtaccgtgagggtccagaggggacaccatttcataccttacttgctgaaggctttgcagatggacctattgacgtttgtacatgtgtgtcatgggaatcaactttatacaaaaaatggtttccacaatacaacctgccaacttttagaattgatcagtcaggctgcttgaaaaaagtgcggattggtgaagagatttgtatggtcagggtgaaggttccatggccggtttcagagagagaggctattctacactattttgaactggaatatcttaaagaagatgtcgtaattgtgataatgaaaactttatcagacttggatgccatagatgttcgaacccatggatttagtagggatggaattcctgaagctggtgacacagttcggatagatgtgtttggaggctttgtattgcaacggattacaaaagaaagaagctttttcagggcaatagctaatatggatatcaagctagattttgttccaccatggttgatcaacttcatgtcaaggcaactaataggcagcgggcataagctgtatcaaaaggcagtcagcaccgtggccagtcatgatgatgactacaggaaagctttgagaggaccgctctacgtcaggatccgtgagtaccaggattctgatgacaaggcgaaggtggcagcaacagaggaaaatgctaccgaggcgccccctgataatgccactacacaaaatcgtttgtcactaacaaataccgtatcgaatagcgagattgtggaggagtccgaacagaacacatccgtcactgtggatagtcttccaactagccaacaaccctatgtgccagttgagcaagcatggcaggtcggaaacaggccatacaccagtcctgaggtggagcgtgcgctgtgcatattagacacttctattgcacttctcagaggcgatgataaggctggaaatgtcaccacgctacaaaatctgctcagttacgatgcatctttggaagcgagtactgctgctggttccgtaacttgtcaaacaaacgttcttaacgcagacagtcttccgaatggccatcctgttgccgcagcgccacaagactccagagagaaagctagcgatagtgccgcagaggaagaagacgccggcgacgaaaactctctgaaaaatccgacagcttccactgtgacgaagagtgtgtcgatgacattgcgaagtgcaataagggtgcacggtgaagagagcctggacactgatggcttcttccatcagaacggtttcagcaacagcaaggagtcaaggcgagcgaggaagtctaagaagagatggccctgctgcttaatccctaccactatgggatgatgtgggcccatcgtaggacctcgttcgttcaagttaagttgctgattttttgagtgtactattaacaaacagtaaactacagaaatttagcgcttcgtcagttacacgatgtgggttcagacggtatgttatagcgcgtagataatgtcttggtaaatgtaaagtagaatcgttgtaaacaacacgtaattcttctcacgagagctctgatttgggggt

SEQ ID NO: 20430 - DNA, 611 bp, Zea mays
  Clone ID: LIB3227-010-E12_FLI
gcaatccctagcagaagccttccatcctcactcgctcgatggcccgcacgaagcagacggcgaggaagtccaccggcggcaaggcgccgaggaagcagttggcgactaaggcggcccgcaagtctgcccctgcgaccggcggagttaagaagccccaccgcttccgccccggtaccgtcgcgctccgggagatccgcaagtaccagaagagcacggagctgctgatccgcaagctgccgttccagcgcctggtgcgggagatcgcgcaggacttcaagaccgacctacgcttccagagctccgctgtctccgcgctgcaggaggcggctgaggcctaccttgtcggtctcttcgaggacaccaacctctgcgccatccacgccaagcgcgtcaccatcatgcccaaggacatccagcttgcccgccgcatccgtggggagagggcctaagcatcgtatattctgtcatcagtgcccgatcagaagatgtagagatgtgctgggttctgtagtttgggttactgtcgaatcatcgagtagttggttgttcactgctgtaacttattatcatgatgcatatgaaatggcaatgaactatgttatcagttctcg

SEQ ID NO: 20431 - DNA, 1672 bp, Zea mays
  Clone ID: LIB3227-011-C12_FLI
taagatcattatttataaatgaaggaaaacatcgtggtgaggcaacaatagaagcagttaggttgattgcagatcatgtgaagctcaatgattgccaacttcatcctgatagcattgaggtcttcctgtctttgagatttgatgaagatattggaaaagatgagattcaggaggaaaaggtgaaaccaaagaggaataaacgttggcaaaaaaatcaggaggttccgaagcaattgccagttaatgataagaagaaaaccagacaggaactgatctcaaaagctagaaaggaggttgatgcagaccttagagcagtttccttcactcttgacccgaaggagagaaaagggatacaaaaagaaacactttctgctctgtttgagacttacttccgcattctgaagcatagtatggccgcttcaaattcaaggactaaggtgaataatgtttcccctggtggctcacacccacttctcactccatgcctggagggtttagggaaattttcacatttaattgatttggatttcatgggtgaacttatatcttgcctcaagaagctttctgggtatagtgaccgacaagacgaaattcccaatgataatgcactgtctgtctcagaacgtctgcagtgctgcatagttgtgtttaaagtctggaggagcaaccttgaggcactgaatgtggatctgcaggatttctttgtgcagctctataacctcatactggagtatcggcctgacagggatcatggcgaggtattggctgatgcgctgaagacacttctttgggaaggcagacagcatgatatgctaagagccgctgctttcatcaaacgattagccacatttgctctctcatttggctctgcagaagcaatagcagcattggtcacactgaagcatctcctccaaaaaaacagcaagtgccgcaatatgttggaaaatgattctggtggcggttctctgtcttgcttagttgcgaaatacaaccccgaagctacggatccatatctgagtggtgcactcgcttcagtcctctgggagctcagcctcctagagaagcattatgacatctcagtttcctcgatggcttcgaatatcttgagtatggcaaacctgaatcccacccagaacccagttcctatcttgaacgtgaaccctcttgaagcgtacagagacctgtcattggaaagggaactatcaaaaccggctagcaaagcattgccactgaacctcaaaaggaagcggcgtgccaaggagtttgttgcgctaagcccagatgtgcttcagaaggcagattgctcggtggacaaagacgagctcgaagagaagctgcagagccatttctccgtgctaagaggcatctctgagaatgagaggttgagggcagagctgaaccacacactgtcatccataaacatgtacaaggagtacaagaagcagaaaaggaaaaacatgaaagttaagaccggaaggaaaaaaaacagcaaggctttagccgtttaaggctttagccgtcttatctgttccggaggtctttgcgctcgaccggtggatgggtgtaattttcagttttttttgggcatatttcccattgactactatagtgcagttttctgccacccttttgccgtttctgcacaccacactatgaaagacttgtttgcatt

SEQ ID NO: 20432 - DNA, 353 bp, Zea mays
  Clone ID: LIB3227-011-C5_FLI
gggaccatcaagagtttccctaaattgtcctataagttttaggcgcataaaaactcctatcaaaggccgtctttgcaaacactatcagtgttttgattatgataattacatggagatgaactcaagaaaaccaaactggcgctgtccatattgtaacacctcctcaagcttcactgacctacgtattgaccaaaagatgatgaagatactagaagagactggagatgatgtcactgatgtccttgtatttgctgatggatcttggaaagttgttccagctcaggatgaaaaatctgatagacatagaggtgacacaattcagcaggctgaagatgctgtgaatataatcgatt

SEQ ID NO: 20433 - DNA, 610 bp, Zea mays
  Clone ID: LIB3227-012-C1_FLI
gcatgacgttcggtatgagcatggaggagtgcatggaggcgctggcgaagcgcgccgacgtccagcccgtggtcacctccacagtgtggaaggagctggagaaggagaacaaggagttcttcgacaagtacaggcagtggatctcggagaagagaagcgggagcacctcctagtcctagtagcacgggactcgatcgtgtctctctgctctgtcttagctcgctttaaattagcccgtgatgtgtattacgtgtgcttagttattttaggatttattattacttactgtgtttgattagggaggaataagcggtagggagggagggaggtcagcatgtaatgtgattctctgtaagcaagcagagcagtagtcacctgtacggcgcgggctgtggcgttatgtgtacagggtaaagcagggaaaagccatctcatcatgcgcagcgcagaactgtacgcaagtagccgttgctggcgtggcgtatgtatgtgtatacacaatttgcctcctacttctctaccgtatgtgcttatcctcgccaaaagtacacagcagttgaaaaagctcgtccttttctgacagtaatgtaaaccagaaattgagcttggt

SEQ ID NO: 20434 - DNA, 548 bp, Zea mays
  Clone ID: LIB3227-012-C7_FLI
agcttgctggcttggttggctcgcccgcctgcatggggcacaattcccttcggtttcaatcccatccgccgacccgatctataatcaatcaaaccgccgccctccggcctggcggctgccgcagtcggcctgcggtgtactgttagtctgctgctgatttccgttgttatactgctggtacatgtgtcgtgtgatatatagttgacacatctatgccacatataactcagctcatgatgttgctcctggttctgacatcattttcaccgatgatgttagcttccaggtcttctgtgagcacctacaaaggctggctgttcagtcttgaggacctacctgtatgcaaaggttgtacaccctatttgatagttgctcataatgcactgggttcttaggttggagttgtgagaatttcccttttctgtttctctttggccatagttttctgagatcagacaattttttcgggaaactgccctaaaggaatgtgtaagttgcctacagaggtctattatctacatatatagtatatatacttatttatgttg

SEQ ID NO: 20435 - DNA, 1360 bp, Zea mays
  Clone ID: LIB3227-015-B5_FLI
cgcacgctagtgtcagtggcacgcaggcagccgcgcgcaccgaggggagaccagagctagcggcgaggccaagggcaagggcaagggcgcggacggcaatggcgagagctggaggcggcggtccgttcttcccggtccgcggcgcggcgctggtggtcgtgctgctaggcatcgtcgcgggcgcggcgagggcgcagctgcggctgaactactacggcagctcgtgccccagcgcggagtccacggtgcgctccgtcatctcgcagcgcctccagcagagcttcgccgtggggcccggcacgctccgcctcttcttccacgactgcttcgtcaggggatgcgacgcgtcggtgatgctgatggcgccgaacggggacgacgagagccacagcggcgcggacgccacgctgtcgccggacgccgtggacgccatcaacaaggcgaaggcggccgtggaggcgctccccgggtgcgccggcaaggtctcgtgcgcggacatcctcgccatggccgcacgtgacgtcgtctccctgctgggcggtccgagctacggcgtggagctggggcggctggacggcaagacgttcaacagggccatcgtgaagcacgtcctcccgggccccggcttcaacctggaccagctcaacgccctcttcgcgcagaacggcctcacgcagacggacatgatcgcgctctcaggcgcgcacacgatcggggtgacgcactgcgacaagttcgtgcggcggatctacacgttcaagcagcggctggcgtggaacccgccgatgaacctggacttcctgcgctcgctgcggcgggtgtgccccctcagctacagccccacggcgttcgccatgctggacgtcaccacgcccagggtcttcgacaacgcctacttcaacaacctccgctacaacaagggcctgctcgcctccgaccaggtgctcttcaccgaccgccgctcccgacccaccgtcaacctcttcgccgccaacgccaccgccttctacgaggcattcgtcgccgccatggccaagctcggcaggatcggcctcaagaccggcgccgacggcgagatacgccgcgtctgcaccgccgtcaactaagcctgccttggctgcttgctgcttgcgtgcgtgggtttcacttatttcacttcttctctcttgtttatatacgtacgtttgtcggatggattttgttggtagccatgagatgagatccttgctctgagctagcggacctgccccgactggatgatagagattgatccagatgttcttctagtagattctaattctttatggatgtttcccattgacacgcggttacgcgctcttcaaccgtaacgcagctcaag

SEQ ID NO: 20436 - DNA, 323 bp, Zea mays
  Clone ID: LIB3227-017-F10_FLI
aaatggaggagtttgtctaacaaatctgttatgttcaacaatggtgtatatattattagtcagaatttagccttgcgctattatgatagaattagttgcctggtaaacagtggtaacaatgttgttttgtttatttaatgtattgatggaccatcttatgtatgagtgaattaagtagacattttcgtgtcgagtatgataaattgttagattgctaggttaaataaatctgttcttgtttttgaccacttgtctattcgataaggcatgtaacctgtaatatgcaatccactagtattcaattgctgtggctcgttttcatt

SEQ ID NO: 20437 - DNA, 595 bp, Zea mays
  Clone ID: LIB3227-018-F4_FLI
tcagtgttacaggaaggaaaatgacagataagatttactactggcatacagggtatgttggccatttgaaggaaaggaggctcaaggaccagatggagaaagacccaactgaagtgattcgcaaagctgtgctgcgcatgcttccccgcaacaaactgcgtgatgatagggatcgcaagctgcggatattttctggaattgagcatccattccatgaccgccctcttgaagcttttgtgatgccaccacggcaagttcgggagatgcgaccccgcgcaaggcgtgcaatgttaagggcccagaaaaaagagcattcaaacagggccaaggaggaagaagatgctaagaatgccacagctcaggtcactgcataggctcatgtgaatttgcatgctgcaaatttgctagatgctgttttaggcctatcttttttgcttggtagcctttccagtggaatgggcactagaggctgggaatgtgccaacctcgttctgaatcacctttgtatttctattgcaatttgtaactggaaccctgcctgtcacaactgctttctttgtaagcgaataagaccctctgaattgttgaactcctg

SEQ ID NO: 20438 - DNA, 825 bp, Zea mays
  Clone ID: LIB3227-019-D2_FLI
ggcataccgtcatcaacagcacaggtggacttgtggtgctgccaacctcttcaggaaaatggccggggacattgttataagcaagggggcgactgtatggaagaagcttcaccttctgtacagcttcttcttcgtccgaagggtcatcgctcccatcctaacgttcctgttctactgcgtcgtgatcccactgtctgtcatggtccccgaagtcagcatccctgcctggggaatgttctacattcccactgccatcaccatcatgacagccatcaggaatccttggtctatccatctggtgccaatatggatcctgttcgagaacgtcatgtccatgcaccgaatgcgcgcggcgctgacggggctgctggagaccacgtacgtggacgagtgggtggtcaccgagaaggtgggcgatcatgtgaaggacaagctcgaggtccctctccttacaccggtgaagccaaccgagtgcgtcgagaggatctacttgcctgagctcctggtcgcgttctacctgttgctatgcgcgtcgtacgatgtcgtgctcggagccgggcactactacccgtacatcttcctccaggccttcgctttcctcgtgctggggtttggcttcgccggcaccgtgacgccctgctcttgttcataagccatcgcgcgcatagcgctagcgcccatggctattttgctgcattcttccctgattcgcctcctctaaagtctgtaactagaaaagagaaagcgattctttctgtaaatcgaacagaataaacgctgcacgcgtgtgcagcatttgagcagtaacttggtttttttgagctg

SEQ ID NO: 20439 - DNA, 529 bp, Zea mays
  Clone ID: LIB3227-021-C7_FLI
gacgcgccggcggcttgtgttccctttaaagcttggctgctcgtctgctcctgctgctgtctttcttctgctcttccatcgcgccagtgttttgagaagctggtcggcgctcctagatcccttcgcctctctcgcgttcgaggctaggtagccgccaccatgagccgctcggggcagcctccggatctcaagaagtacatggacaagaagcttcagattaagctgaatgcaaaccgtgttgttattggcacacttcggggattcgaccagttcatgaatctggtgatcgacaacactgtggaggtcaatggaaatgacaagacagatattggaatggtggttatcaggggaaacagtgttgtcatgatcgaggcactggagccagttgccaagtcgcagtgaatccttatttttcagctgatatagtcgcagcatgaaaactgatgtaaatgctatgagtgaaccctgttgtacttcggactcgtgcttttgcacagcaacataactcggctaccagcacccctgtttc

SEQ ID NO: 20440 - DNA, 610 bp, Zea mays
  Clone ID: LIB3227-021-F11_FLI
ctgcccttgccgccgccactgcccgatccaggtgtgcagactgctccctcctcctctccgctccgaatgcccgcacgaagcagacggcgcgcaagtcgaccggcggcaaggcgccgcggaagcagctggccaccaaggcggcgcgcaagtcggccccggccacgggcggcgtgaagaagccgcaccgcttccgccccggcaccgtcgcgctccgcgagatccgcaagtaccagaagagcacggagctgctcatccgcaagctcccctcccagcgcctcgtccgcgagatcgcgcaggacttcaagacggacctgcggttccagtcctcggccgtggcggcgctgcaggaggccgcggaggcgtacctggtggggctcttcgaggacaccaacctctgcgccatccacgccaagagggtcaccatcatgcccaaggacatccagctcgcccgccgcatcaggggcgagagggcttgagctgtcgcgctgctgctgttcgtcgttgtaatgtctgaagtagatggtggtgggtgctttctatgccgtgcctatttggctatttcggacgtgttggttcactgaatggaaaatggaatgccatttctcgtcag

SEQ ID NO: 20441 - DNA, 835 bp, Zea mays
  Clone ID: LIB3227-022-F8_FLI
cctccatctccggctgcgacgccggcgagcccgacaccgcgaatcggatccgccgacaaggcgagagggaagagatggggctcacgttcaccaagctgttcagccggctgttcgccaagaaggagatgcggatcctgatggtgggactcgacgccgccggaaagaccaccatcctctacaagctgaagctcggcgagatcgtcaccaccatccccaccatcggattcaatgttgaaactgtggagtacaagaacatcagcttcactgtctgggatgtcgggggccaggacaagatcaggccactgtggaggcattacttccagaacacccagggtctcatctttgttgtggacagcaatgatagggaccgtgttgttgaagcaagggatgagcttcaccgaatgctgaatgaggatgagttgcgtgatgctgtgttgcttgtgtttgctaacaagcaagatcttccaaatgctatgaatgccgctgagatcactgataagcttggactgcattcacttcgccagcgtcattggtacattcaaagcacttgtgctacaacgggtgagggattgtatgaaggcctggactggctgtccagcaacattgcaaccaagtcctaaattgtcaagcaaggtttggatcatctaggagcttttggatgatgatgatggtgctggatatttagggttgggttggtatttccgtatgtaagatgtatgcccctgagctcggcagtttttgagctctgcttaagattctcacagttaaattgttttatgtaatttgggccttgagatgtttctgaaccaaacagctaaaagagttcagttgagtt

SEQ ID NO: 20442 - DNA, 475 bp, Zea mays
  Clone ID: LIB3227-022-G6_FLI
ggcgaagatacttacaacgggagtcagcaagggacagaaaccgaagactatactaaattcactgtgctgaagctgaagcaggagctcaccaagcacgggtttggtgctcaactactccagttgaaaaatcccaacaagaaggatatcgttgccttatatgaaaagcatgtcatcggcaagtagttcctcggcaatacttgtatttatgctttatagacttccctctgtagcgttgaaactttaattgacacgatcggattgaagcaaacaatgcatgtaacttagtttaaatctctggtctgtgtattgcaacaatggtgcagttcattttagcatgcatcgtcggcaagtttgtagttaggagtcgtgattgaaatgtttgtctttccaatcccggcacaggttttcttgtaatgctatgacgacaatctattcggattccatggttttgtggtgtaattttatgccatcgatc

SEQ ID NO: 20443 - DNA, 424 bp, Zea mays
  Clone ID: LIB3227-024-D3_FLI
agcaggagtatagacatgtagcgttgcacttgcactgccctcccagctggtttggtttggtttcgttttggttttggttgggttttcacaggcaccgcgcgcgcgccggcgatcgagatggccgactggggccccgtggtggtggcggtggtgctgttcgtgctgctgtcgccgggcctgctgctgcagctgccggccaagggcgggcgcttcgtggagttcggcaacttccagaccagcggcgcctccatcttcgtccacgccatcatcttcttcgccctcgccgccgtcttcctcatcgccatcggggtgcacatcaccacggactagccgtctagccccatagccgggaccgggatctttcttcgttacagtctgcctgtatatacatatatacatacatgctcagtacgtacgctttacc

SEQ ID NO: 20444 - DNA, 933 bp, Zea mays
  Clone ID: LIB3227-025-E7_FLI
ctcgaccaggccgacagcgccccagccgcgtcgcccctaccgagccacccgcccaaggcctcgacacgcccgtgccaggaacctgcgcgccgagcccgacccgaccgaccgcctcgcgcccacgccccgacccgcgctgcgcagtagccgcgacctcgcccgaagccccgcgacagaaacgcccgtgcccagccgttcgtcttcctctgcgttattggtgattcaatgcgtccgtttttccctccccattactatcctccatgagccgacgccgttgatgggcgtttgaagacgccgaccgcccgtttgctctctcccaagcgctctacctcctcctcgctggcctataaaacccacagcccgcgacgttgtgctcacctccgcgctcgccgcctcgccacactttcgtcgcggttatcggacgcagccaaagcataccgcctcctcgccaagcttctccacgctaaagctcgtgccctcctgctgctcgtcagtcgattgccgattgtcgtgctcgctcgacgttgtcgttgtacccgtgctgttgtgctccttcgccgtctccgcgccaagcgtcgatcccacgccgaacgccgttgctgaccctcgttcgccgaagctcgatgtcatcgaatttattcctggtgtttccttctacctgttgtcctggtgtgagtggttgatctagtagttaagaatcaagatctactccgatccgtggaagaacctcaagttttcaataagcaagagggtgatgctggagactttgatggagattttatcgatgaggaattctaagtctaacgatacgtcggtcatcttcttgtgggagattgcccctgttatttatttccgctttactttgatgtgatacttgttcaagatacaatgatacagataatgtaataaagtattatactctctctttacgcc

SEQ ID NO: 20445 - DNA, 854 bp, Zea mays
  Clone ID: LIB3227-025-F11_FLI
gcactagactggtcggagatatgtagcgaccccagcctcacgcggtcacgcctcaccatcttcaccggcggcggcggcgcgccaggacaaggagcagcgggactacagactcatcgcaaaagccgtggacgaagcgtaccgggcggtggagtgcgacggcggcgggtaccccttcggcgcggtcgtcgtccacggcggcggcgacgacgaggtggtcagcagcagccacaactcggtccggaaggacgccgacccgtcggcgcacgccgaagtgaccgccatcagacaggcgtgcaagaagctggggaaaaccagcctcgccggctgcgagatctacacgtcctgcgagccgtgcccgatgtgcctggggctcattcgcctggccaagataaagaaggtggtgtacggagccaagtcggaggtcgccgctgccgccgggctcaacggcgtcctcccagaggtcttcagagagtactaccagaaatccggcgtggagatgaggcaggccgagggcgaggcggcaacccggatcgccgaggaggtgttccagaagaccaagggcaagtttcgcaacaagtaaacgcgctggagatggcgcccggcggaccgcggatggctgttgctagtggaatgattgccgtttccaagcttttgtccgggggaccgttgatcagaggtcacatgtccagagaccggaataaattccgccccccccccccctactccatttcacatggtttgttgtatcagcgtgttattttttttaacgtccgcctcgacctgtgacattttttttcttaataatgtacggtgctactctatctgtctccgaataaataaataaatagatttgt

SEQ ID NO: 20446 - DNA, 667 bp, Zea mays
  Clone ID: LIB3227-026-A4_FLI
ctttgtgtatggtgtgtgtgggtgggttgggggggggggggggggggtcatggcatacaggcacagtacccgcaaaggttttgttacagcttacgaccgcattccgtgatggcggattgcgcaacaggactggcacatttttcttcaaagagcatctgaacaaaatcaaggtcccagtgcttgcccttgctggagacgaggatctgatttgtcccccagaagctgtttatgaaactgtgaagctaattcctcagcatttggttacatacaaggtttttggaggacccgaaggccctcactatgcccattatgacttagttggggggagaaaggctgtccatgaagtatacccatgtataataaagttcctgtctcaacatgacgaagtgtcttcatgagtctttgccattcatgtctgtaattacaatgttcaaggccacgtcgaagtacatagtaaaattcccagactggaactaaagtcccataggccatagcgttagaagcgcagaggagactaatcttgctggttgctggtacctcgccgacctcgtatgaaaccttaagaaccgatgtacgtacgtatgtagttgaatttgaggccctgtttgggaacaaagtttttgaaaaccacagtttttgaaatactacagtatactttagtcatgac

SEQ ID NO: 20447 - DNA, 869 bp, Zea mays
  Clone ID: LIB3227-026-C8_FLI
gtcgcagttgctggttgctttgctccccacatttgtcgacggtcgccgtcgccggttcctcgtgcaacgcaccgcgctaacgatggccgagacggtgggcttcgcgagcggcgacgcggcggcgtggcgcgcagcgctggccgcgtacgaccgccgtctcgcggccctagacaaacccgacctcgtggccgtggactccttttaccgccacgacctgcccgcgctcctgcgctgccgtgacccggatcctttcctcgccaagcccgagctggtgcgcctcctccagtggaagctctctcgcggcaagtggagaccgaggctgatggatttcgtcaagggcttggacgacgccgtggtggagtcggcgtcgcgcaaggcgttcgcggctttgcccgacctcagaagggccatcaccgagcttaccgtgctcaagggagtcggacccgccactgcgtccgccgtgctcgctgcgtatgcacctgatgtcgcaccgttcatgtctgacgaggcgatggtagcagccttgggcaattcaaaggagtacactctgaagcagtaccttgcatttgctgataaattgcaggcaaaagcgaaggaactgagcataggagaagaaagtttcacaccctcagatgtcgagagagcactgtggagctcggcaattgcgtccaagtcaccaccaagcggtaacccaaagagggaatcaaagatgcatggcaagaggaaaagatgatttacaccgcgcttctttattgaggctaaaagggttttagtagctgcgggtcttagattcttagttgaacacttgtttttgtaacctgcggaatggaatcctttggtggagtataatttgaaatccttagttgacc

SEQ ID NO: 20448 - DNA, 507 bp, Zea mays
  Clone ID: LIB3227-026-F2_FLI
cagagccaggacgaagctgaagcagacggaggtggactgcgagttcctgaagcgctgctgcgagacgctgacggaggagaaccggcggctgcagcgggaggtggcggagctgcgcgcgctcaagctcgtggcgccgcaccactacgcgcgcatgccgccgcccaccacgctcaccatgtgcccctcctgcgagcgcctcgcctccgcgtccgcgtccgccgaccaggcgggccgtgcagggccctgctggggccctctccccgtgttcgtcgacggcccagcccggaggccgtgatccatgaccacgatatggcatgagatggatgcgcttgctaatcgcctaatcgctaccgctagctaagtagctagtgctaattagggctggatcttctttttttctttgtttggttcttattatactcgcaggctattacagcttagtagtgtttattagtccgatatgataaaaattttcgttgtttggcagtgttttatttgctgaaaaat

SEQ ID NO: 20449 - DNA, 449 bp, Zea mays
  Clone ID: LIB3227-027-G1_FLI
ctgactgttgccagtatcggttacttcatgtttaaaggtctcagtaggggctgaccaaagtgagttggcccaaacatgtgctccgaggctcaccaccaagttttggcagaactggagctaaaggaagacagttcttgcaccgtttacatcaggaagatcatatctaacagcttacggtcttattaagacaggtaaacccatataccagcacatggaacaaagctttcgcttttcagggagttattactcccaaacgcagaaaatggtgtaccagaagcatacacttctgtaacaggcactggcagttcccagtgccaataaattttggaggttaaaataatgctcagataatgtcgaagaaattatgagagatctataaggttaactgaacattgtcgttgtctgtgtcgtgatttctgagtgcgagcactatctcatgatgccatctg

SEQ ID NO: 20450 - DNA, 541 bp, Zea mays
  Clone ID: LIB3227-027-H1_FLI
gacgcagcaaggcgacggcatcagcaatgtcgcgcgctattggccgcttatcagggaaaggaggcaagaccaagtacgccattgagaactcaaccaggacccgcatcgtcatcgctgatacaaagatccacatacttggatccttcgttaacatcaaggtcgcgcgggattcactttgcagtctcatcttgggttctcctgctggcaaagtgtattctaagctaagggctgtatcagctaggttggcggaaaggtattaaattaaataggttttgcccgcaccatatggattggaggggtttgagtgagattaattccatatcaagtcaaaatccttcataattttttccaatcctttccaattccatgaggtataggaataactgaacaaggcctaattgttgcagttttggtcacattcacacagtgtgttatagtagcagtttgtgtgctcgggacactggggaagtttattgtatccttaccttatgaatagcggactatgatgaagggagatttaaattgatatgtattctgtttt

SEQ ID NO: 20451 - DNA, 678 bp, Zea mays
  Clone ID: LIB3227-029-B6_FLI
tgaacatgcatgtcctctgctgactgaactctgatgtgtgtgtatgtatatgcagctcgcaacggggaccggtattgctccgttccgctccttcctgtggaagatgttcctggaggagcacgaggactacaagttcaccggccttgcgtggctgttcttgggagtcccgacgagcgacagcctgctgtacaaggaggagctggagaagatgaaggagatggcgccggacaacttccggctggacttcgcggtgagccgggagcagacgaacgcggcgggggagaagatgtacatccagacgcgcatggcggagtacagggaggagctgtgggagctgctgaagaaggacaacacctacgtctacatgtgcgggctcaagggcatggagaagggcatcgacgacatcatgctcgaccttgcagccaaggacgggattgactggatgcagtacaagaagcagctcaagaagggcgagcaatggaacgtcgaggtttactgatccatccatccgttgacgactgcggagatcaatcaaatcgttggctcgtcgccgcgccagagtcagactcaggtctctatcatatccatgtacatataccttacgatgatggaagacattctctatctatcgatgtacatacatacatacataacttaatttcacacggattgcatcgt

SEQ ID NO: 20452 - DNA, 591 bp, Zea mays
  Clone ID: LIB3227-030-D3_FLI
ccggggcggcggcaaggtcgggcaggcggatcggctagggcaggacaagggcgggcacgcgaagctggcgtgcccgctctgccgcaccccggcgcccgacatcaagtccatgcagatccaccacgaggcgcgccatcccaagctccctttcgagccggagaagctcgtcaacctgcactcctccaccccctccgccgccgaggccaccacctccaagcccaagcccggggtccgcggcagcctcaagaagtagctggctggcttgcctgcctgactgcctggggtaattcccttcgatttcaatcccatccaccgacccgatctacaatcaatcaaagtaccgcccgccctccggcctgcggtgtactgttagtctgctgctgcttcttatcgttgttatattgctgatacatgtctcgcgtgatagatgtgtcaactatatatcagtctcgtcgccggcaatgctgtcatgcttaaacatgtgtcgctgctgctccgtgatgccggcgacggctgctattagtgttaatgttagtgtcgatcgggtctccttgaacaatggcaggaatctgttgcttgtttactttcttc

SEQ ID NO: 20453 - DNA, 568 bp, Zea mays
  Clone ID: LIB3227-031-G4_FLI
cgcgagcaatccaggaggatagatggaagggctgatcccgttcgtgatcgacgtgatcaggaggagccacgggcgcggcggctaccgctccgtgtcgtcggacggcggcagctcccgcggcgggggcagcagcaggcgccacctcatcgactactcggagctgcccgacgccgccgccgcttccgcggcgagcgtcggcgccgccgactggccgccgtccggcacggtgcaccgccgcgcgcggtcggagtacgcggactcgacggtcgtcgggcgtcgcaacgaggagtacgccaggccggcgcccgtggtcgccgccgggccggcttatcggcggaaatgagggggcggcgacgcgcatgcagcctctcaactttggaggatacatcgtgagcgtcagcagttcagcatgtttgggttgctggttgattagttggctacagatttgctctgtttgttaattcgtttagccctgcattgtaatctaagcaaaggtgcgaacttgtgagcgaaacaaggtgctcacggaatgtcaaagtgagagaatatctactactagtattacagt

SEQ ID NO: 20454 - DNA, 1181 bp, Zea mays
  Clone ID: LIB3227-041-D12_FLI
cacttccctcttcccgcccactcgccaagacaaacgcggcggcgatggccgtccaggcgcagcacctgttcgcaccagccttcctgccccacgacgtcggccacgccttgagggcgttggagggtgccgcggcagtcggtggctccgcgctcctggacgagctcggcctcggcgggtgcgcgccggcgccggcgccggcccccctcggggacgcagcgatcggcggcgcccagccgcgcagcgagctcacttgcaacgccgccggtgacaacagcgtgttcctcccgaggaagcgggcacgcgttgtgccggggttcctgctggacgacgtgcagaacaggtgcggcgcggcgtccaccagcggccgggcggcggcgtccagtggcgtcctgtcgcagctgtaccaccagggcgtggaggtcgacgcgctggtgcgggtcgagacggacaggatgcgcgcggcgctccaggaggctcggcggcgccacgcgcgcgcggtggtcgcggccgtgggtcgcgcggcgcggagctggaggagcggctccggcagctggccgccgagggccaggcgtggctgggcgtcgccaggagccacgaggccgtcgccgctggcctccgcgccacgctcgacaaggtgctccagcagtcccccgccgccggctgcggcggcggtggcggtggcggcgaggcggaggacgcgcagtcctgctgcttcgtggcatccccgtcggggccggtgtcgactggttcgtcgccgtcgtgcaaggcctgcggcggcggcgacgcgtgcgttctggtcctgccgtgccggcacctgtgcctgtgccgcgcgtgcgaggccggtgccgaggtgtgccccgtctgcggcgccgtgaagaacgcctcgctccaggtcctgctgtgacggcgaggaggcacaggcagcggaagggagtcactccagcttgcctcccgctgtgccccccggtaggtgagtcacgacaccggggtcaggcatgaaacttttgttggttagtagcagtagagagtagccccgttggagtagaatcatgtagaaatgcattttggctagtttattagacaacccagctggtttatatgtccaaatcccagacttggttcacaactggagagtatctcatgtgtaatacaaccacacgacatagttccggtttgctcat

SEQ ID NO: 20455 - DNA, 1115 bp, Zea mays
  Clone ID: LIB3227-041-F7_FLI
caactgcgcggacttttcctgcaagcttcttctgcaaccgaagcaactcttcaatccagaagtggctgctccagggcggcatggcgccaaaagtctccagcccgttcctcctccgcctaccctgggtcgtcgcgcacgttggatccatcaaatcttccaatgcacgctgcgccggcccgggtcgtcacgcaagagagctcccttcttgctagcgagtagcgactagcgagaggtcgccggcgcggcaaaaatccgaaaggcgagccgagatggcggggtcgcagtcgcaggcgatgctggagaagatggagctgcggcagagctaccgcaacgtctggcacaccgacctcaccaacgccgtcgccgcggacctcccgtggtgctgcctgtctctgtggtgcggcccgtgcgtgtcctacatgctgcgcagacgcgcgctctacaatgacatgtcaaggtacgtgtgctgcgccgggtacatgccgtgcagcggcaagtgcggcgagagccagtgcccggaagtatgccttgcaaccgaggtgttctgctgcttcggcaactcggtagcttcaacccggttcctgctgcaggacgagttcaacatccagacgacgcagtgcgacaactgcatcatcgccttcatgttcttcctgcagcagctggcctgcatctgctccctggtcgcctgcatcgtcggcaacagcgagctctcggaggccgcgcacgtcatctcctgcatgtcgaatctggtctactggacggtttgctcgtgcatgcagacgcagcacaaggtggagatggacaagagggacggcacgttgaacaccatgtctgcgcctccgatgcagcagatgtcgcgttggtaggtgcgagtgagattatgtgccggcctcgatacggatgagagggtagctgctggagctggaggctatcagcaatctcctactctggttaggacggtccatttttcagatttgggtgagataccatggctagtgtgtaaaccatgtcccgtttgtttgggcaaattttcgtgtttaatgagttgtgcatttttcacaacttctgttatacctcttacggctagatgccgaaattagatatcctaataattt

SEQ ID NO: 20456 - DNA, 519 bp, Zea mays
  Clone ID: LIB3227-042-C2_FLI
actttatcgggtccggatagattttacacatgacgatgcgttacaccggggcggggcggggcggcgagactctcatttacacaggtctgctggaagaactgatctcggatcggagcactgcttaagctagctactactcactgataattttaactaaagacaccgctaatccaggacaagcccatggttcttggtctcacacggaggaagggggtgccaaggcgcggcggcggcggcaaaccggcgaagcgagcgagttcacatgacggagcaggcgttggggttctcgtcgctgaacatctggggcgcgtggaggtgggtggggccgtacgcgtaggctggcgcgggcgggtaatggacgccgccgccgttggggtagaagccggcgtggtggttgggcggtggggcggcaccgtagtagccgcctggagccggctggtggtacggcgcgtacccgtagtgcggcggcacctggtacatgccggcgtcggccaggggcggcggcgccaccgacgcgga

SEQ ID NO: 20457 - DNA, 1274 bp, Zea mays
  Clone ID: LIB3227-042-D10_FLI
ttgactgtatccttatgatcaaaataatgataactgtgccatttatgatttatcttggtgcatgggactttcttgacacctgttttcctaccataatttttgctaccttatggttgtcattctcatactgatgttttaggtttctaagctttgtcttgtttgtttgttccacaaccaatgactaactgaactttgcaaaagtatggctgtcagtttattctattatgtatcttcttttttgaaaaaaattagagatctcggatggcaacagagatatgctcgtttttgtggaagaataattgtcctctcagttcttgtgctacttctctaccccttcctctgggtttggactgtgattggaacattgtggtttagcactgcaagaggctgcttgccagaggaaggacaaaagtggggcttcttgatatggctgcttttcagttactgtgggctcgcctgtattgcgtgtgtagctatcgggaagtggttacaccgaagacatgcacttcaacagagagcacaacaaggaattccagtctctgaacatggggttttggttgatatgatccgtgttcctgactgggcatttgaggctgttggcctggaaatgagagtgggtcaagatactgcatatcatcctggtctttatttaactgatgctcagagagaagcagttgaggcactgattcaagagcttccaaaattcaggctgaaagctgttccaacggactgcagtgaatgtcctatctgcctagaagaatttcatgttggcaatgaggtccgtgggctcccatgcgcgcacaatttccatgtggagtgcatcgaccagtggcttcggctgaatgtcaagtgtccacggtgccggtgctccgtcttccccaacctggacctgagtgcgttgaacaatcttcggtcgaccagcgagccggaccatccatccgccagcgccagcaatgtaacgacggcaactgcagcgacgagatacgtgaggtcgcagccggcaggtcaaagctatttggtgcggttgcaggggctgctgctccgccctgtccggcacgatagcgtggagagtgacggtgagccggcggtgggcaacagtcgcttggttggcaccgaagagctgcctagcatacttgtagacgatggccatcagctgccagatcgctgactgatttgatgacctgatggatccagcatacttgtcagcataatttaggatacttgtcagcttttcttttacagttttcttttgcaaatgaaatgcgagttttgtt

SEQ ID NO: 20458 - DNA, 543 bp, Zea mays
  Clone ID: LIB3228-005-G10_FLI
gcagcagcatccatcgcgtgcgtacattaatctaagcgatcttcatccagccttctgctctgctccctcgaaatggaggcgacgagcaaggcgatggcttcaggcctcctcgttctgctgcttctcatcaacacaggctttgtcctgcccgtccattccgaggactgctgggccgacacccgcgtcatctgcaccaagacgcacaactgccgggacgacacttgcgcggggcgcggcatgccggacggccgctgccactgggagttccccaacctggtgcccttctgccagtgcctgcgccccaactgccactagtccgggcgcctcggattggctcacttcgccggcgatgatggatggtgcccaactgcgactgcccagtctgctccattcgttgttgtttaaggcataatatataaactgccaaattcacatgtattttgggatatttgttatcatactatgaaatgactgtgaatcgttgttctgatttgtctttcaccacatgttttccttgcatgaagtaagatacgatatttatgt

SEQ ID NO: 20459 - DNA, 440 bp, Zea mays
  Clone ID: LIB3228-008-F2_FLI
tgctcagtggggaatttacgatgcattcaaagtgatggttggactcccaacaacgggaggtgttacacctgccccagcagcagaggctgaattgaaagccagtgcttgatttttttttctgtgttccctgagatcatatttggtggagtggaattgtatcagccggtcgagagcttagttcccgaatcttttttaatcttaacggaaaatttgtccgtcatccttctgatgagaggaactcattaaacaggcgaaataggtctttttttgcgctgggaaaagtttacgcttgatgcataataatttgtaggacggcaacgctctagagcgcaggttttgttcacctcctgtaccgaggaatgcttaaagttacatttcacattatggtctttatgaaagagtgcacctcggttgatgttccttttgccgttgctggaact

SEQ ID NO: 20460 - DNA, 1171 bp, Zea mays
  Clone ID: LIB3228-008-H2_FLI
atgagcctacagaaaaaattgatttatcttgttttttgagtattcttcatcgtgatcccgaggagaaaagtcgcaattgttggacagtacctgatagcaagatcttcaaagttcgtagcaaaaacttcccacaagacaaatcaaagatacctgcagcaagttatctcatggagcttgcagccattgactggtttaaggacaccaaacgtatggataatgttgccaggcagaagggttgtgttgctcaggttgctgctgatcgagggatgcatacatttgttgtcaacatacaaattcctggatcaactcagtacagcttggtcatgtattttgtcacaaataccttgagaaagggatccttactacaacgcttttttgatggcgatgacgaattccgcaatagcagactaaagcttataccatccgtccctaagggctcctggatagtgcgacagagtgttggaagcaccccttgtttgttgggaaaggctgttgattgtagttatgttcgaggtcctgcgtacttggaggtggacgttgacattgggtcttcggcggtagcaaatggagttttgggtattgtgtttggtgtggtgacgacgttagtagttgatatggccttcctaatacaggccaacacatacgaggagctaccagagcaggtgataggcgcagctcggttggctcatgttgaaccggccacagcagtagttcctgatcttagcaacacatcaaacgacagtagcaacagcaacaatgacaacaacaacaacaacaacaacaatgggtcctcagaggatgatttgtccaagaaaacaaactaattttattttaatctagtatcagagtgttgtgttgaacatctctttaattaatcttctagctagtcactcagtggaatccagagagccaataatatatgcttctctttgtaccagctttcttgtttatatattagatccaagtattatatttgtagctagaggcaacaatatgaatagtaaccgtggttatcctaaacttgtttgccgactaggaccgggagatggtttgtttgttttaagcttttactttttacaagacatgcctatctttattttccctttgcctttatctttgaactgctgctactcaagttgacaaggaaagcatgcatgcagtttggattagc

SEQ ID NO: 20461 - DNA, 541 bp, Zea mays
  Clone ID: LIB3228-009-F10_FLI
ccaaatcaggaagatggaggcgatcttccccaagaaacacacgagattgtcaagcctgttgcagttcattcccagaatccaattaatgttgatgaactcgtgggcatgtcaaagctaagcatatgggagcatggtcaggagacagtgtctacttctctgtcgctaaatctgctagggggtcaaaataggcagtcggctttccatgcaaaccctcaaacaagagctcaagcctgatcatcccctaccagcacagaaactgtattttagatggaatcctgggcaaaataagctttgctctttttttcttcttctaaatttaagatcaccgagtcacaaggtcactggttggaagtagcttctccgtatttgcggggaaagcctgccctggtttctctccatcatcagagccttcaatattgtcttttttatatatttaagattgaccgtgctctgtagcttgtatcatgtgctgtaagttatgctatgtatgaatgtacctgtagtttgtatggcacgcatggtatgacactcttatgttagc

SEQ ID NO: 20462 - DNA, 459 bp, Zea mays
  Clone ID: LIB3228-010-E5_FLI
cttccaggtcggcaagggctccaagcctggccacctggttctcacccctaacattgccaccatctctgacgtggagatcaaggagcatggcggcgacgatttctcctttacactcaaggagggcccagctggcacttggacgctcgacaccaaggccccgctcaagtaccccctctgcatccgctttgctaccaagtctggcggctaccgtatcgccgatgatgtcatccccgccgatttcaaggccggcaccacctacaagaccactctcagcatctgatgagcctgtgatgagtgatgacgaataatatttccagtccacgtgtcaacgagccaatatttaatttttttcctatgtttattttgtggcacaacaccatctcttcatgtgccttgttgtgttggattgattttattacatgaattgaatacactgtttatttaagattcttttgggtg

SEQ ID NO: 20463 - DNA, 219 bp, Zea mays
  Clone ID: LIB3228-018-G12_FLI
ggcgtcggaggcgggggccggggcgggggcctcggcggctgcggcggacgccacgagcgcggcggccatggcggcgacggcgacgaacttcatcctgaggccggccatctgcgagtgtgtagcgtagctagcgagtcgggtttttattgggccgcgcgggatctctctacgagagtatgaagcagtagaagtgtagagagatgcgcgcaggcgggcggg

SEQ ID NO: 20464 - DNA, 1231 bp, Lilium asiatic
  Clone ID: LIB3229-016-C3_FLI
attggtcgctgtcagaaatgagtcgcttcttggtgagctaaaagaagctttggcagatgctgattacaagccaattatcatacctggggaggaaggtgttgtcgaggttgctcggcacccagatgctgtcacggtggttacaggaatagttgggtgtgccggcttgaagcctaccgtagctgctattgaagcgggaaaagatatagccctagcaaacaaggagaccctgattgctggaggtccctttgtgcttccccttgctcacaagcacaatgtgaaaattctcccagccgattcagaacattctgccatattccagtgtatccagggcttgccagagggtgcacttcgacgcatcatcttgactgcatctggaggagccttcagggattgggatgttgaaaggctgaaagaagtgaaagttgctgatgctttgaaacatccaaattggaatatggggaagaagattacagtagactctgctactcttttcaacaagggtctagaagttattgaagctcactatctatttggggctgaatatgatgatgttgagattgtaatccatccacaatcaatcattcactcgatgattgagacacaggattcatcagtgctggctcagttgggatggcctgatatgcgcttaccaattctttacacgatgtcttggccagagagaatttattgctcagagaaaacatggcctcgacttgatctttgcaagctcggctctctaacctttaaagctcctgataatgtgaaatacccatcaatggatctcgcctatgctgctgggcgggctggaggcaccatgactggagtcctcagtgctgctaacgagaaggctgttgagttgtttatcgacgaaaaaattagctatctggacatttttaaggttgtggaggcaacatgcgacgctcatcggaacgagttggtccttcatcctactctggaggagatcattcactatgacctgtgggctcgagacttcgcagctaatttaaaactatcttctggcttgagtccagttcctgtatgagttcttacttcatcaagttcactgcgatggagttctggaactcgagacttcgcattttcgcataaatcagtagctgtgtacatttccccccgtgtttggtgtagcaatgactatcagggtaatgtatcttttatagttttatatagcaatcccaaaactatcgcaattggcatgtttcagtcttcattt

SEQ ID NO: 20465 - DNA, 448 bp, Arabidopsis thaliana nossen
  Clone ID: LIB3234-004-E1_FLI
cagatctcagttccttacagaagaatctccgactcgtttctttgccggcattctcagatttccggatactagccatgagcagtgatggttccgccggaaaggcggttgttgaagccaaaggattgaaccctggattgatagtgctgcttgttattggaggtctgcttgtgacatttctcatagccaattacgttatgtacatgtatgctcagaagaatctacctccaaggaagaagaagcctctttccaaaaagaagctcaagcgtgagaagctgaagcagggagtccctgtgcccggcgaatagattccagcttcttcaacagtctgtgtttaacctgtaatcacaatgtcattgagacttttgtatgggagagtagcaaacgtcccttgttctgttttggttagactacaaaaattgaatctcatcaacttctgttttcccttccc

SEQ ID NO: 20466 - DNA, 1167 bp, Arabidopsis thaliana nossen
  Clone ID: LIB3234-026-H11_FLI
ttgttcttcttcatctttattacacatttttttcaaggtcttccaaacgatgtcggttttcgaatcggagacttcgaacttccacgtctacaacaaccacgaaatccaaacgcaaccgcaaatgcaaacgtttctgtcggaggaggaaccggtagggagacagaactcgattttgtcactaactcttgacgaaatacagatgaaaagcggtaagagctttggggcgatgaacatggacgagttccttgcgaacttgtggacaaccgttgaagaaaacgacaacgaaggaggtggggctcacgacgacggagagaagccggcggtgctgccacgtcaagggtcgttgtccctccctgtgcctttatgcaagaaaacggtcgacgaggtttggctcgagatacaaaacggtgtacaacaacatccaccgtcgtcgaattccggtcaaaactccgacgaaaatattcgccggcaacaaacccttggtgagatcactctcgaggattttcttgttaaggctggtgttgtacaagaaccgttgaagacaacgatgaggatgtcgagttctgattttggttataaccccgagtttggagttggtttacattgtcagaaccaaaacaattatggtgataaccggtcggtttatagtgaaaaccgaccgttttactcggttttgggagaatcttcaagctgtatgaccgggaatgggaggagtaatcagtatctgaccggtttagatgcttttcggatcaagaaacggataattgatggtccacctgaaattttgatggagcggagacaacggcgaatgattaaaaaccgcgaatctgcggctcggtctcgagcccggagacaagcttatactgtggaactggagttggaattgaacaacctcacggaagaaaacacgaagctgaaggaaattgtggaggaaaatgagaagaaaagaagacaagagataataagtagaagcaaacaagtgactaaagagaagagcggagacaaattgagaaagattcggaggatggctagtgccgggtggtaaatagatatgagagtttgtgtaatttacatatgatattttattgatcgtttctatctatacacataaatatttgtatctatattatattttgagacaaacatggaatttgtgtatataggatc

SEQ ID NO: 20467 - DNA, 847 bp, Arabidopsis thaliana nossen
  Clone ID: LIB3234-033-A2_FLI
attaagtagtggaagagaagaaagaaggatcagttaatcgaggtaattaacgtaatagattcatgactaatactaatattatctgaaagtaaaggatcatgggtataatataaataattagtatttttgtcataccggggaacaattaattaggtggtttgtgtgtcgtgttatcatgggatgtgtctaaaactgaaagatggtttaataatattcactaattttgggtgacataaaaaggttgttatatggacatgtgtgtttatcattgtctcttatttttcccacaaactctgattagtgattgtatttgcttaataattttgggagtgaagatgctgttctggctagagttgagacagagaagaggatgtcacttatcaaagcttgggaagaggctgagaaatgcaaagtggagaacaagtaacgtttttcatgttaacatttatccataaatgtctattaacccgatttagtaatattttgcaatgaaaccaagatattatcattaaggtcttgaagaatatattttgaaacagagctgagaagaagctttcttcaattggatcatgggagaacaacaagaaagcagctgtggaagctgagctcaagaaaatggaggtatgtttgaagttaatatttagttagagatttttaagcatttctgatttagctccgagctttttcaaaattgtggaattttttttttaacaacaggagcaattggagaagaagaaggcagagtatgtggagcagatgaagaacaaaatagctcaaattcacaaggaagcagaagagaagagagcgatgattgaagctaagcgtggagaagaaattctcaaagcag

SEQ ID NO: 20468 - DNA, 2498 bp, Arabidopsis thaliana nossen
  Clone ID: LIB3234-046-A8_FLI
tgctggagcctcaaagctactctctgatgctccgtacaacaaccacttctctttctccgccgtagacaccatgctcggaagcgccgccattgctccttctcagtctcttcctttctcttcttcaggcctctctctcggactccaaacaaatggagaaatgagtagaaacggagagattatggagtcaaacataagtcgtaagagtagtagaggagaagatgtagaaagcagatctgaaagtgataacgctgaagctgtctccggtgacgatttagatacctccgatagacctttaaagaagaagaaacgttaccatcgtcacactcctaaacaaattcaagacctcgaatcggtttttaaagagtgtgcacatccagacgagaagcaacgtcttgatcttagccgtcgacttaacttagatcctcgtcaagtcaagttctggttccagaatcgtcgtactcagatgaagactcaaatcgaacgacatgagaatgctttgttgaggcaagagaacgataagcttcgagctgagaatatgtctgtacgcgaagctatgagaaaccctatgtgtggtaattgcggcggacctgccgttatcggtgagatctcaatggaagagcaacatctgagaattgaaaactctcgtctcaaagatgagttagaccgagtctgtgccttaaccggtaagtttcttggccggtctaatggttcacatcatataccggactcagcacttgttctcggcgttggtgttggttctggtggatgtaatgttggtggtggtttcactctctcttctccgctgttgcctcaagcttctcctagatttgagatttctaatggaaccggttctggtttggtggctacggttaaccgtcaacaaccggttagtgttagtgattttgatcagagatcgaggtatttggatttagctcttgcggctatggatgagcttgtgaagatggctcagacacgtgagccgctctgggttcgaagctcggattctggttttgaagtgctgaaccaggaagagtacgacacaagtttctctcggtgtgttggaccaaaacaagatgggtttgtctcagaagcttctaaagaagctggaactgttatcatcaatagcttagcgctcgttgaaaccttaatggactcggaacggtgggcggaaatgtttcctagtatggtctcaagaacttcaaccacagagattatctctagtggcatgggagggcgaaatggtgcacttcacctgatgcacgcagagcttcaactgctgtctccactcgtgccggttagacaagtgtcgttcttgcggttctgtaaacagcacgcggaaggtgtttgggcagtcgtggatgtctcaattgattccattagagaaggttcttcttcgagctgtagaagattaccatccggttgcctcgtacaagacatggccaatggctactcaaaggtaacatggatcgagcacacggagtatgacaaaaaccacatccaccgtttataccgcccattactcagctgcggactagcgtttggtgcgcatcgatggatggctgcattacaacgtcaatgcgaatgcctcacgattctcatgtcctccactgtttccacttccactaatccatcccctataaactgcaatgggagaaaaagcatgctaaagctagcgaagaggatgactgataacttctgcgggggcgtttgtgcttcgtcgttacagaaatggagcaaactcaacgttggtaacgtcgacgaagacgttaggataatgactaggaagagtgtaaacaatcctggcgagccgcctgggataattctaaatgcggcgacgtcagtttggatgccggtatctccgaggcggttgtttgacttccttggaaacgaacggcttagatcggaatgggatatcttatccaacggtggaccaatgaaagagatggcccatatagctaaaggccatgaccgttccaactccgtctccctcctccgtgccagcgcgataaatgcgaatcagagtagtatgctgatattacaagagacaagcatagacgctgcaggagcggttgtggtgtacgcgcctgttgatatcccagcaatgcaagctgtgatgaacggtggagattctgcttacgtggcactccttccttcaggattcgccattctccctaacggtcaggcgagtacgcaacgctgcgccgcagaggaacgtagcgttaatggaaacggtgggtgcatggaggaaggagggtcgttactaacggtggcgtttcagatactggtgaatagtttgcctacggctaagctcacggtggaatctgtggagacggttaataatttgatatcgtgcaccgttcagaagattaaagctgctcttcattgtgatagcacctgatcatcgagatcagacgatggaggagattgagtcaagaacgaacctcattttgtgatgaatccgtttttgtgatggttcgggtattgactcgatgaaattt

SEQ ID NO: 20469 - DNA, 1136 bp, Arabidopsis thaliana nossen
  Clone ID: LIB3234-048-B10_FLI
gcataatgctcttgtgagcagagagcggggggctagcacgaacgaacaacaagaatctttcttcgtcgaaccttgtctttgtcttcatctcaatcggatctgtccgttgccgtcgattctccccgccgttttcagaggtcatggacgtttcagctagaaagtctcagaaagcaggccgtgagaagttgaggagggagaaactgaatgagcattttgttgaacttggaaatgtgctcgatccagacagacccaagaatgacaaagctactattctcactgatactcttcagttgctgaaagagctcacttcagaagtcaacaaactcaaatctgagtacaccgctttgacagatgagtctcgcgagctgacacaggagaaaaacgacctgagagaagaaaagacatcgctcaagtcagatattgagaatctcaatctccaataccagcagagattaaggtcgatgtctccatggggagctgcaatggatcacactgtcatgatggctccaccaccatcatttccatatccaatgcctatggctatgcctcccgggtcaatcccaatgcatcatccaccaatgccatcttacacttactttggcaaccagaatcctagcatgatgccagcgccttacatgccctatatgcctcctaataccgtcgttgagcaacaatccgtgcacataccacagaacactcgttccagggaacctagagcaaaagtttcaagagagagcaggtccgataaagcagaggactctaatgacgttgcaacacagctcgagttaaagactcctggatctacttctgacaaggatacatcacaaaggccagagaagagcaagagatgtaagagaaacagcaacaacaacaactctgtcgaagaaagctctcattctagcaagtgttcatcttctccgagcgtccgagacaacacttcttccagtagcgtagctggtggcctaaaacctgatgatgcaaaatgaatatcgaaacgtttcgatgagtatatgatgcgagcacaaaaacgggctcgctgtccgaaacatcgtttgatgcttagttccacaaacactgctgatttgtaatctcgtctgatgtttataattatataagtttaataaggtttatattcg

SEQ ID NO: 20470 - DNA, 658 bp, Arabidopsis thaliana nossen
  Clone ID: LIB3234-048-F4_FLI
aaacggtatgcactcgctcatactctatcaaataggacattatatatattatatatatatatatatattgatatgcttacagagtttacagtaacaattgtgaggtcagttattgtaatgttccttttttaccaagaattggatacatttctatttattacaaggagaatgtatataaacaaagttttgaaactgagggagtcgctaagatcttacggttaaacgtgatataacctctaacatgttcttatctcggcgatggtttaggcattccttttagttgttttatagagtttgtggtttatttattgggtttggcgagaatatgaagaaaactcggaagaaagcatggttaactgtaagcaataaactagaatctctgtggtgatgatttactaaaagctttgatatgatcttcaattccaagtgggtgggatcttgtctccatcggattctctctcgagttcacatctgacaactcttcatttcttgtctgaaagtgaaaccacatggttttgtaaaatcaggatttaccggatctgctctgtgtcttcttcttgccttgtgtccctccccgagcctaatagacagaatctttcccatgtcccctcttgtctttatcccttcactgtttgaggataaaagatccataccacgg

SEQ ID NO: 20471 - DNA, 718 bp, Arabidopsis thaliana nossen
  Clone ID: LIB3234-049-D8_FLI
ggtactttcgaattcgcttcttgatcaatcacagtgtatcttggagggtatgatgaggaggagaaagcagcgagggcatatgatttagcggctctgaagtattggggtcctaccactcacttaaatttccctttgagtaattacgaaaaggagatcgaggaactcaataacatgaatcggcaagaatttgttgccatgttgaggaggaatagcagcgggttttcgaggggagcttccgtgtatagaggagttacaaggcatcatcaacatggaaggtggcaagccagaattggaagagttgctggaaacaaggacttgtaccttggaacatttagcacgcaagaagaagcagcggaggcgtacgatatcgcggcaattaaattcagaggcctaaacgctgtaaccaatttcgatataaatagatatgacgtgaagaggatatgttcaagctcaacgattgttgatagcgaccaggccaaacattctcccaccagctctggcgccggccactaaccgacaccgtaaactcctcgccggagagactattcccacgtacggttggtttgaggaaataagttcgtccagtctgtttaatcatttatggtttaataaacatatattcctaagtaattgaggccggtctacatatatacaacttttttagcaaattaagttatcagaatccactatatattattctctatgatatactttgatt

SEQ ID NO: 20472 - DNA, 469 bp, Arabidopsis thaliana nossen
  Clone ID: LIB3234-050-C2_FLI
catttcccatatggcttctccacagtcactaggttacccaactatctcccctttcaacacgaggtacatgtcaccgtatagacctagcccgagcaatgcatcacctgcaatggctggatcatcgaattatccgttgaatccactgcgttacagtgaatcagctggaactttctctccatacgcctctgcaaactcgcttccagactgttagaaagtctacagaaccaaccactcttggttcaggtcatataagattatttcttttgcatttgagttttactacgaaacgtacttctggcgtttgtgtgtggtgtgtgtgtgtgtaacgatgcttttatagtcttttggttgagatgaaacatcatcggatttaggttagagagattttaacacttcgacaattacacaaactcggttcctttgtacaaagaaatatgagcttatgtatatacacgtctctttccttgtt

SEQ ID NO: 20473 - DNA, 448 bp, Arabidopsis thaliana nossen
  Clone ID: LIB3234-050-F8_FLI
gttgttgttgttgttgttgctgctgcagagttagctaggatccaatcggaagatcttgaatggtatttcttctctccgattgagtacacgaacccgaatcagatgaaaatgaagaggacgacaggttctgggttttggaaacctactggtgttgatcggaaaattagggataaaagaggaaatggtgttgtgatagggattaagaagacgcttgtgtaccatgaaggtaagagtcctcatggagttagaactccttgggttatgcacgagtatcacatcacttgcttgcctcatcataaggtataacaaatccttcagagctcttttggttctgtatcttccatttgaattctgctcatttttgtcttcttcttgatttggggatttttgagctctgtggttgtgtaaagattctaactttgagtgtttttgcttctaccaaagcttg

SEQ ID NO: 20474 - DNA, 560 bp, Arabidopsis thaliana nossen
  Clone ID: LIB3234-085-B8_FLI
catacgtgattaagtacaaaaaaggtaaacataatgttgtagccgacgcattatctcggaggtatgttttgcttacttctttggatgcaagattgttgggttttgagcaaataaaagacttgtatgctaatgattctgattttagcaaaatatttcaatcttgtgagaagtttgcatttggaaaatattatcgacatgatgggtatttgttctttgaaaatagactttgtgtgcctcactcttctttgcgagaattatttttaagggaagctcatggaggtggcttaatgggacactttggagttgctaagacgtgcaaggtaatgcaagaacacttccattggccgcacatgaaaagagatgtcgagcgactatgtgaacgatgtgcaacttgtaagcaagctaaggctaaggttcaaccccacggtttgtatacccctttacctattcctttgcatccttggaatgatatatctatggattttgtggtaggattgcctaggactaggactggtaaggattccatctttgtggttgttgaacgcttttctaagatggcg

SEQ ID NO: 20475 - DNA, 2235 bp, Arabidopsis thaliana nossen
  Clone ID: LIB3234-085-G6_FLI
atgagaagaaagctggcttccatggttgtggaagatgggtattcttattgtgtttctaaatctgttttcattagggggaacttttaagtagtgagttatattaaataataaaaccgatgtgtcttttgatttctagcatactctttcttgcaggatgcccacaatcaagctggtattgcccatagtggtggtttaggacctttattgaagcttctcgattcaagaaatggatcattgcaacacaatgctgcatttgctctttatggccttgccgataatgaggtgtgctgtatgctactttcggtttattcattatgcagaatttgatggtaaacgtcggtaaatgggttattgatccatttttcttcccctaggataatgtgtcagattttatcagggtgggaggtatccaaaagctacaggatggagagtttattgttcaagtatgtatggcgttgccactcttcctctactttacagaaccacattgtcatactcctttattggctagatactgaagtttcttagcagctttaatcgtatttttttactcttccccttaaggtgtttataatatatcatgattttttaggcaactaaagattgtgtttccaaaacactaaagagattggaggagaagattcatggaagagtaagtgaaactatacttttctttaattctttttttttttccatctttgatgactaaaactgctttatcctggttgagtttctgaagctctgttgaagtttagcatttctttattcaacctttgagatttctgtgctttgattttcttttgtaggttctgagacatctgttgtacctaatgcgcatttcagagaagtctatccaaagacgagttgctcttgcccttgctcatctctgttcacccgaggatcaacgaaccatattcatagatgacaacggcatgtgacagtttttttatattttcatgagctaaatgagatgcatgcgttatgtttaatgcgttaaccgtccagtttagatgttctttgtccaaaaagttaatattgagttgtcttttgacagggttggagttgctactcggtcttcttggttctttaaacactaagcagcaacttgacggtgcagcagcgttgtacaaattagcaaataaatctatggcactttctccagttgatgctgctcctccttctccaacacaaagggtgagtttcctttctgcttcagttctcctataggtaacgggtggaagtctcaatgcagtattctgtatgtctttttgtgacaggtttatctcggagagcaatatgtaaataatgctacgctgtctgatgtaacctttctagtcgaaggtaatcatatataaatccagaagttgtggaactctagttagcttcaaagtccatatgtaaaacagaaaaatcatactgcaggaaggacattctatgcacacagaatttgtctgctggcatcctcagatgcatttcgtgcaatgtttgatggtggttacagagtaagtgaactaaatattttggtttttcgataatgttcttgtggggtaaatgatattttgatgacaatgacgtatggatgtatgctggtctgctctctatcaaaggaatacaattatcttttggggaaattagacctgaattgtgtcacggtttgtgtttcgtttatatcacaggaaaaagacgctagagatattgagattccaaatatcaaatgggaggtgtttgagttaatgatgaggtatgatgaatgaacctctgcatgcttttgattgactcactcgagatattgaaatttcgaaaagtctgtgagaacttttcatatacacgtaattgactcccttggattatgattttcaggtttatatacactggatctgtcgacataacaaatgagatatcaaaagatcttctaagagcagcggatcagtatctcttggagggcctgaaacgactctgtgaatacacaattgctcaggtgagccagaattatatcacaatgtaaagtgatgatgtggtttgcgtagtacttaacgaaatctgacacggttactttgaatatgaaaggatattacgttggaaagtataggagacatgtacgagctatcagaagcattccatgcgatgtcgctgaggcaagcttgtatcatgttcatcctggagcatttcgataaactgagttcaatgccttggtaatataaacaagatgtcactctctctctccactaagatttg

SEQ ID NO: 20476 - DNA, 1152 bp, Arabidopsis thaliana nossen
  Clone ID: LIB3234-087-G12_FLI
gtcgctttcaatactccggtgaggtttgtcccgagtttcgtcgtggtggtgattgtagccgtggagatgattgtgagtttgctcatggagtcttcgagtgttggctccatcctattcgttaccgtactgaagcttgtaaagacggtaaacactgtaaaaggaaagtctgtttctttgctcattcgccacgtcagcttagggttcttcctccggagaacgtttccggtgtctcagcgtcgccttctcctgcggcgaagaatccatgttgcttgttttgtagcagctctcccacgagcactcttttgggtaatttgtctcatctttctcgatctccgtctctgtctccacctatgtctccggctaataaagccgctgctttttcacggttgaggaaccgcgccgcttctgccgtttccgccgctgcagccgctggttcagtgaactataaagacgttttgagcgagcttgtgaattctttggattccatgagcttagcggaagcgctgcaggcgagttcctcgtcgcccgttacaactccggtttccgctgcggctgccgcgtttgcgtcgtcctgcggtctgagcaatcagcgtctccatctccagcaacaacaaccaagtagccctttgcaattttgctctttcgccttccactccaagttacctaactaactcacctcaggcgaacttcttcagtgatgatttcactcctcgccggagacagatgaacgatttcacggcgatgacggccgttagggagaatactaacattgaggatggttcttgtggtgaccctgatctaggatgggtcaatgatctcttgacttgagggattgacggtggagattcgccgggaggagatctgacttgagaatgtaaatttcggtggaagaattttaatcacattcatgaatcatgggagaataatcggttcgtaacggtttggtcaatgcatggagagattgtttgttcaaatttattttgaagatttttttttttagctaattcagaagtgtcttgtgtattgtcgtttattttttagaattttctttttctgatgggatttttaccaaataatatgttgaacttgtaatatcttgtggactcggattgtgcaatgtttcaccaattctatagatatttttcccttttc

SEQ ID NO: 20477 - DNA, 719 bp, Arabidopsis thaliana nossen
  Clone ID: LIB3234-090-D9_FLI
gtcctgaatgtgtgaagagaatgattgaaacagcagatatagaaggtgatactgtaagtattctcaatcttcaattgcctcattccctctagctcttgctctctataatgtaattcatcccaaagtttttcttgttcacagcctctgcatcacgcagcaagaggtgaacatgttgacgtggttaggtttttgctgggttccggggcttcaccaacgacacaaaactcctatgggaaggtgaaaaaaaacatttgaaagcaatttctatctttggcttttgaagtatggttagcgataataacaaggttgtgataatgcagacaccaggtgaattagctgatttaaacactgatgctaagaggatactcgaagaagcgataaacaactcaatgatctcctagtgatgctgcaaatctgcagagttcattggccagttttggcgactcagtgaagtagtagcaaaatgttaactttttcttaatcctgttttttggtggtttcatatacaaaaggtttcaaattttgatacctatggaattaagaacttccgtgtcggttttaatcatgaaattattatcagatttgagtagtacaaaatatactagtttctttgtaagaaaactggaatcaattttaaacatttcaaacatctatattaacaagaaggaaattgagcggtttaataagttggtggattgaagtgtgaatacttgagaaat

SEQ ID NO: 20478 - DNA, 924 bp, Zea mays
  Clone ID: LIB3236-015-E7_FLI
acataaacttgagtggcaatagcataaaggggaacattccaatctccctgggtaccatctctgtggtgcaagtactggatctgtcatacaatgagcttaatggatctattccagagagcctcggcgagctgacatcattacagatactgaacctgaatggcaatcgtctttctggtcgtgttccagccagtttgggaggaaggcctctgcacagagctagatttaacttcacggacaatgccggactatgtggaatacctgggttacgtgagtgtggccctcatctatccgtggctgcaaagatcggcatggctttcggcgtgcttttagctattctattcctagttgtattcgctgcgtgctggtggaagagacgccagaacattctccgtgctaaaagattagctgcagcaagggaagctccttatgcaaaatcaaggacccagttcacccgcgatgtgcaaatggccaagcatcaacggacacatgaaaatgctcggagcagcaacagtgaaggctcgccacatttgctttcctagctcggtgagaagactgcgacagtgacttggcttccatctattcttcagttcctcctttgtatgctcctctgcagtcttgaaagacgaagctgctgtacatactagctaggtcacgaatggtgtatatacttgtattttttttggtgatctagaactcagtccaggagagggatcagtctatcagatgagagaaattacccatttcatcctacttactgttctgattactgctgttgatttccccttcactgttcaagtatgcttattgtcagttttgtactctgtggtctgaagctctgcaaaactgccttttgccaggagctggagctccaggctgggctgtgctgtgctgagatatagagtgaattctgcaccttttcctaac

SEQ ID NO: 20479 - DNA, 1378 bp, Zea mays
  Clone ID: LIB3236-032-D12_FLI
aatcaggatcaagcttctatagagaaatgcaatgctccaaagaatttaccaatacctgataattcacttctcgatgctcgtattctctattgtacctctcctgccctgggtcataacaaagaagcacacccagaatcgaacaaaagagttcctgtgatagttgatactcttgagaaattggagcttagtcccaagcatcgtggttcacaggttcttgaaattcaaaatttcaaccctgcttctctagatgatgttgcacgagttcattcaagatcttacatcactggactcgaaaaggctatgggcagagcttcagatgaaggtctgatattgattgaagggacaggaccaacatacgctacagaaactactttccgagaatcacttctatcagctggtgccggaatcacactggttgattcagtggccaccaggacatcatgctgttcctcaaggtcccatgggtttttgtgtctttgggaacattgcagtggcagctcggtacgctcagcatcaacatggactaaagcgtgtgatgataatagattttgatgttcaccatggcaatgggacgtcagattcattttatgatgatccagacatcttcttcttgtcaactcaccagcttggaagctaccctggtactggtaagatcaatgaagtcggacagggtgacggtgaaggcacgacactcaaccttcctctgcccggtggcgcaggtgactacgcaatgagatgtgcatttgatgaggtcattgctccatcggcccatcgattcaagcctgatataatccttgtatcagctggatacgacgcacacgcgctggaccctctggctggccttcagttcacaacaggcacgttctacatgctggcatccagcatcaagcaggtggccaaggaactctgtggtggccgctgtgtcttcttcctggaaggcgggtacaacctgcagtcgctctccagctccgttgccgacacgttccgtgcattccttgatgagcccagcctcgcagcacagtttgatgatccagcgatacttttcgaagagccgactcggaagatcaaggaagcaatcgagaaggccaagagcatccactcactctaggctgtcagctaattttcccctcaatccccagaggggtagccctaaattgggaaaaggtgctgtcagcagtggcactgcagaactgcaagatcttgtggcaattggcattttgcaggtaggtagtgcatagtttgaacttggaaggcctggtcattttaatttagccaattctcaccagaaaatggaattaccattctcagtagaagcagtgtatagtataatactagctgtatatattgaccaaaagttatgtgctacattattaatttt

SEQ ID NO: 20480 - DNA, 556 bp, Zea mays
  Clone ID: LIB3236-088-C5_FLI
aaaggagacctgaataatggaggccaaattgtaaaagcaaatgtatgcatcgatatgagctaggcttccagtttctggacaattcaatccattcacatcacagctagctagctatgtatgaggttacctgtccattcttcaatcctctacgaagtgagtagtccatggaatctgccatagctgcggttgcaggtgagctcgtcagccggttcatctccttcgcgttgaacagatgctgctcctcaagctacgaaagatcggaggagaagcgggagaggctgcggcacctcctgatgaggtctcacaccgtcgtcgaggaggcagatgcacggcacatcaccaactccgggatgctgacgcagctgaaggtgctgtcggaggccatgtaccagggctaccatgcgctggacgccctgagattccagctcgacgacgaggttagcgacgacgactcaccagcctgctcctcttccgccactcgacgtctcaaacgtcgccgcgcagttcttgctccggcggcgaaaggggagggcaaggcacaggccgcactggagaa

SEQ ID NO: 20481 - DNA, 653 bp, Zea mays
  Clone ID: LIB3236-093-D9_FLI
gaaagatcctgtgacactgccatcgtcaaaggtcacagtagaccggcccgtaattatcaggcatctgctgagtgattcttcagatccatttaaccgctcccacctcactcaagacatgctgataccaaacacggagctcaagttgcagatcgaggagtttgtccggtcccagcagtcgagaaagcgaactgctgcggcgttgttggagattggcgaagcggagggtactgatgatatggccgaatgaattgtgccaggagcaggggatggacacattttttttgtggggaaagagtgatggttaattcacatgaaatttatcggtccatctgtccgtataaagttggtttcccggcttgtgtccctgttgcctcgattctttgtaaatattgtaggtgcacacctgatacaaatgtagttatagaggaagcctgtcagcccgtctcatcaacaatgtgttttacgatatccccactacaacttttttttaacacgatattatcactataacttgatatgtgtgttgggctgagaagcgtttgccttcgccttgttggttctccgcgataagtgtgaacaagccctggtcttctcatttctgcgaaccaacaatcacaagtgaattatttatgccagttgccaggttttcatcc

SEQ ID NO: 20482 - DNA, 754 bp, Zea mays
  Clone ID: LIB3236-094-G3_FLI
gtgatctccgcgaagaccaccctgggggaggagttcgagggccagatcgtcgccttcgaccgcccctccaacctcctcgttatccaggagggcgtgggtagggcggagaggggggagcggaggaacgtgagggtcctcaaagcgaactacatccgggagttctcggtggtcagtaagggtgacgaccctctcgatcctgccagctgcatgctggacctcaactccatttatgcccgggaggatgctgcactcaggcaagcagagattgaagctgagagaattggtgttggtgtcaccccagaagctcaaagtatatttgatgcgctgtccaagacgcttccggttcagtgggacaagactgacattgtcgtaatgaaggaggttcgtgtacgcagtccgtacctgcctgaaaatgttaatggaggaacagctgcagcaaatgaacgcgttaagaaagtgattgactttgaaaggaaaagattacattcacgtgtacctggccaattctcttgattaaaaggcttgactattttttacattagcctcgtgttgtatttctaatactgcatccagttttcttattctcatcgatgcggttttctataaaatgtttcagcaaaaatctgtcgtaataatcacatcaactagctagatctgtactgtttggtagttattcagatttttataaaaatattttggatccaaataaatgtttaggagataaatcagaatcatttgatgaggccgtttagct

SEQ ID NO: 20483 - DNA, 565 bp, Zea mays
  Clone ID: LIB3236-102-B5_FLI
ggatcatgaaggcacaggcgctcagggactcgagcatgtctgggtacatgtcctccaagaagaccatggagatcaacccggagaacgccatcatggaggagctgcgcaaacgcgcggaggccgacaagaacgacaagtctgtcaaggaccttgtcatgctcctgttcgagacggcgctgctcacctcgggcttcagccttgacgaccccaacaccttcggcggccgcatccaccgcatgctcaagctgggcctcagcatcgacgaggacgaggctccggaggccgacaccgacatgcctcctctggaggatgacgctggcgagagcaagatggaggaggtcgactagtctggctatcgtgtcttaattggtgtgtgtgcgtgtgtttttttacttttgctagcctgcaaacttcgtacgtttacgtataatagtgctccggctgcccatctctgcttgctcggtcagttttatatatgccagctgctcatcgcagcattctccctgtgcacaactccaaaatgcgggaagagatcaattattaaccgagtgaaaagtgtttagag

SEQ ID NO: 20484 - DNA, 545 bp, Zea mays
  Clone ID: LIB3236-107-H12_FLI
ctgagaggtccactctattatgtcctggtgctgctgttcagcgttttagtcttctggcgtgagtcccccatcgggatcgtctccttgtcgatgatgagcggtggcgatggttttgctgacattgttgggaggaggtatggctcagcgaagctgccattcaatcggaagaagagctgggccgggagcatctcgatgttcatttctggtttcctgctgtccgcgatgatgatgctctacttctcaagcctgggttacattgatgttatctgggaagaggcacttggtaagctggcgcttgttgcactagcagcgacagtagtggagtgcgttcctgtgaccgaagttgtagatgacaacatatctgttcctttggccaccatgctggtagcttttctcttgtttagctccaaccgcacaatagttaattaaaatactactagtgcattatttaagacatgtgatgagttcttcagtgatgagttgtgcttacttttgcttcctatgtgatctctagtacttgatggcgacggcctaacatctcccac

SEQ ID NO: 20485 - DNA, 513 bp, Zea mays
  Clone ID: LIB3236-144-H2_FLI
ggcggtggacgacgccggggcacgaggagcggcccaaggggtacctcttcaaccggccgccgccgccggcgggggagacgcggaagtgggaggactgggagctgccctgttacatcacctccttcctcaccgtcgtcatcctcggcgtcggcctcaacgccaagcccgacctcacgatcgagacctgggcgcacgagaaggcgctggaacgcctcaagcagcaggagctagccgccgtctccggaggcggtgacgccgatgccgagtgatccgctggtcagatcacccgcaattctagatatattgtttttttattttctttctggttccctgcttgtgtcgcgcggttcaataaggctgtctgtcagtctgtactgagatgcatgtcatgagattgagagattccagaaatggatggacatcagactgaacactgtatcattgttgctatttcgctggataacttacacttcacaatccttgtaattgttgcgtgatggctaaccacgctat

SEQ ID NO: 20486 - DNA, 1226 bp, Zea mays
  Clone ID: LIB3236-150-A11_FLI
cgcctgctttttttttttgttctctcatctcgctcatatatatcctttgcacctgcgctgatccgttccaatcgatcttgcacctcctcacctcctcagctcggcgcctcagctgatcatggggggagcttctgattctaaccttcttccccctggcttccacttcttcccgtcagacgaagagctcgtcgtccacttcctccgccgcaaagcctcgctcctcccatgccagccggacatcgtgcccacggtgtgcatgaatcaccacgatccatgggaactgaatggcaaagcgcttgaggctggtagccagtggtacttcttcagccacgcgaagcaaagtagggccacgccgaacgggtactggagctctgtttgtgctgacgagacggtgctgagcggcggcggcggctgcagcgtcgtcgtcggcctgaagaagacgctcgtcttctccactggagagccctctgatggggccgaaacaaactggatcatgcatgagtatcacttgctggatgggaggaaggggggtagcagcagcagcagtagcacttcatcaatccatagttcgagcaagaaatcgcatcacccaaacacagtaagatcaagctagctacttgtgcgtgtgtgtaggcagtaggcactactgtatttatacatgtatataactatatatacggcatgcatgattatcttgacaagggtaatataaaatacttccatgaccattacaggagttcagtaactgggtgatatgccgagtgtttgattcgacgggcggcgggtcgcaggcgaactgccatgacgacgagggcatggagctttcatgcttggatgagttgttcctatccctcgacgactatgatgaagtcagcttgtcaagtaattagaagcctagtatcaccagaaccggcagtactagtaggcgctccctacgaattttacagaagatcaaatgattccataggtgtgtttagccttaaacactgcgtctaattaaaccacagatgtggattgctctcctcatcaaattggagtcggtcgaggcacatgcatgtaacaagctgagttagttttatataaatatgggcatagtgtgtggataatctcctgtactacaaggttcgaggtatctatgttcgagcataaaaaggggatagacaaggcatgtataactctatttaatataagatctcttgagcgatctttagagagttaattaaaac

SEQ ID NO: 20487 - DNA, 1604 bp, Zea mays
  Clone ID: LIB3236-150-E9_FLI
cgacgacagaccccaaaatccagtctttgaaaatgaactcttttcaatcttacaacactgactacttttatgctcatggtgctcaaacccaaaacttttgtgccgaagacctactcaacttcgacagcaccgtctttcttgatgactctgaaagtgaatccatctccactctccaaagtggatccaagaaaatcaccaaaacctctcctgctgtccaagccaagcaagccagctacaaaaagagcaagagagcaagaaacccatggactcctaaagaagatgccaaattaatggagctcatgaagaagtatggccaaagctgggctatgatctcctctcaattagaaggaagaaccggcaaacaagtcagagatcgttacctcaacaagcttagaccaaatattaaacttggtgactggagtgttcaagaagatgaacttgtcgtcaaactcttgaaggaagtaggcaacagatggagtttaatcgccaaccatctccccggcagaactgaaggacaggtcaaaaacagattctattctttcatcaaaaagagattacaacctgacggtaccctttgtcaaatctccgacagcagaactagttctgaagaatacactagcttctccaactctccccaacccgaaaccggatttgactttggctatgaatttgatgtcaatgctgctaatggatccgccatcaactttgctccccaaaccttcaactgtgctatcacgaagggcgcttatgttaccgaggaagaaatctattctgaaggaagcaccactcaaggccccacctcccaagttggaaacagccctttcagaggagaagtcgaccctactgatgtcatttcctatgacctccctgaagctttcttctataagcaaccctcccaacacagacatttcaacctcgcccctattgaacatgatagccaagttgatgctattcttaccaatgttaccaactactttgctgaaaacaacaagttctacatgccttctgaggttgattcctttttcactcaagctgaaacccaaggacaagctcctcaggatgatagacttaaccaattgagcatgagaaaggcttatctcgaattagctcttgccaaaaccctcaacgaaatgaaaagcctttaaatgagcggccagtccatttagcaccatgctaaactgaaaaaactatcttgtcttttgtctctcaattttttctttttagtctttcgaatctcagtccagcccttcaaataaattatctttttctgtcttgtttgagcaaaccaatgtcttactttatatgtctagtctagtctcgtctcgtttcatatttgtcttgtctcagttttatcttttgtctcgtctttatttgtcttgttttaacttatgtctctaatcatctttataagtctatacttgcaaaaacctaaatacgaaataaataagtaatccattcattgtcatttatgcataatttgtaatattataattatgcataagactttgaatttaaaatctttctttcttctattcataactttatattggtattacatattttttgtaaagataaattgattaaattcaattcatttgcaaaat

SEQ ID NO: 20488 - DNA, 1453 bp, Glycine max
  Clone ID: LIB3242-144-G11_FLI
tgttttggcaagtcctcaacccccctccccccagcataaagagctataattcccttctcagccacaatatggctttgtaaaatgggaaggactccttgctgcagtcacgaggaattgagaaaaggggcatggacggttcaagaagaccagaaactaattacttacattcagaaacatggcacaggaagctggcgtaccttgccacagaaagcaggtcttaaaagatgtggaaagagttgcaggctgagatggtttaactaccttagacctgacattaagagagggaaattaagccaagaagaagagcagacaattatcaaacttcgggcggttcttggaaacaggtggtcaagtattgcaaagcacttacccatgcgaactgataacgaaatcaagaactattggaactcatatctgaaaaagcagttcgaaaagaatgctgtggatccctcaagttcaaaaccaaatagcactgatagttcctcagaatcaaaatctaatgacacgtgcatggttccatcagagaaaactgattgccatgaaccaaacaccagccaatctcatcagcacaacttatcaaggtcaatctcatcatcaactcatcttcttaacaaagttgctagtaaaattctggcatcagggtacctagaactaatcaaatcatgccaacctgttgttgctgggaacagcaaaagtgaaagtgtggttaaaactggtattgggttagaaagtgacaatattagagacccccttgagcctaatttgacctcaccaagtcattctataacttctgctaagttactgaacaagatggctacttccctccctcataaagttcatggccttgaagctgcaaaagctgtgttctcaaaactgatggaaaacagtgaaaaaggtgccactgctagtgatgatagctttgttggaggttgtttaaatgctttaagcccttttgaggataaaccacacataacaaaaacaattgactccccttctggtcctacactaatgttcaaccatgttaccacaccctcatgcttttcagaagataatgaagataactggcaatgcgtttcatctaactatgtttccttcaaaatttgtgctgcgaatggtggtgactgcagtgtctctgagatcaacttgggtgagtcttccagttccacatccagcttcctgtttgagaatgctgaccttggaacgtgtgatgatgagataagcaagtacatccagtattgtagggaaaaaaatttgtggacatccaatgctaataatgtaggtattacaaggccctatgatgtaagaggaagatatctaaagagagataatatatcctaatagagtgtttgatatatcaccatgtttatatagaggtgtttgacggaggaatttatgtatcatcactctatttgtaataagaaattatattcttccttataatttttttttactc

SEQ ID NO: 20489 - DNA, 1191 bp, Glycine max
  Clone ID: LIB3242-146-C11_FLI
aaaactcagcgacagatcatatcatatcatgtgataagctagcttatatatacacacaaacaagagggtagaagggaaaactcttgcagaaaatagcttgaaaaaaatatatattctataaacaattatgctttttccatctggtattctgaaaaagcaagtttaatttatttgtggaaagagatataaagcaagtattaaacacatgggtaggggaaaggtggagctgaagaggattgagaacaagataaaccgtcaagtgacatttgcaaagaggaggaatggtttgctcaagaaggcttatgaactctctgtcctctgtgatgctgaggttgccctcattatcttctccaaccgtggcaagctctatgagttctgcagtggccatagcacggccaagacacttgaacggtatcacagatgcagttatggagccttggaagtccagcaccaacctgaaatagagacacagaggcgctaccaagagtacctaaagctaaaatccagagttgaggcactacagcaaacacaaagaaacctccttggggaagaattggagcacttagacgttaacgaccttgagcagcttgaacgtcagctggactcttccttgaagcaaatcaggtctaacaagacacagcagatgcttgatcaactctctgatttgcatagaaaggaagagatgctactggaaactaacaatatcctgagaaacaagttggaggaaatcaatgtagccctacaaccaacatgggaagctagggagcaaaatgctccctacaattgccaccctccccaaacagagggatattatgagacagcaacagcacattgcagcagtacattgagaattggctatgattcttcaggattaaatgaagcaggaggagctgcaggagcctcagcccaaaatgctagtgaattcatgcatggatggatgaactaaatttatttccaatttagtacttaaattcatgatcatcagaaaaatgatgcttttgtagagatcttggcctacaagaacaggctctaataataggtgtcatgcagcataaaatatacttatgctattcttaatattccaataagacatgttttgaagaattttataattagcatcttcccaaactcaatccatcctcattgatccaaatggggttgtttgatacttaatgacatgtgtatgctcct

SEQ ID NO: 20490 - DNA, 1357 bp, Glycine max
  Clone ID: LIB3242-147-F5_FLI
gattctccaccatctccctaaagagccatcaaactttataaaaagaaaaaacataaaagcatttgaacgccatggttttctcctctattccagtctttgtagatcctcccaattggcagcagcaaccaaataaccatcctcaagcaaataataatggtggtgacaacactcagcttcttccacctttgccaccacatcaatctcatgtgggaggttctgtgggttcaatcaggccaggttccatggcagatcgagctaggctagctaagttaccaccaccagaagcagctctcaagtgtccacgttgtgattccaccaacactaaattttgctacttcaacaactatagcctctctcagccacgccacttctgcaagacttgtaggcgctattggacaagagggggtgccctaagaaacgttcctgtgggtggagggtgccgtaggaacaagaagaacaagaggagtagtcgctctaagtctccagcatcatcggagaaacaacaaacactttctggttccacaagtgcaatagtcccctctggtggaaccactcatgaacagattggtcatcagttgccacagccacagaaccttcccttcttggcttctcttcagaaccttaatcgttatgctgttggaaacatgggtcttgggttgcgtgagattcacggacagaacgagaacatggggtttcagattggtaattcttctgctggtggaggaatggatcagtggcgcttgcatcagcaggttcctttctttaatggttttgaatcaacttcagctgggttcatacccttttcaaaatgaaggtattaacgaaacaccttctggttttggtggtgacataacaacgaattccagggtttctcagatgccatcggttaaaatggaggaaagtggggctttgaatttgtcaagatcaacactcaataatgtctcagaaaataaccagtactattcatggactgatatgtcaggtcttgcttctttttctgctactcatctcttgtaactttgaacatataacgtgtatgtggtcaataaccacatcaccggaattgttatgtccttgatggatcagagaaattctcaaacgatttggatgtgttatactgaacaccctcgacttgacttcattccaagttctcactatcatcagttgacagaaattaacgcagacatggtagaattgatgtcttctcttcttgtaattgcaattccggacattgatttgtgtttatgtttttttttttttgtttttttttcatccagtcgagtattttatgtactatatacatgggcttgctttaattgtataactgtgtgtgcatgtaatgttttgtgtttctgct

SEQ ID NO: 20491 - DNA, 1784 bp, Glycine max
  Clone ID: LIB3242-151-D11_FLI
cacaattttcagttccatgtcttcccatgattttcaccctttttctctctctcactttctgtggacttttctgtggtttccttttcagtgaaataaaaaaaaaaccactctggcttattactgtctatatagattcttctgaatccagttctttctaaaccaaaccaaaaaaacattccctctccaaccaagttttgtttttttttttttttcatgtgaaaattgaaatcgcaaccgcaatttaaaaccttggtgtatgttcttatattgaaattgaaattcttggctagggaagcaaaagggtagtaattggttttagagtaagtgagaatggaaaacgtttcggttcttttgtgtaataaggaaaaggatcagatggatttgcctcctgggtttaggtttcacccaacagatgaagagcttattagtcattacctttacagaaaggtcactgacaccaacttctcagctagagccattggagaggtggacttgaacaggtctgagccttgggatttgccatggaaggccaaaatgggagagaaagagtggtactttttctgtgtgagggacagaaaatacccaactggtttgaggactaatagagccactgaatcaggatactggaaggctacagggaaagacaaagagattttcagagggaaatctcttgtgggtatgaagaaaactttggttttctacaaaggaagggctcccaagggagagaaaactgattgggtcatgcatgagtataggcttgatggtaaattctcttttcacaacctccccaaaactgcaaaggtaataataataataactaataacaactttgattttggcttgatcatgttgcttcctatgttccactttttattctcttattagtattagtactttgtttgctttgtttgattttcagtgctgtgtttattattgtgttgcagaatgagtgggtgatttgcagggtttttcagaagagttcaggtgtgaaaaggactcatatttctgggatgatgatgttggactcttatggaaacgaaatggtttattcttcttctgctttgccacctctcactgattcctcaccttccattggcaacaacaccaaagcactgagtgtgactgattctgcttacgtgccctgcttctccaatccaattgatgttcctagaggaatctttgattccttgaacaacatcaatatcagcatcaacagcaacaccctttatggagtttcttcaaaccattcattttacaatactcagggggttcaacttcaggctccaccaactttgccattacctagttcttcaaaccattaccttagagcctttcttgaaaaccaaggaaatggatcgaacatgagcaacaatggttttgagccagagagggaaatggtcagtgtctcacagaaaacaagtctttctactgatgtgaaggctgaaatctcttcattgggtaaaaggcactttgagaatcaaaacaacccaattgcttcagcagctgcagttgcaccaatggaccttgctaccttgtggaactactgatctcaaataaagaattgccattggaaaaaaaaaaaaaaaaggccaactttttcagctgaaaaagtatagcctcataatttaccatatttactgtctggttttgatttttatgttgtccttcttgttgttattgttgtttgtttgtttgtctgtatagattttaactaaaagatttgctgaataatagtgaagcatgtattttgtactgttaagtgttaagttatgctgttttggtcc

SEQ ID NO: 20492 - DNA, 1178 bp, Glycine max
  Clone ID: LIB3242-162-D12_FLI
ggtaactggaattcagaaccacagtgaaaaccagaatgaagatgggagtgaaatactaaatagcactactgccagaggtgctgaaagctggacagaatctgagattgcaaggcttcaacagttgagagctgagatggagacaaggtatatgcaaagtgggtgttcagaagaggttatgtgggaggaaatagctaccaaaatggcttgttttggttacgaaaggagtgctgtggtcttcaaagagaaatgggagagtataagtaactatgcaaggagtgtcaaggatggaagcaagaagcgcaaggaagactcaagaagttgtttttacttcgataacagtgaccaatcttctctgtataaccaaggaggtgcctattgtgatatcaacgatcaaaggcacaagactgggaggctgcaaacaaatgatggctcttcaccttccaattcaaatgttggaaatacagttgcgcttgataactgctttcccttcttgatgactgagagtggaaatttgtgggagaactatagcttaaaggttaataaagcaagccaaaaccagtgatgagagtgaaattatatggttgacacttgtaagaggcaagaaaatttcgcagccttttatctcagatgatctcacattatgtaagcaagagctaactgatgagggtcgtttatgtatagagactgatgatgataaggtgctcaatcttattatatttatggaatcaaggtgaaaaataatgtgttcaagtcacgtacgtaagtttaatgagggagactacacattggcaaatatcactgaattgttggggtgtgagtatgacactaattcaggtgaatttctccattagctgatttcttttatgcgtgcaaatggaatttgcagttatattacttcacatgtcgcatcttccgataatgttcatatcattcattagttggtcaccgtctttctcctagtttccaccttccacacctatcttgccttttttttaattaatttttttggatatttatactgtgctggccttttgtgtttgtgtactgaaaggtagcaatttactttggtatttatttattggtcaatagttttatgaaccgggagaaagtgatgtattgatggatattgttgaagcatcggacattgttacaagcataaaaaaggccagatttactta

SEQ ID NO: 20493 - DNA, 608 bp, Glycine max
  Clone ID: LIB3242-168-B1_FLI
aatgtggggaaaagcaaccgaagagaatgtgggggaagatgtccctggccagcaatcaccaaccacagaaaacgttcctctcttgcaaagctgtaaaactgatacagctgagaagaaaatgcatggaagtgtataaatgacaaacaaaactgttcataaatcttaacattattgaaattacacgaaatagcaaagaaaagcatggttttgttatcccccaagctgaccatgcaacgccaatagcaaagtaggtacccactcctctagagactagagtctagaggacagcatatgtaagaaatagttaaagtgttcaactaatctccattcaccacgtaaacgaaccttcctacaagttggtgtacgaacactcacaaatgacaacggagcaacttccctttccctgtttcttgtaacaactcatccacattatgttttataaaatctgccaagattctgtaacatccccaaaaaattttaagtatttttatttatttactagtgtgttgactcgttcatcacgcgacctatattttgatgtttttcttatgaatatcgttgtacattaatagaaaattctaatatattcatgtaataagtacagttgt

SEQ ID NO: 20494 - DNA, 2571 bp, Glycine max
  Clone ID: LIB3242-170-F10_FLI
gttttttaatgatgaaatttgaggggtgtgtgaatgacccttttcccctgtgaggattggggaaattggggtggagtaaagttgttaactttctcagagaccatgcaggggcattgagcttgtgttcttgtttcttctcttctcacttggttttgttttgtggcaggtttgaaggatgatgatctgtatagagagctgtggaagctatgtgcagggccattggtggatgttcctcgtaatggggacagagttttctacttccctcaaggtcacatggaacaattgcaagcatctacggatcaggaattgaaccaggaaattccccatttcaatctcccggccaagattttttgccgtgttgtgaacattcagctgttggcggaacaagacactgatgaggtttatgcttgcatcgctttacttccagaatcagatcaaactgagcctacaaaccctgatccaaatgtttctgaggccccaaaacagaagtttcactcattttgcaagatattaactgcctctgatactagcacacatggaggattttcagttttgcggaagcatgctactgagtgcctgcctgaattggacatgactcaatcaacccctactcaggagttggcagcaaaggatcttcatggatttgagtggaagtttaagcatatatataggggtcaaccaaggaggcatttgcttacaactggttggagtactttcgttgcatctaaaagattggttgctggagatgcttttgtgtttctaaggggagagcatggacaattgagagttggtgtcagacgtttagcgcggcagcagagtcctatgccttcatctgtgatatcaagccagagcatgcatctcggcgtgcttgccactgcttcccatgctgtcatgactcgtacaatgtttttggtttattataagccaaggactagccagtttattgttggtttgaacaaatatctggaggcagtcaacaataaattttcactcagcatgcgattcaagatgcgattcgagggagatgactcacctgagagaagattttccggtactattgttggggttggagacgtgtctgcagggtggtcaaattctcagtggcgctcattgaaggttcaatgggatgaaccagcaacaattccaaggccagatagagtttcttgttgggagatagagccttttgtagcttctactgctttgaatgtcacacaaccagcagttaagggtaaaaggtctaggcctgctgatgttttatcttctgctgcttcaggtttctggtatcatggttcttccaatgagcttagtcaattaggtgctgctgctgaggtccaaagcaaggaaaatcaggttgttccatgctctctgaggcagaaagacattattaatagcaatcctattaatgctaataactctagcatcagtactagagtccgaatggaaggagtatggccttcttcaccacatttgaatgccactccaaaccttttttctgatcccaataacaacaacagcaacaacggcgtttcggcacgatcactgatctctggttatcctaatgttccatctagatcaagtgatggtcccacatgcgacggtgtggaagatgggaaaaagactgagaactcccttgattgctggttatttggagttaatttgactaacaattgtagcaacgttattactactccttcagagagggaacagagaggtccaagctcaagtgttgttcttagtggtcccaaagaatctattcctgcagctgcatgtgaaactgagagggttcagactcccaactattcactgtccaacaaagggcagaagcaaattatttctgaggcatcaccaaatcagtggcagaacaagcaggccactgtactatccatgaggacgcggactaaggtgcaaatgcaaggtgttgctgttggtcgtgcgtttgacttgaccacgttgagtggctatgatgatctcatagatgaacttgagaaattgtttgagatcagaggagagctgcgttcacaagacaaatgggctgttactttcacagatgatgaaaatgatatgatgctcgcgggtgatgatccatggccggagttctgcaacatggtgaagaggattttcatttgttcaagggaggacttgaagaagatgaaatgctgcaagttacctgcttcttcatcagaggttgaagagattctattgagtccagattcacagaatagggatgagactcagcagtctcacatgccttagacaacttggcttttttttttttttttactttttttggggtttgggaagtgaaagatatctgatggcataggttgcttaattttatggaactttcaaagcaactgcagattagtggactaattatataatatgaaagcaataggtagtgcagttggattttaggtacttatatttgtgaatacccttttttttctttttcttttttttatcctagagtgccatcagcttgtaaacaaatatgcttttcccatctctaatggattgtttgtctgtgatgtgtcggtttcttctacatatattttgttatgatgttttgct

SEQ ID NO: 20495 - DNA, 830 bp, Glycine max
  Clone ID: LIB3242-173-C10_FLI
tgcaagtgaaaccaccccttctcagaaaaaggctagagggcgccctcctggctctggaaggaagcaacagctagctgctttaggtgaatggatgaatagttcagcagggttggccttttcacctcatgttatcactattggagttggggaggacattgtggcaaaattattgtcattatcacagcagagaccaagggctctgtgtatcatgtcgggcactgggacagtatcttcagtcactctgcggcagcctgcttctaccaatgccagtgtaacttttgagggacgattccaaatactatgcttgtctggttcttacttggttgccgaagatggtggacccttgaatagaactggtggcattagtgtttcactctctagccctgatggccatgttattggtggtggtgttgctgtgcttattgctggaagccccgtgcaggtgatgttgtgcagttttgtttatggcggctcaaagaccatgtctaaacaagcaaccactctcaaagatgaaagttcagagccacctcctcagcataacgacaagttagcttctccagccagtgctcctgctccacctggtcaaaacttcctccctctttctgcagcaaacctttggcctggatcccgaccagcagagctgaaaagcgcacacatgcatactggcatcgacttaactcatgggtgagatattatttcggaagaaacatttgcaaatttgtaaataactgttgtagtaaatgagcttgagtttgtgagcattgtggctgctttgcactaacatatgttataacaaatgaattattcggggttaagtgatgattcttggc

SEQ ID NO: 20496 - DNA, 1102 bp, Glycine max
  Clone ID: LIB3242-680-D10_FLI
caaatcccttttctcgttcttcccaattccaatttccaattctccggccatgtcaaccgcggcagcggcggggggcgacatggaggcgggtttcgcgaagctccagggcgaggactttgagtattacatgcagacctactccatcgtcctcggccgcaactccaagaagtccaccgtggacgtcgacctatccagcctcggtggtggcatgaacatctcccgccaccacgctcgcatcttctatgactttgcccgacgccgcttcgccctcgaggtcctcggcaagaatggctgcctcgtcgagggcgtcctccacctccccggcaacccccctgtcaagctcgattcccaagatctcctccagattggggacaaggagttctattttctcctgcccgttcgcagcatcttgggcgggcccgtgggcccgaggcattaccctaaccacgctactcccgggccggttgttcctcactataataattaccatttgggccccggcccggtgaagaaggcaccgcggagggagtattatgaggaggagtttgacgatgaagatgatgttggtggaaggaagatgcggagggatgggtatgatggctatggctacgctggtggcaagtcttcgctgtcagcacctatggataagaagtctgaaggcagatcccgagtagatcgagatgctgataatcttcagcttcagcagctggaagaaaaggatgtagtatcatctgtagctactgttctttctgatctctgcggtcctggagagtggatgcctatggagaaacttcataccgagctgttggagcaatatagcagtgtttggcaccacaacagagtgaggaggtatctcacatcagaagattggcctggtcctgaatccaaagggaagccttggtatggcttgcttatgctgttaaggaaatacccggagcattttgtcatcaacacaaggtccaagggccgtgtcacccatgagtttgtttctcttgtctctcttctatcgtgacctcgttgcccccgtccccaaaaactcaaactggaaagaaatagctattagccgtggttgcttctaaacagtgatatatgatttagctcc

SEQ ID NO: 20497 - DNA, 560 bp, Glycine max
  Clone ID: LIB3242-680-E6_FLI
gttttcccctctctctctctctctctctcttccaaccttttctctgtttcttctaaaagtctcagcacagcataacataacccttcttcatcttcttcttatgtgattgacttgtgtccaccacggtgacccatttctgtatcttctggtgaaaagctaatttgttcactctaataggtgtacagtgctaaagggtaaactttgaaacctagcttcctagttgaatcatcagaagcttataagtcgaatccatatttttctggacgtttagactttctttgatttccctgggaaatgatgatgatgcttgaagatatgggattttgtggggatttggatatgttttctgctccccttggagaaggggatattaccgcccggcaaactgagccagaggtgatagttgaggatgattatagtgatgaagaaatcgatgtagatgagctcgagaggaggatgtggagggacaaaatgcgtctcaagcgattgaaggagcaaagtaaacctaaggaaggatttgatgcagtcaagcagaggcagtcccaagaacaggcaagaag

SEQ ID NO: 20498 - DNA, 2094 bp, Glycine max
  Clone ID: LIB3242-680-G5_FLI
tggcatcttcttctggtagtttagacacctctgcaagtgcaaactccttcaccaacttcaccttctccacacaccctttcatgaccacttctttctctgaccttcttgcttctcccacagacaacaacaaaccaccacatggtggtggtggtggtttgtctgagagaactggctctggtgtccccaaattcaagtccacaccaccaccttctctgcctctctctccccctcccatttctccttcttcctacttttctattcctcctggtttgagccctgctgagcttcttgactcacctgttctccttaactcttccaacattctgccatctccaacaactggagcatttgttgctcggagcttcaattggaagagcagttccggggggaaccagcgaattgtcaaagaagaagacaaaggcttctcaaatttctcctttcaaacccaacaaggacctcctgcttcatccacagcaacatatcagtcttcaaatgtcacagttcaaacacaacagccatggagttatcaggagaccacaaagcaggataatttttcttcaggaaagagcatgatgaaaactgaaaaatcttcatccatgcaaagtttttcccctgagattgctagtgtccaaaataatcatagcaatgggtttcaatcggattatggcaattaccccccacaatctcagaccttaagcagaaggtcagatgatgggtacaattggaggaaatatggccaaaaacaagtgaagggaagtgaaaatccaagaagttattacaaatgcacataccccaactgccctacaaagaagaaggttgagaggtctttagatggacaaattactgagatcgtttataagggtactcataaccatcctaagcctcaaaatactaggagaaactcatcaaattcctcttctcttgcaatccctcattcaaatcccatcagcgctgaaatcccagatcaatcctatgccacacatggaagtggacaaatggattcagctgccaccccagaaaactcatcaatatcaattggagatgatgattttgagcagagttctcaaaagtgtaaatcaggaggggatgaatatgatgaagatgaacctgatgccaaaagatggaaaattgaaggtgaaaatgagggtatgtctgcccctggaagtagaacagtaagagaacctagagttgtagttcagacaaccagtgacattgatatcctagatgatgggtatagatggagaaaatacgggcagaaagtagtgaagggcaatccaaatccaaggagttactacaagtgtacacacccaggatgtccagtgaggaagcatgtggaaagagcttcacatgacctaagggctgtgatcacaacctatgaggggaagcacaaccatgatgttcctgcagctcgtggcagtggcagccattctgttaacagaccaatgccaaacaatgcttcaaaccctaccaacactgcagccactgccataagtcccttgcaagtgatccaacacagtgacaattcccatcagaaccaaagatctcaagcaccaccagaggggcaatcacccttcaccctagagatgctacaaagtccaggaagttttggattctcagggtttgggaatccaatgcaatcttacatgaatcagcagcaacaacaactatctgacaatgttttctcttccagagccaaggaggagcctagagatgacatgttccttgagtctctactatgctgaaggaatttctttttggtagctatggaaggttggaaattttggaagggggggactaggatttattggacaaataaggttcattccatttattgcattttttggtttgtttttgttgtaaattttatacagccacacaggattggtatagtatatatttcataactgttgtatgtttttacacatggtgttggtgaaattttttgattactttggggtttctcttttagttgggaggagaaccttatgttaatcttttgtaagattctgttaattttttcctgtcttcacaattgttcactatcaaaatagtaaagtttcacaagaaatgtgaattatttttgctaaacatgat

SEQ ID NO: 20499 - DNA, 846 bp, Glycine max
  Clone ID: LIB3242-681-C2_FLI
tgggaaggtccccttgctgtgagaaagcacacacaaacaaaggtgcatggaccaaagaagaagatcatcgcctcatttcttacattagagctcacggtgaaggctgctggcgctctctccccaaagccgccggccttctccgttgcggcaagagctgtcgtctccgctggatcaactatctccgccctgacctcaagcgcggcaatttctccctcgaagaagaccaactcatcatcaaactccacagcctccttggcaacaagtggtctctaattgctggtagattgcccggtagaactgacaatgagatcaagaattactggaatactcacatacgcaggaagcttctgagcagaggtattgaccctgccactcacaggcctctcaacgattcttctcatcaagaacctgctgctgtctctgcccctcctaaacatcaagagtcctttcaccatgaacgctgccctgacttgaaccttgagctaaccattagtcctccccatcatcctcaacctgatcatccgcacttgaagacccttgtgacaaactcaaacctttgctttccctgcagtctgggtttgcataatagcaaagattgtagctgtgccctccacactagtactgccaacgctactgctactggctatgatttcttggccttgaaaaccaccgtcgttttggattacagaaccttgcacatgaaatgaaatcatattactgaaatctctctctttctttctttctttcttttcttctctaatataatttcttacttacttacttacttacttacttacttgttaatggttgcaaatgataaaaaagttccagccagtacagttgaac

SEQ ID NO: 20500 - DNA, 1357 bp, Zea mays
  Clone ID: LIB3245-395-F8_FLI
ccgacggtagcaaatgaacctcactcagatcggaggggagaaactaggctagttggtctggtgcccctggcactctgcacctgcagtttccttctccgggatctcaattctcatctgggagagggcgggcgagatccattccagtcgcccccattcactccccttcctcgtccgtcctcttcctccctccgatccaccgctctccctacccgccgggccgccgctaccgcgagcgagcggagatctctctcctcgaacgggggggaggaagatgctcaccaagttcgagaccaagagcaaccgggtcaagggcctcgccttccacccgcgccgcccatggatcctgtccagcctccatagcggagtcgtccagatgtgggactaccgcatgggcaccctcctcaaccgcttcgacgagcacgacgggcccgtcaggggcgtccactttcacgccacgcagccgctcttcgtgtccggaggtgacgattacaagattaaggtctggaattacaagactcaacgctgcctattcacacttcatgggcacctcgactacattcgcactgtgcaattccaccatgagtgcccatggatcgtaagtgctagcgacgatcagacaatccggatctggaattggcagtcacgcacatgtgtggccgtgctaactgggcataaccactatgtcatgtgtgcctccttccatcccaaagaggatctggttgtatcagcatcacttgatcagaccgtgcgtgtctgggatattggggctctgagaaagaagtcagcatcacctgcagatgacatcctccgtctcactcagatgaacacagatctatttggaggtattgatgctgtagtcaaatatgtcttggaaggccatgaccgcggggtcaactgggcctcatttcatcccactttgcctctcattgtttccggggcagatgaccggcaggtgaagatatggagaatgaacgatgttatcttacctcctgctgtccgcatcttcagcagcaccatctcgcaatgatgtctggatgtctcgatctggaggggatgaaacaattcactgaacaccaaacttatcaacgccctccatggcattccaaattttcgtctggaggggattcatcttggtcttgtctcaattatcgcagctgcgttttcagctctgttttgtaaacatattgatgtacgaaagctgatgtgagtgctggttcactgaaaccgattttctgttatggcatgccattttaatctctacagtttcagtatattgcacagtagattgtaaacacttaaaatttgattgtaccgaggattgagaccagtgttttaacactggaaaattatgattgat

SEQ ID NO: 20501 - DNA, 1361 bp, Zea mays
  Clone ID: LIB3279-006-F6_FLI
gtcagcggccacatcagcgagaaaatgttcatgaaaggctacggcggcaacctcggcaagtcctatctgaaggccaacatgctcgccgcggaggcagtgagcaacatccggacggtggctgccttctgctccgaggagaaggtgataaagctctacgcggacgagctcagggagccttctaagaggtccttccggcgaggccagggcgccggcctcttttacggagtctcccagttcttcctcttctcatcctacgcactggcgttatggtatggttcagtgctgatgagcaaggaattggccagcttcaagtccgtgatgaagtccttcatggtgctcatagtgacggcgctggccatgggggagacactggcaatggcacctgatatcatcaaagggaaccagatggcgtcctcggtgttcgagatcctggaccgtaagaccgacgtccggatcgacacaggtgaggacatcaagagggtcgaggggctgatcgagctgcgcggcatcgagttccggtacccgtcgaggcccgacgtgaccgtgttcaagggacttgacctgctgatgaaggctggcaagagcatggcgcttgtcggcatgagcggctccggcaagagtaccgtgctgtcgctcatcctccgcttctacgacccgatcgccggaagagtcttgatcgatgggaaggacgtcaagaagcttaagctcaagtgtctcaggaaacacatcggcctggtccagcaagagccggcgctgttcgcgacgacgatctacgacaacatcctgtatggcaaggacggggccacggaggccgaggtcgtcgaggcggccaagctggcgaacgcgcactcgttcatcagctcgctgccggaggggtacaagaccaaggtcggggagcgcggcgtgcagctgtcgggcgggcagaagcagcgcatcgcgatcgcgcgcgccatcgtgaaggacccggccatcctgctgctggacgaggcgacgagcgcgctggacgtggagtcggagcgcgtcgtgcagcaggcgctgaacagggtgatgaggaaccggaccaccgtgatggtggcgcaccggctgtccacggtcaagaacgccgacgtcatctcggtgctgcaggacggcaagatcatagagcagggggcgcaccagcacctgatcgaggacaagaacggcgcctaccacaagctcgtcagcttgcagcagcagcaacagatgcagacgcagcagagctcatcagaagacatttgaataagatcgtgcgtttctgtatcttgctgtggctttgtctttcttgggcttttgtaaaagatctgcgctggttatcttttcaatgaaagggagtgttcagaatt

SEQ ID NO: 20502 - DNA, 661 bp, Zea mays
  Clone ID: LIB3279-008-A1_FLI
cgcgcgtcgagcgctggctcctcggggaggaggtgaagaacatcgtggcctgcgacggcgcggaccggcgggagcggcacgagcgcctggaccgctgggcggcgcggatggagggcgccggcttcgcccgcgtcccgctcagctactacgcgctgctgcaggcccggcgggcggcgcaggggctgggctgcgacgggttcaaggtgcgggaggagaagggcgccttcttcctctgctggcaggagcgcgccatcttctccgtctccgcctggcgcggccgtcgcttcgactgatggaggaacgcgtcgacgccttcccgtatttgtgcggaggaggagacgggccgcccgtcgtggcgttgcgcgtcaggtggccgtcacgcacgttggggcttcttttggtcgttttgtgtgttcagtttacgccgtatctagttagatttcaatcaggtttgttcatagtgtacccctgccgctctccaatttggatggatggaatctcatgcttgtttggatcagtcagtccttttagatctgttaatgtaacaactagagctgcttaacagctactatctcactcggtcccggtcccggtcctataacaagcgtggtaatgtacttgtggagtttcaaattttctgacaattatggacatttgtaac

SEQ ID NO: 20503 - DNA, 690 bp, Zea mays
  Clone ID: LIB3279-008-B12_FLI
ctccggggaagcgaggcaaggccaaaggggcggcgccgccgccgcccaccgcggcggcgagtaccggagctgtagggttccctggctgcctccgcctgatgccgccgtcgaccgtggccatatctatacacgccaagcccggctccaaggtcgccaccatcacagagattggggacgaggcggtgggcgtgcagatcgacgcgccggcgagggatggcgaagccaacgccgcgcttgtcgactttatcagctcggtacttggggtgaagaaaagagaagtgtctataggctcgggttctaaatcgagggaaaaggttgtgctggtacaagatgcgactcttgaaggtgtctacgatgctctgaagaagtcttgtaattgtgcatgagcttgcaaacacaagttagaaaatgaagtgagacgaggctgaattgttcgttcttggttgattttgtgacaagtggatcacgggggatcgaagggaattgagggggaaatgaactaattttcccctcaatcctctccgatcctcccgtgatccctggtcatcaaatcagctctaagctgtcagaataataatgcatatatgtcaatgcgatgatggtatagggaatgcagatgcaccagacattactgaaccttggtttgtatggctatctgcattgcacccgtggagacacgtacgtgctgac

SEQ ID NO: 20504 - DNA, 649 bp, Zea mays
  Clone ID: LIB3279-020-E8_FLI
ggagagcagcgcggcggcccgggcgccggagcctggagggtaggggaagagaagagaagaggcgatggcgtcaatcgggtcttccaacatcggattccagctgctgaagaagtctggttggaaggagggcactggccttggagcgcaggagcagggaaggctggaacctgtagagactcgtgttaagaataacaagcgtggtataggttctaaagaaccaaaaccacagcctaaggttggggatgacattgaaacacatcctcaaaagcccaaggaaatgcaatcaaagaaaagggcaaaattagctgcaaagaggataagaaaaatgcaagaagaggagaagcgcttgaaagagaaggaattcgagatggcttttttcagggaattttggcctgataatgtgtaaggcagaaacttcaacacttgacaatgtagctgctgactttgcctgatatagtggatgtataggcttgcaaaacgcttggcctacaaaatgttacccatccattccgtggatgatttcacacatgatttgtggctagggttggcacaaagctattcatccatgtagtggacaaatccagtgtagaattgcccatgctatgtgatcttgtaatttttatacattataaatcttgttttttttgtt

SEQ ID NO: 20505 - DNA, 1519 bp, Zea mays
  Clone ID: LIB3279-020-F11_FLI
acaaagacatcaattatagcatggaatccagtgcttctgatagaagctcatctgggccatcagagaagcagctgtatgacaaacaagggaagggtatattccatcctgtttgtggggtcaagactcggaaagtcactgcagatgaagctgctgctatagtaatggcagctactcgaggactgggtgctgcaaatgactcacttaacaccatgaaaggaaccaaggacaatgttcgcacccatgttagtaatgatccttcttccagctttggaagtttctcatctttacaggaccgagatgcactgtccaaacacatttcaaatagtgatgttgatgcttcacttacaagtagtggacagccccaaagggaaggttttggaatcattgacgatgattggattgcaaacactattgcaaaagctgctgctgcagcagcttccaaagatgcagattcttcggaagcttccatgacaaaggaacagaagctgaaagctgataggcttcgccgtgcgaagatgtttgctgcaatcattaagagtggagacaacaagatgaatgatttagctgcagcatcgaacccaactagtgaagctgccaaggccattcctgatatgaatgcctctggacttgatctgcaatctgtggctaaggaacgtgaaggcagtagctctgttctgtttgaccatgaggggccaaacttgacaaagcatagtaaagactctgatgatgaacagaacagagtgcggaagtatagaaagaaacaccaagaatccgacgaggaaaaatatgaatctgaggatagctataagcactcgaggaagaagcatcgcctagagcattcaagaggccagagcaaggatgttcacaaacataagcacaagagtcactccaatgacagggaatccagacatcatagacaccattgtagctcttcggaagatgagcatgagcatgaacgttggagttccaaatcaaggcataggcatagagatgatcaccgctactctgacgaggaacacactgatgaggaacacaggaggtcacacaagcatcggagggagcatcactccacttctaaaaggaagcacgaggaagactgataccaggttcgcctgaagtgtcgccgtctagatcaggtgccaagtttgaatcagacaatctgtctgatgacactgcacaaatcaactcagggaacaactgaagtgccgagtaaaccgagagcaaaaatcagagcaacatactgtaatattttgtatcgcagcggtctaacattatgtccttaggcctctgttttgtagccaactgctctttcgatttctgtatttgcttcgaacgttctaactaggtgtctgtccatcttatttgaaatcagtgacctgctcgccaagttctaactacatgctggcttttctgatgcatgcatagctttgttatttcaagtggtctacgtgtagcgtcatactacctccgtcccaaatcaaaattttgttttagttaattaatggttgatgtatgtgtt

SEQ ID NO: 20506 - DNA, 1111 bp, Zea mays
  Clone ID: LIB3279-020-F5_FLI
ccgggatgcagcagccacaaccattattcttgttccactgaccactgcatcaggtccaagtccaactctccaagcggcaagcgccatgccttcttccgcgcaggttctgctctgcctcgccgccgtgctcgcggcggcggcggccaccaccgccgaggcgcactcgcagtgcctggacaacccgccggaccggtccatccacggccgccagctggccgaggccggcgaggtcgtccacgacctccccggtggcctcagggcctacgtcagcggcgccgcgagctcgagcagcgccgtcgtcctcgcctccgacgtcttcgggtacgaggcgccattgctcagacagatagcagacaaggttgcaaaggcagggtacttcgtcgtcgtgcccgatttcttgaagggagactacttagacgacaagaaaaactttacagaatggctcgaggctcactctccggtgaaagctgcggaagacgctaagccactgttcgccgctttgaagaaggaagggaagtccgtcgcggtgggaggctactgctggggagggaagctgagcgtggaggtggggaagaccagcgacgtcaaagctgtgtgcctttcgcacccgtacagcgtcactgccgacgacatgaaagaggtgaaatggccgatcgagatcctgggggcccagaacgacacgaccacgccgccgaaagaagtgtaccggttcgtgcatgtgctgcgtgaaagacacgaggttccctactacgccaagatcttccagggagtcgagcacgggttcgcctgcaggtacaacaccaccgaccctttcgccgtcaagaccgcagagacggccctcgcctacatggtcagctggttcaacaagcacctcaactgaatcaagcctgcactgcacccaccagactaaattcaataaaccacagcagtgctgtgatattttgtttggattcatggctccccagattgatttgtcatggctaagacctctactactgtaatttccctcattttttgtctcttcaaactctctgtattctttttttttttttttttgcttttttatgatcgcaataaagttcagtaggggtatacccctcgtgtttgcttc

SEQ ID NO: 20507 - DNA, 614 bp, Zea mays
  Clone ID: LIB3279-023-E5_FLI
caatgatccggcgcctcctgaccgagggcgacctggtgatctgccccgaggggacgacgtgccgcgagccgttcctgctccgtttctcggcgctgttcgcggagctgacggacgagatcgtgccggtggccatggagaaccagatgagcatgttccacgggacaacggcgcgcgggtggaaggggttggaccccttctacttcttcatgaacccgagccccgggtacgtggtcacgttcctcaacaagctcccagccgagctcacctgcagcggcggcaagagcagccacgaggtggccaactacatccagcggctcatcgcgtccacgctgtcctacgagtgcaccagcttcacccgcaaggacaagtacaaggcgctcgccggcaacgatggcaccgtcgtgtccaagcccaacatcgacaaaaacaaggccatggcctgctagcgtagcacacgtactgtggtttgtggtggaagcctaatgggcctcggattaaaaggccaataagctgcatcgtacgcaggcttccgtgctacatgttttcgcacgtagcagatgcgtgcgtctgtaattgttttttttttctgaaccggagggagggagggttttatt

SEQ ID NO: 20508 - DNA, 1313 bp, Zea mays
  Clone ID: LIB3279-023-E7_FLI
cccgtgcgctccaccgcccatctctcctcgctacggcggcggcgctgctgctgctcattctccctccatcagcagcagcagcagtgccggcgcctgctctcttcatcttcggagactccctcgtggatgcgggcaacaacgactacctcgtgaccctttccaaggccaacggaccaccgtacggcatcgacttcgaatcctccggcggcaacggcaagccgacgggaaggttcacgaacgggatgaccatcgcagatatcatgggtgagtccctggggcagaaatctctcgctccacccttcctggctccgaactcgagtgctgcgatcaccagcagcgggatcaactatggctctggttcttctggcatatttgacgataccggttccttctatatcggaaggattccgctagggcagcaagtcagctacttcgcaaacaccaggtcacagatgctggagaccatggacgaggaagccgtagccgatttcttcagcaaggctctctttgttatagtagcagggtccaacgacatcttggagtttctttcgccgtcagtaccgttcctcggacgagagaagcctgatgacccatcgcacttccaggacgcactggtttccaacctgacattctatctcaaggagctgagtgagctgggggctaggaagttcgtcgtgtccgacgtcgggctctcggctgtataccctacgtccgtgctctggagttcatgcccgcggggcagtgctcggcgtcggcgaatcgagtcaccgaaggctacaacaggaagctgaggaggatggtggagaagatgaaccgggagatgggtccggagagcaaattcgtgtacacggacacgtacaggatcgttatggcgatcattcagaaccaccgccaatatggtttcgacgacgcgctggacccgtgctgcggcggcagcttccctttgcctccgttcctctgcattggagccgtcgccaatcgctccagctcgacgctgtgcagcgaccgctccaagtacgtgttctgggatgcgttccacccgaccgaagccgccaacctcatcgtcgccggcaaactcctcgacggcgacgcggctgccgcctggcctatcaatgtccgcgaactgtcccagtacgagcacaaatgattgatgtcgacgacgcgcgcgatgtgaaggccggctgaacgattcattggttttgtgtccttgctgtagtttcgtctgccttgttggggttttctaggctaggcttttatttgcttcaatttcgtatggttgactaggactgcgtgcaaattggtcaatttattcc

SEQ ID NO: 20509 - DNA, 1133 bp, Zea mays
  Clone ID: LIB3279-023-E8_FLI
caaaaacccgccactctcagatccgcacagcgacgccgccagccagacccgatcccctccctcgctagggttttcgtccccgcgccgccgcgctcccggatcccaccgaaacaaccatggccggcggtcccgcggcggtgtcgttcctgaccaacatcgcgaaggtggctgcggggctcggagccgcggcctcgctcgcctccgcgtcgctctacaccgtcgacggcggcgagcgcgccgtcatcttcgaccgtttccgcggggtgctcccggagaccgtcggcgagggcacccatttcctcgtgccctggctgcagaagcccttcatcttcgacatccgcacgcgcccgcacaacttctcctccaactcggggaccaaggacctgcagatggtcaacctcacgctccgtctcctctcccgccccgacgtccagcacctccccaccatcttcacctccctcggactcgagtacgacgacaaagtgctcccctccatcggcaacgaggtgctcaaggccgtcgtcgcccagttcaatgccgaccagctcctcaccgaccgcccccacgtctccgccctcgtccgcgacgctctcatccgccgcgcccgcgagttcaacatcatcctcgacgacgtcgccatcacccacctctcctatggtatcgagttctcgctggccgttgagaagaagcaggtcgcgcagcaggaggccgagcgctccaagttcctcgtcgccaaggcggagcaggagaggcgggcggccatcgtgcgcgctgagggagagagcgagtccgcgcgcctcatctctgaggccacggcgatggctgggacagggctgatcgagctcaggaggatcgaggcggccaaggagattgccgcagagctggctcgctcaccgaatgtggcatacattccttctggggaaaacggaaagatgctgcttggtctcaatgctactggatttggccggtgattcactgtttttttagtctgcttgtgctatgtgctgatgcatgactaaaacggaggttcgaactttgaaggacagtgatatctgctatccttgcttatgttaagttttccttgtcttggaactaaatgtgtctgttgtgctccaaataagttttggtttttg

SEQ ID NO: 20510 - DNA, 1627 bp, Zea mays
  Clone ID: LIB3279-035-B7_FLI
cgaacgcctcctccctccctggttccgttggctcttgcaccagcaatggcggcttcttggagagccgtggcgctgtcggtcgtcacgctggcctggctccttggcggtggcgcgtgggcgttcccggcggaggatttggtcacgcggctgccggggcagccgccggtaacgttcaggcagttcgcggggtacgtggacgtggacgtcaaggccggcaggagcctcttctactacttcgccgaggcgcaggagaacgccgccgccaagccgctcacgctgtggctcaatggaggtccaggctgttcttctattggaggcggtgctttcacagagctagggccattttaccccagaggagatggtcgaggcctcaggttgaacaagaagtcatggaacaaagcgtccaatcttctgttcgtggaatcgccggctggggttgggtggtcttattccaacacttcatcggactacatcaccggagatgcgcggacagctaatgacatgctccggtttttgttgggatggtacgccaagtttcctgagtacagatccagagctctattcctcactggagagagctacgcagggcactatataccacagatcgctgatgcacttgtcacccataacgagaggtccaagggtttcaagttcaatgttaagggagtcgctatcgggaatccgcttctgaagcttgacagggacgtcccggcaacctacgagtatttctggtcccacggcatgatctccgacgagacattcctagcgatcagccacagctgcgatttcgaggattacaccttcaacgacagcccccacaacgagagcaagccgtgcaacgatgccatcgcagaagccaacgccgtagttggagactacgtcaacaactacgatgtcattcttgacgtctgctacccatcgattgtgatgcaggagctacggttgcgacagtttgcgacaaagatcagtgtgggagtggatgtctgcatgtcctacgaaaggttcttctatttcaacctaccagaggtgcagcaggccctgcacgctaacaggacgcacttgaagtaccaatggagcatgtgcagcgatttcctcaactacagcaacaccgacggcaacatcgacatgctgcctacgctccaaagaatcgttgagcgcaagataccactctgggtcttcagtggcgatcaagactcggtggtgccattgttgggcagccggtcccttgtgcgagagctagcgcacaccatggggctgcatgtcaccgtcccctacagcacctggttccgcaaaggccaggttggaggctgggtgacggagtatggcaacttcctaaccttcgccacagtgcgaggtgcatctcacatggtgccgttcgcacagccggaccgggccctcgggctgtttcgatcgattgtactcgggcggagactaccaaacgcaaccagtcccccaattggctgaagtgtatctatctacaaatgaaggtggagatatagaaaaaaggttgcttagggtttttcttttttcctttcagttatgttatagtagattagttcataaacatgtattggatgttgaataagttctttattgtttataaagagcagaaaataatactattatt

SEQ ID NO: 20511 - DNA, 238 bp, Zea mays
  Clone ID: LIB3279-035-C8_FLI
cgttgatgaagatgcaataaactgcggttggccattgctggtggatggaactgcaaggtaaataatgtggtgacttactgcttctggtgtggttgcatgtgctccatgccacagaggatcacccaaccgaagcttacataggcaatctgacattggtttttagtgcccgtacataccttgtacatatagtttttctctccaacacaaataggtggtttgttttaatttcttcatcgtc

SEQ ID NO: 20512 - DNA, 1738 bp, Zea mays
  Clone ID: LIB3279-037-D1_FLI
gtcatggccatcggagaggcttgtgattcaagtgctggacgactccacgaaccccgccatcagggagctggtggaggtggagtgcgcgcggtgggcgcgcaagggcgtgcgcatctgctacgagaaccgcagcaaccgcaacgggtacaaggcgggcgccatgcgcgagggcctcaagaagcactacgccagggactgcgagttcgtggccatcttcgacgccgacttccagccggactccgacttcctccgccgcaccgtgccgctgctgcagcgggaccccggggtggggctggtgcaggcgcgctggcgctacgtcaacgccgacgagtgcatcctcacgcgcatccaggagatgtccctcaactaccacttcgccgtggagcaggaggtgggctccgcctgccacgccttcttcggcttcaacggtacggccggggtgtggcgcgtcgccacgctggcggacgcgggcggctggaaggagcgcaccaccgtggaggacatggacctggccgtgcgcgccagcctccgcggctggcgcttcgtctacgtgggcgacctggtcgtgcgcaacgagctgcccagcaccttcaaggcgtaccgctaccagcagcaccggtggtcgtgcggccccgccaacctgttccgcaaggtgctcccggagatcctccacagcgaccgggtgtcgctggggaagaagttccacctcctctacgccttcttcttcgtcaggaaggtggtggcgcatctcgtcaccttcctcttctactgcgtcgtcatcccggcctgcgtgctggtgcagggagacgtgcacctgcccaagtacgtggccatgtacgtgccggcgctcatcacgctgctcaacgccgcctgcacacccaggtcctgccacctgctcatcttctggatcctcttcgagaacgtcatgtccatgcaccgctccaaggccgctgtcatcggcctgctggaggccagccgcgccaacgagtgggtggtcaccgacaagctcggcagtagcaaggcagctgctgcggtagtcgcgaagaagaagaaacatcagctggtccggagcaggtgctgcagcacgagacgggagatgcatgtgctggagctcgcgatgggggcgtgcttgctctattgcgctgtctacgacattgtcttcttcggccgcgaccactactacatgtacctgctcctgcaatcggcggcggcctttatcgtcggcttcggctacgttggcacctcggcaccctcctgagtctcatgagagtcaccaacacagcctcacgactgtcagtgctagggttaggctttgctgctagagataggatggcgcttgttatggtaaggttgatgagtgtagtggcttggcaccttcaaagaaaccttcagccacttctcatcctatcaaattctctccacctaaatctgccgtcccagatgtgagagatagaatgtttgaggagcctctaagagcaccacctcaaaaacaagtgtggtttctcaaacctaaccatctaaagaagccacttgataccttgcccgacatatctagtgatcccctttctagagcaccacaaccacccaaaatgaccctttcccacaaaaagactccacttaagagagaggtgaggtaccactaagagtattcactttgttttgttaggaggaagaaagatgagagggtagtagggacatgcaacactcttctcatgatgtgcatgatcctcctattcag

SEQ ID NO: 20513 - DNA, 1541 bp, Zea mays
  Clone ID: LIB3239-017-G6_FLI
gatggagagaggcgatggcgggagcgggaggccgccggccgagaggaaggcggcgtggagggacggcgccgtcacctacttccacctcctcttctacatcgccatctccggcggccagatcttcttcaacaagtgggtcttatcctccaaagagatcaactttccctatcccgtggcactgactctgctgcacatggtcttctcctctgtagtgtgctttgcaatcacaaaagttttcaagatcataaagattgaggagggaatgactacagatatatatattacttcagtcattccaattggaggaatgtttgcaatgacactttggctagggaacagtgcgtacctctacatatctgtcgcatttgcacagatgttgaaggcaataatgcctgtagccgtgtttcttctgggagcagcatttggcctggaagaaatgagctataaaatgctttctatcatgtctgtcatcagtgttggagttattgtggcttctgttggtgaaattacaatcagttgggttggagtggtttaccagatgggtggagttgttgcggaagccctaagacttatcttcattgagatatttctgaagaaaaagggtgtcaagctcaacttgatatccatgatgtactatgttagcccttgcagtgctgtatgcctctttattccctggctgttcttagagaagccaaagatggatgatagtatttcatggaacttcccaccattcacattgttcttaaactgcctgtgcacctttgtactcaatatgtcggttttccttgtcatatcaaggactagtgcgctgacggctcgagttactggtgtcgtgagggattggtccgtagttttgctgtcagctgccatctttgctgatacacagcttaccttcataaacataattggttatgccatagccatagctggtgttgttgcgtataacaaccacaagctcaaggtaaaaccccaagcgaacccacagcaaggcgacgagaacaaggtcatctcaggaagcactcaagatgtggtgttatcagtgagctcagcaaaagaaacttcgtagcaccaaaagtagcacgattttgaaacaattttatttttcacaaaggagaattgtgctctctttcgttgggttggccagctctccttggactatacattctttttccttcccctgggtctggagggaagatattttgtacaatgatatgctcaagatgatgatacgctgccttcactgtcgtaatattgctgctcaaaaaagtgggagcacgccacagatggaaattaggccatgtaaagttgtgttttctcttgaactggtgtagcgactcatcaggtgctccaaaaatggcagccctgaatctttgtacatggttgcttggtggtggtcatgagatgtgatgtaaaacgatatatgtaagcctggcagatcaaagaattcaagatacgcaagtttctgtgtttttgaatccagcatttctcttgcgctgatagtttgcttgagatattgattctgcaatatatgtttttaaact

SEQ ID NO: 20514 - DNA, 1664 bp, Zea mays
  Clone ID: LIB3239-024-D11_FLI
gcggccgcctcggccgcctccgtcgtggcggacgaggcgaccatcgccgaggccgtggcggtgtgcgcggcggcgtacgagaagaagaccgggtggggcagcgacatcgggtgggtgtacggcacggtgacggaggacgtggtgacggggtaccggatgcacatcaaggggtggcggtcccgctactgctccatctacccgcacgccttcatcggcaccgcccccatcaacctgacggagcggctgttccaggtgctccgctggtcgacgggttccctggagatcttcttctcccggaacaacccgctgttcgggagcacgttcctgcacccgctgcagcgcgtggcgtacatcaacatcacgacgtacccgttcacggccatcttcctcatcttctacacgacggtgccggcgctgtcgttcgtgacggggcacttcatcgtgcagcggcccaccaccatgttctacgtgtacctggccatcgtgctgggcacgctgctgatcctggccgtcctggaggtgaagtgggcgggcgtgacggtgttcgagtggttcaggaacgggcagttctggatgacggccagctgctccgcgtacctggccgcggtgtgccaggtgctggtgaaggtggtgttcaggcgggacatctcgttcaagctgacgtcgaagcagcccgcgggggacgagaagaaggacccctacgcagacctgtacgtggtgcgctggacctggctcatggtgacgcccatcatcatcatcctcgtcaacatcatcggctccgccgtggccttcgccaaggtgctggacggcgagtggacgcactggctcaaggtggccggcggcgtcttcttcaacttctgggtgctcttccacctctaccctttcgccaagggcatcctggggaggcacggcaagacccccgtggtggtgctcgtctggtgggccttcaccttcgtcatcaccgccgtgctgtacatcaacatcccccacatccacgggccaggcggcaagcacggcggcgcgatcggaaggcacggcggcgacgcacaccaccatggcaagaagttcgacggctactacctctggccgtgaagcgccgagcagccagcatcgtcatgcatgcacatataccgcctgccctgatggtgacgatggtgagccgccaaggtgaagactgaagagtacgttcccgttcatccatccatcgtctccttagtactgctgcccggtgattagtcgatgaagagtgaaggtgaaggctacccacacacacacatttggtcgacgtacccgccaaaatttgaattttttttcttcccccttcttccttctcattcttttttcttttagttttgtccagaaatcgaaaggtgtgttgatttgatttagtttttttaattaccgtgccccgtggtaattaattatgtacgtacttatatatatatacattacgccgaagaggaaggagcactttgtataagagaggaatggggaacgtacttatgggtggggggccggggtgtcagcgtctgcctgtctgtactgtacatggcttagaggagtcacatgcagagagggagggccctggctttggggtggtattcttttggtacatggatcaagaataaattgaatttcattcttgttgtttggaaaagaggtgt

SEQ ID NO: 20515 - DNA, 2201 bp, Zea mays
  Clone ID: LIB3239-035-E12_FLI
agtgccgggcgcccgcggattctacctcccggggagctacccgcacaagtacaacgtcggggacgacctcaacgtgaaggtgaactccctcacctccatcgacaccgagatgcccttcagctactacagcctccccttttgcgagccacaagacggtgtcaaggacagcgccgagaacctcggcgagctcctcatgggcgaccgcatcgagaactcgccctaccgcttccgcatgtacaccaacgagtcagacgtcttcctctgccgctccccaccgctgggcgccgacgccttctctctcctcaagaagcgcatcgacgagatgtaccaggtcaacctcatcctagacaacctccccgccatccgctacaccaggaaggacgactacatcatgcgctggacggggtaccccgtcgggatccgcgtcggcgtcgactactacgtcttcaaccacctccagttcaccgtcctcgtccacaagtacgaggatgccaatgtcgcgcgcgtcataggcgccgccgacgccaccgacgccatcccctccggggctaaggatgccgcctcctcctcccctggatggatggtggtcgggttcgaggttgtgccctgcagtatcaagcacaacccagaggacgtcaagtcgcgcaagatgtacgacagctaccccagcaagatcaagtgcgacccgaccaccgtgtccatgagcatcaaggagaacgagcctattgtctacacctatgaggtgaacttcgtggaaagcgacatcaagtggccctccaggtgggatgcctacctcaagatggagggggccaaggtgcactggttctccattctcaactccctcatggtgattgccttccttgctggtattgtctttgtcattttgctgaggaccgtgaggcgtgatctcaccaagtacgaggagcttgacagtgaagcgcaggcccagatgaatgaggagctgtccggatggaagcttgtggtcagtgatgtgttccgtgcgccaagcaacccgatgctgctttgtatcatggttggggacggtgttcagatccttgggatggcggttgtgaccattctctttgctgcgctcgggttcatgtccccagcctcccgtggtactctgatcacgggcatgctgttcttctatctggtccttggaatcctggctggatatgttggtgttcgcgtatggaagacgatcaagtgtggggatcactctgggtgggtcgctgtgtcgtggcgggtggcttgcttcttccccggcattgcattcctgatcctgaccacactcaacttcctattgtggggaagccacagcactggtgccatccctttctcattgttcgttgtgctgcttctgctctggttctgcatctccgtgccgctcacgcttgttggcgggttccttggtgccaaggctccacatattgagtaccctgtccgcacgaaccagatccctcgtgaaatccctcctcagaagtacccatcctggttgttggttcttggtgctggcacactgcccttcggcaccctattcatcgagctcttcttcatcatgtcaagcatatggatgggtcgtgtgtactatgtctttgggttcctcttcgtcgtcttgctgctcctggttattgtctgtgctgaagtttccctggttctaacttacatgcacctgtgtgttgaggattggaagtggtggtggaagtcattcttctcatctggatcggtggcaatctacattttcttgtactccatcaactatcttatttttgacctcaaaagcctgagtgggccagtgtctgctaccctctacatcggttactcactcttcatggtgattgctatcatgctggcaactggcacagttgggtttatttcttcattctgcttcgtccactatcttttctcatcggtgaaagcagattaagtttcttcctgctgaggattcaagtcactcaattgagaggtgagcagaatggacagtgaaaagtttgtagtcacaaatcttagttcatgtcatcttttggtatacaaaagcctggacaactattgcaagggctactaggattcatcaatggatctgtggagaggtgtttgcagcttgcacgatgtaataggttgaattgctttattctcatgtggcgttgctatagttgtttttagattaccattactatatctcaatatgtatgctaagtacc

SEQ ID NO: 20516 - DNA, 1733 bp, Zea mays
  Clone ID: LIB3239-037-B2_FLI
gcccacttccctccctccaggctccagtccggtcctgatctctgtccagctagctagctagcgcctccagccgtccagccagcggcggcgcgacgattcttccctccccggccggaagcccccgcacgccgccgcccctgcagatcgaccatgatgaccgggagaacctgtcgttgctgaggtttgaggcgctgtgggaggcggagttcgcccaggactctctgctggtcttctccacggggaggacgccggtgagctacaagggcttgcggagggacaagcctctggtgacgccggacgtgaccatcatgtccgtggggaccgtgatagcgtacggcgaggagatggtccgtgacgtcggctgggaggagcggctggacagcgactgggacagggccgtcgtcgtggaggagacggctaggctgccccagttgacgcgcatgcagccggagaggaaccagggtccccataaggtgagcttcttcgtcgacaagcagggtgctcaggaagtgatggactatctccccaagaagctggagagacgtggggtggatgtgaagatagtctacagcagcgggaacgccctggacgtgttgccacgaggtgcaggcaaggggcaggcgctggtgtacctgctcaagaaactggattccaacgggaagccgcccaagaacaccctcgtctgtggcgactccggaaacgacgccgagctattcggtgtgccgtctgtacatggagtcatggtctgcaacgcccaagaggagctggtccagtggtaccaagagaacgcgagggacaatcctaggatcatccaggcgaccgagagatgcgctgccgggatcatgcaggccatcgggcacttggggctagggcccaacgtctctgcgagagaccttgttgggttccctgcttattatcccaacaacaacaagaagggggcagctgccaccgctaagcccgcagatgtggtggtgaggttctacgtcctctacgagaagtggcggaggggggagctccccagttcgaattatttttcttcttcgtcagccatgcgctacttgaaaagcatcactcatccgaacggtacaatcattcacccttgtggatcggagcgttctcttcacgcgtctgttgacgctctgctgagttcttgctacggggacaagaagaacttccgggtgtgggtggacaggctggtgacatcgcccatcggcacaagcagctggttggcgaggttcgatagctgggagatggaaggtggcgttcggtactgctgccgcactactattctgctcaacatcaagcctgagagtccagagggcctcgagctcacacacatccacaagacctgggtccaagggcactctgcagggccagggagtgcgctcgtcttctagactaaatcagtcaaacgcgaagcagcatgtcttgttcaattaatttccagagagaaagaatccatccaaatgtacgacagacagacagacagacagacagacatgcccaatgctgggtacttccatattccatatgtacaacaaaacaaaacaaaagatgtcccgatgctgggtacttctcatgaattattagctgaagctcttgtcttggatttttcatatttgcagaatgtagtttccagtgtggcccaatgccatcattcagaatgctagctgaaaagttagcgctgttatttgtacttcacaagaaaggaaaagagatacattttaggtttc

SEQ ID NO: 20517 - DNA, 1767 bp, Zea mays
  Clone ID: LIB3239-037-B9_FLI
tctcccccatccttctctctcacccatgccttcataaacagcaaagttggctagctggttatttgtatcaagatgaagtttgaagccaacacatccatttctcgctagtaagatcaagaaaaatccattgaagcctacttcctacctaaatcttcatggatccttggagtgaaagtgagggcaagagagcccatgatcctatcttcaaatgtttcagccaaaaccaaggtcaccatcacttcatggaaaggagcacagatgctgctgttgctctctctgagagatgtagatgcatctgggtttcaggtccaattatcgtgggtgcaggaccatcagggctcgctgctgctgcatgtctcaaggagaagggaatcagtagccttattcttgagcgctccagatgcctagcttccctctggcagctcaagacatatgatcgtctcagccttcatcttcctcggcaattctgtgagcttcctctcatgcctttccctgccgactatccgatatatccctcaaagcagcagtttgtagcctacctggagagctatgctgcaagttttggcatatgtcccacatacaatcgcacagtggtgtgcgcagagtatgatgaacagcttctgttatggcgtgtgaggacgcagacttctgacacaacgggagaggaggtggagtatgtatcccggtggcttattgtggcaactggtgagaatgctgaggccgtgcagccggatatcggtggtctacaagagttcccgggaacaatcatgcacaccagtgcatataaaagtggcagtgcattcactgggaagcgtgttctcgttgtcgggtgtggaaactccgggatggaggtgtgcctagacctctgcaaccacagtgccgagccccatattgttgtaagagatgctgtacacatcttgcccagggagatgcttggccactccacctttggtctgtcaatgtggctcctcaagtggctcccggtccacgttgtggaccgtgttcttctgtgcatagcgcgggccatgctcggggatactgctcggcttgggctaaagcggccggcctctggtcctcttcagctcaagtcactgtctggaaagaccccagttcttgacgtcggcacatttgcaaagatcaagtctggagatatcaaggtacgacctgccgtaagacaggtatcaggaagagcggtagaatttgcggacggtgagttggaggagttcgacgccattgtgcttgcgactggctacaagagcaatgtccccttctggttgaaggaccgagtgttattttctgaaaaagatggattgccaagaaaagcatttccgaacgggtggaagggtgagaagggcctgtactcggttgggttcacccggcgtggactgatgggcacctcggtcgatgccaggagggttgcccacgacgtcgagcagcaatggcggaaggccaaagggacgcatcgggacggcgttcctctacctctggtcgctgttgtttaccatggtgatgggttgtgattgtgagttgccaaagggtgtatgtacgtacgcatgcattctgctgcttgcttgtgtagtgctttgtatagggtattgtactgtcaatttctttttctttttttcttttggcgtgcgttcgttttgatgactaaccatcctacgtactataggggagggggtgaatactgaggtggccgtgttcttccaaagtcggggctcagttgacttggcctctagctactgataatgaaagaagcttgcctgg

SEQ ID NO: 20518 - DNA, 1113 bp, Zea mays
  Clone ID: LIB3239-037-D8_FLI
gctctgtactcccttggaggagcgggagcgattcttcctcctctctggatacctgacatcgtcgccgtggtcgtcgcaggtggacgccttcacggcggagccgttcaagggcaacccagccgcggtgtgcctcctcgaggacgccgccaaggccgccgacgagcggtggatgcagtccgtcgccgccgagttcaacatctccgagaccgccttcctcctccgggaaaagtcctccgcggccggcgccgtcccgctgttccagctccgatggttcacccccgtcgctgaggtggagctctgcggccacgccacgctggcttccgcccacttcctcttcacatccgtcctcgcggagcacgagaagctcgtcgagttctcgaccaagtccgggattcttacggccaaaaaggtccctgcgccgcagagcacgggcgtgtcgggcgaggggaagctgttcattgagctggatttccccacgattgaccttgttgattgccatccttccgagctgccggcaatccccgacaccctcaacggagcctccattgtcagcgttcacaagtcaacgacggccggtgacctcattgtggagctttcatcaggaaaggaggttgctgatatcattcctaacattcatgaaattgaaaagtgttccggcagaggaattattgttacagggccagcgcctgctggatctggctacgacttcttcacgcgttttttctgcccaaaatttggaatagatgaggatcccgtttgtggcagtgcacattgtgttttagcaccttactggggtgggaagctggggaaacacaaactgatagcgtttcaagcatcccctcggagtggaatactatacctggagttagaagctacaggcaggagagtgcgaattcagggagaagcggtcagtgtgatgactggcaccctcttagcataacccctgctcaatgaacatcctatgtcttcacttcagttgtgtggcatgatttctctgcagctaggaataaattaagtctcttttcacctgtccaaaggtgttagatacactgcttccagactatgaagcagagtgtatgaggatgtttcttttgaataaatcagtgggtgttc

SEQ ID NO: 20519 - DNA, 1368 bp, Zea mays
  Clone ID: LIB3239-038-D9_FLI
ctgttgtgcacatctgagtttgaaggccaattcacaacaaaaccctagctactgcttcgtctgccgaattccccctccgctcgcttcgcacgccgcccgtcgccgcggcggcgtctgcgattgtccctcccgctgcaaggagcacatgcttctcgccgcgccgttagcccgccgccgccaccaccggttcaccttcagctatgtcttctcaggtcgacaggcgcagccagtccgccgggaagcgcgcccgcaccgacggcagccggcgtgaggacgactgggtttgccccagctgcaagaacgtcaacttcgccttccgcaccacttgcaacatgcgcagctgcaaccagtccaggccagcagatcacacggccatgcaaaccccgcctcactatcccacgtcagggggttacatgggccctgggacgccaccatcgatgtaccttggtgggggcgctcccccatatggatcctcaatgtttaatgggcctgcggtgacacgctatggtattccgcaatttcctgggggttctgcgtattcatatggatatggtggtcccataccaatggggagcccctacgggccaatgcaaattgctgggccaactccatactctggtggaactatgatgacagcaggtggaatgtatggaattcccatggacaggtatgggccaatacctgctggtcctggtccaatgggcacaagggctggctcatattctgatgaaggttctcagaagaagcctgcaggagctggccgtgataatgattgggagtgtccaaattgccataacatcaactttggctttcgcacagtctgtaatatgagaaagtgcaacacacctagacctgcaaaccagggatctaagtctgatggtttaaggggctcaaaagcaaagatgccagagggcagttggaagtgtgagcagtgcaataacataaattatcctttccgaacaaaatgcaatcgtccccaatgtggagcagaaaagccatcacaaacaaacaatgtgaatggttcagcgacagatcaggacaatcagtgagtcctaggacagtaatgagggtcaagaaggtccagcgtcgtcgtcaaggttcagtctgaatgtggggtacatctctgtcagtagtcgctccagttgttacaagtttcttccccttgggaccttagtcgagttggcaatggagtcttgtcttccctaatcactacagataatggtcaagaacatcgttcttgcctttcctggctgagcttggttacttgtctttgttactacttactagtactctgggtaaagtgccatctgttatatgaatgccttttagttatctgtgtcatagaatatcactcatctgttatgaagt

SEQ ID NO: 20520 - DNA, 1644 bp, Glycine max
  Clone ID: LIB3242-006-H7_FLI
aagctacatatcatacatagcgaagatgtgtgttgttctcttcttcttgtgtgaagccaaagccacaacaacaaccattggaacaacccaacaacatagtgaacaacaaccttggtaataataaccatggagagcaccgaagactcatccacgagttcacagcaacaaccgaacctgccacccgggtttcggttccaccccacagacgaggagctcgtggttcattacctcaagaagaaagtagattctgttcctctccctgtttcaatcatcgctgatgttgatctctacaagtttgatccatgggaattaccagccaaagcatcgtttggggcggaagagtggtactttttcagcccgagagaaaggaagtacccgaatggcgcgaggccaaacagggctgcaacttcagggtattggaaagccacggggacagataagcctatatgtagtggaactcaaaaggttggggtgaagaaatctttggttttctatggagggaagccaccaaaaggggtaaaaaccgattggatcatgcatgagtaccgtgttactgaaaacaagccaaacaataggcctcctgggtgtgacttgggccacaagaaaaactccctaaggctggatgattgggtgttgtgccgaatctacaagaagggcaacacacaaaggtcacatgagagggacgattccattgatgacatgattggagaagtacctccttccatcaacgtgggccacatgagtgcgaggtttcacctttcaaggatgtccacgagctacagtggtgcattgttggaaaatgacagaaacacgttagaaggggtggttataggcaatggtagtgtgaatgggatcagcaatactaataatattacaagtgtcatatcatcatctcatcagtttggcacctcaaactccaaggcagagcttcttccttttgtcccttcaaacaacacttctaattcggcctccaaaagaacactctcatcactctattggaatgttgatgatcacaaacacttcaatttggacagtaatgggaatgtgagtgttttgaggacagatcaagagaataataataataataatggtacttctggctcctttgctactctgcttaaccagcttccacaaacaccttcattgccccaaatagatgggttacttcggacaccgtatcaaatacaagggaccaattggtatggttaattccattttgaggggtatgcttgatatgataatttcataattataatgcacaaggagatcaaattgaactaaggtgtggcaagggatcctcaacttgtgctagattgcaaggattttaaaagggtcattgagattgtggtttaattgttaggagaatggaagaatgttagagcacactaatcaatgttttctttcaaccatttgcaggtagctaagggcaattaataccacatgaggtgagggtgtaagaccttggaacttttagtttaattattatatagatcggtatagtaacatagataaagatagatatatagaagcatatttgcttgttttattagtgtgtaaagaaacaaaatgagggtaaaaactttcgagagaggataaaagaaagagttagccacagttctatatatatatactttgctttatgat

SEQ ID NO: 20521 - DNA, 848 bp, Glycine max
  Clone ID: LIB3242-009-C8_FLI
ctttctctctctgttcactttttctatcctcgaagcaagaaatggactctaacagcgtcgtttcttggccgaggatgccagaaaacatcaacggtttcggcctcaaacagaaccaatccgaagaggttcatgttttagccgttgatgacagcaccgttgatcgcaaagtcatcgaacacttgctcaaagtcttagcctgtaaagttactgctgtggatagtgggctgagagcactgcaattgcttggactattggacgagcagaaaataccctctgaaactaatggttttgtgggtttgaaggtagatctaatcatcacagactattgtatgcccggaatgaccggttatgaattactcaagagaatcaaggaatcatctactttcaaggaaacgcctgtggttattatgtcatctgaaaacgttttgccacgcatagacagatgtttggaggagggtgcagaggatttcatagtgaagccagtgaagttatctgatgtgaagcgtttgaaggattacatgacaacaaaggaggttaggggtgaattaagccaagaagagagggaagggatcaacaagaggaagctattggacacctctgatgtgtcgccatcatcaccaccgtccatttcctcatcaccacttccatcttcactcagctcagtgattgactctccaatcagacggcttaaaatgaccaacactgattgatatactctagcaatttgctgtttttcttttctcattcctgtaggcactactgctgcaatctttggatttgttgtttttcccttttagggttcaaattgcaattacctcctcgtttaattgtaacggtttttgttgcgc

SEQ ID NO: 20522 - DNA, 1481 bp, Glycine max; identical to SEQ ID NO: 8441
  Clone ID: LIB3242-010-A8_FLI

SEQ ID NO: 20523 - DNA, 1287 bp, Glycine max
  Clone ID: LIB3242-011-H8_FLI
gcaacataaaaaaaaaaaatagaaagaaaaatgatgctcggagaacaccatcgcgggaatccgacggtcctcgtgccaccgtggccagcccacgacgatccgacggctgagatgtactccgcgttcttaacaaacgacgtcaatgctggtgagtactctccgtaccatcttcaagaagcactaacggcgctgcagcgttttctgccgtcaaacgaaacggacgcagactcggactcctcggaggcggctcagcccgacgcggcggtggacgcgtacacgtgcgaccatttccgcatgtacgagttcaaggtccgtcgatgcgcacgtggcaggtcacacgactggacggagtgtccgtacgcgcatcccggcgagaaggcccgccgccgtgacccgcggaggttccactactctggcgtggcgtgcccggagttccgcaagggaaactgcaggaaaggcgacgcgtgcgagttcgcgcacggcgttttcgagtgctggctccatccggcgcgctaccggactcagccatgcaaggacggcacgagctgccggcggcgcgtgtgcttcttcgcgcacacgccggagcagctgcgcgtcctgccgatgcagagtccgcgtagcgtggcaaactcatcggagtcctacgacgggtctccgatgaggcaggtttcgttgtcgtcggcggcggcggcggcgttcatgtcttctccggcggcttctctctctccgccagagtcgccgccatcggtgaacgagatggtggcttctctgcgtaatttgcagcttgggaaaatgaaatcgatgcctcataatagaaacgtgtcggtcgggtcgccgaggggatcggtactccgaccgggttttttaagccttccaacaacgccaactcagcaaccggttcggtctggggtgaagtgttttgatgtttgggatgagagttttgaggaggaaccggttatggagagggtggagtcagggaggggaataagggctaagatgtttgagaagctcagcaaggagaattcactcgacgcctcggcttcgcctccggatcttgggtgggtctcggagcttgttaagtgagaagccagtccttgtaaatatggcatggctgaagagaagaagacaagaagacaagaatctcttttttgtatagttagcttactattattattatcatcatcatggttttaaacagcattcctcaacgcaatcaaggtatttggattcactgtaatacacaatctgtaattgaggctgcgtcagtcgcaattacctaccatttat

SEQ ID NO: 20524 - DNA, 1509 bp, Glycine max
  Clone ID: LIB3242-015-B2_FLI
acgacttaacccataatagttcttaaattcacatgtataatcgcttcatcgtcaaacagtcacttctcaccgtcactttagcagtctcttgcggtggcacaaactgtatcacgtttcaaaagactaacttggtgaccggtgaggtgttcctagttaccatacgaaagaggattttggtgtaggatgggatcgatagagaacgcttccaaaccaaggaaggaaaatccgaaatttgaattgccagcgggttttagatttcatccaacagatgaagaactcataaatcaatacctcacaaagaaggttgttgacaactgtttctgtgctatagccattggtgaggttgatttgaacaagtgtgagccatgggatttgcctgggttggctaaaatgggtgaaactgagtggtattttttctgtgtgagggacagaaaattcccaacaggtataaggactaatagggccactgatattggttattggaaagccacaggaaaagacaaggagataataatggagaatgcactcattgggatgaagaaaaccttggttttctacaagggaagagctcctaaaggtgaaaagacaaactgggttatgcatgaatataggttggaagggaaacataatcaacccaaacctggaaagagtgaatgggtgatttgtagagtctttgagaagagtcgttgtgggaagaaaatgcatgttccaaagtgtgggaggttcaacaacccctttggagaggaaccatcatcaggtgcttctctattgcctcctttgatggattcttctccatacaacagtgaaacaagaaccaccactgctggggagttgtctcaggtgacatgcttctctgatccaaatcaaactgaggatcagaacaacacacatgatgacattgttgatagcatggaaactcctattttgaacttctcacccttttcaaggcctgatgatgcatccactttggccaaagcaaccctttcttcagcctcaaaccaatcagcacagattgcacaccaaattggggactcacagttcccagattattgttatgcgcctcaagaaccgtccatgttgaggatgctgatggaaaaccatgaaccctgtgcgaagcaaactcagaaagaagagtttcctgagggaagagactttgatggagatatctcatctatgatatacagcagtgacatgataaacagaatgtttgggaatcaagaacgttcttcatcagcttctgcagggcctgtggacactgatttcctatggaattactgaaggttaaggaatattatttagtgttaagacagaaaatatgttaattatatttatattcatatgatacatacaggttggttacctgcaacttcatgaacttattgtaggaattatgggaaatgcatgaaattgaatttcccccctctggttgataactttgataaaaactagtgctgaatagtccatatgttatatatgatctgttaatctttattttcatcattgcagccc

SEQ ID NO: 20525 - DNA, 684 bp, Glycine max
  Clone ID: LIB3242-017-H7_FLI
ccacaaggtaggctggaccccgaagttatagatcttcttttagagcttgctgatgacttcattgattctgcaactacacatggttgcattttggcgaaacatagaaaatcgtcaactttggagtccaaggatttattgctacacctagagaaattgggatttaacaattcccggatactcaagtgaagagaagaagaatcagagcaaacctcaattaaatgaccttcacaagaggcgcctagatatggttcgcacattgatggaatcctcatcctctgagtcgagtattaacagctctaaagagatgagtagacagggcatttctaatcctccccctgtaggaacccatcatctagtaagacccttgagtccagagcagttggtttctcatgcagctggttctcaaatgctacagcagatgacaaggttttaatgaacctctgattttggtcttcatgctgctaggtttgattgcctgtatgcaggtctgtgaagagatcgcttgctgaagctgattagcatacaagggaactgtaattacttagtatttagacatgaaaaatagttgttaaaaggatcccagttattgactacctcttgttatttgccccaacccctatatagtcatctcgtttcgctgtttgagcctaattaattaattaattaattatggatttttaatgt

SEQ ID NO: 20526 - DNA, 1648 bp, Glycine max
  Clone ID: LIB3242-020-E5_FLI
gggtccttagttctgtttctctttcttctctctgttctctcaaccaagttctcaattcaatcttcttcacccttttgatctgctaattctcaaggtattcaaaattgggaggttttcgtttgaattgtgatgtccaagccactgctaggcataggggaggaggaaggtcaaagcaatgtcactttgttggtttcttcctcagtcatcatggaaagtgtgtgcctgaatagctcaaaattgaaagagcgcaactacatggggttatctgattgttcatctgtggacagctccgcgccgtccttctcagatgagactaaaagcaatctgaaccttaaggctactgagctgagactggggcttccgggattgcagtctcccgaacgagattcagatctttgcttgagaagttcaattcagtttgatgaaaaaccactgtttcctttgcatcctgctactgatgatcaccattcctcatcaaagcctgctgttttgggtaacaaaagagggttctcagatgtcatgagtggattcgccgaggagaaattgcttgttagttctgaggtcaacacaatattgtcaccaaggccttcttctaatgtggcattgaaaccaagctctatgcttgagaatgttggggctcagcaatccaaagccaaagaactcgcaacagcgaaggttggtcttgagaggtctcatgttttcaatgatagcagaacaaatctgaatgattctgctaataacaatagcagtgcaccagctaccaaggcacaggttgttggttggcctcctataagatcatttaggaaaaattcactggccactactacaaagaatgttgaagaagtggatggaaaagcggggtctggtgcactgtttgtaaaggtcagtatggatggtgctccttatttaagaaaagtagacttgaagaattactctgcgtatgccgaactatcttctgcgctggagaacatgttcagctgttttaccataggttcttgtggatctcatggaaatctgggaggggaggtgctgaatgaaaccaagctgaaggatctgcttcatggatcagaatatgttcttacgtacaaggataaagatggcgactggatgctagtgggtgatgttccctgggagatgtttattgagacatgcaagaggctaaggatcatgaagagctccgaagccattggtctagcaccaagagctgttgaaaaaagtaagagaaggaactaggcagtatcaagcatctcatcacactctatccatctaactgcttatggggttaaaaagctttcttggctatgtgagggagcaacacaaggccataatggcttggaaacacaactctaggcatgttggactggatagaatttcgtactaaagctgccttgttgatcatgatattatttactatcagtgtgttctgttgtcatgatgttttatattcagtaagcttttttcatgattgtcacaacttataaaaccccaaaaaacctgtctgtgggaggttcttatattttatgtgctgtcatgttcatgttgtggtgaaggatttgtagtttgtaaattgcatcatctcttatatgtttgcaactttgtgtgataaaaaacaccaagttgttatatatgtaatgcaccttcaactgtt

SEQ ID NO: 20527 - DNA, 755 bp, Glycine max
  Clone ID: LIB3242-022-G6_FLI
gagtttcatttatgttgactgatagtagaatttgaaatttgaatttgaattgtagacgtaggattagagtagaaaaaggaaagatgatgattgtattgcggcgtgtagagagaggatttatccaattccaactttgatactcactcataccataataggatcaggctagggtttataataagctgctgattgaaacaaatgttgaaattgcagttgttgaatcatctgcaccagacaccgattcattcgaccaaaacataagcatgtccggatctgacatggcagggagggagcaattcacggttgggatgcacaaaccccaacaacaacaacaacaacaacaacaacctcagcttcatcaaaacatgcgtatggactatgctgctgacggcactgctgttttcgcccctccgaccgttaccgttaacattaacggcggagattcctctccagcggtgcctccgggcctgggcctgccccagccccagcccatgatggttaactcccccgaaccaattaagagaaagaggggaaggcccaggaaatatgggcctgacggtggcatgaccttgggggctttgaagaccaccactcctcccggcggcggcgtgccggttgggcagtccggtggggcatttccagcggggcctctttcggattcggcctcagctggtaccgtgaagcgcaggggcagacctcgtggttctgccaacaaaaataagaagaatgatagctctaactcctctaagtattct

SEQ ID NO: 20528 - DNA, 2766 bp, Glycine max
  Clone ID: LIB3242-023-E7_FLI
gcctaaacttccctgcaaaatcagctttggttttcttctgtcactgctctaacctttaaacctctctcattcattgttctttctccaccgtcgaaaatccctaagttcctgctagtttcaaccttcgagtgctctctggaagattcggtatctcataccgttgggttcaagttctccctctttgttctagttttgggtcttcgggaggaatctatggagacacaatcagatggtaatgaggacaacatagctgccattaaaaatatgaggcagcagcttgaaactcgcatagagtcgcaacacaaggctcacatggagatgcttgcttctatgcaaactgtaatacctaatcttgtttcatcccttgacctttctctcaaggttgtgtcttctttcaaccgtcgtccttttgctcctacaccttctctgcctcagcctgatccaaaactgagtcccaaaaaaccggttgaactaactcaccgtttcaatgcggaaacctgtgctgatggctctattgaggcaaacttgacaaatcccaagaatcaaaagcccaaaacatctatgcattcaaactcagcatttcaagtagagtctgagaaggttagtccattagcggtggttcgatcaatggtcactgtttgtctattagggcgagtacccttctcaccgattgattcttccaccgtgtcaaggaaattggaaaatgatcagatggtgacaccaacagagaaggcagcacttcaggaacttggaggggattcgggggcaacacttgcagtggagatagctttaagggcaatggcagatgataatggtggtgttgaagtggaggagtttgtggtgagtggcaaggcaagaattatggttttaaatgtagaccggactcggcttctgagagaattgccagaaagtgtgcagtatcagcaacttgaatcaagttctggagatgggaatgcgaatcaaaatcaagttcagcatatcactcatagtggttctaatgtgaatggtagtttgcctgggatgggaaggctagttccgaggccaatgtctgatatgtggccaccccatggggacccccatatgtcagcattgcagccaatgttttcaggaggaccaaggggagctccacccagagtaatggctatgatgggggcacatagaggtataagtattccttcaatgcatagactcccattggggccaaatgcaccagggggtagtcctaatgcaatgccacagaagccaagaacttatgaggatgatatgaaggatcttgaggcattgttgaataagaaatcatttagggagatgcaaaaatctaaaactggtgaggagcttttggacctaattcaccgaccaactgcaaaggagactgctgtagctgctaagttcaaaacaaaaggtggttctcaggtgaggcaatactgtgacttactgacaaaagaggattgtcgacgtcaatctggttcctttatagcatgtgaaaaggttcattttagacggatcattgcacctcatactgacatcaatttaggagattgttcttttcttgatacctgccgacacatgaagacatgcaagtatgtgcactatgagtatgaccctacacctgatgtgtctccaacaatgatgggcgcccctcctcctccaaaaccgctaaagcctcagcgtgctgaatactgttctgaagtggaacttggtgaaccacaatggatcaactgtgatatacgtaactttagaatggacattttaggtcaatttggagtaataatggcagatccaccatgggacattcacatggaactgccttatggaacaatggctgatgatgaaatgcgcagtcttaatgtccctgctttgcaaactgatggtcttatttttctatgggtcactggacgtgcaatggaacttgggcgggaatgcttggacctttggggatataaacgtgttgaggagatcatttgggtcaaaacaaatcaacttcagcgaataatcagaactgggcgtacaggtcactggctcaatcacagtaaggaacattgtcttgttggaataaagggcaatcctgaagtaaacaggaacattgacactgatgttattgttgctgaggtccgggaaacaagtcgcaaaccagatgagatgtatcctttgctggagaggataagtccaagaacaagaaagctagaactatttgctcgcatgcacaatactcatgcaggatggatgtctcttggtaatcaattgagtggtgtaaggttggtggatgaggggctgcgagcaaggtttaaggctgcttatccagatgtggaggtgcagccactatcacctcccagagcttctgctatggaagtagacactagtattgctcctcacacgaggagtccatttgcagccactgaatcagagtccacttcggcgcagtttgcggagcctgcagccgctccagaaagtaactttgtttcagaggagaaatcaatggccattgatgtggacattggctaagtttccacttttgatcatgattggtaggagcaatgccttgataaagctaaagggaaaacagcattttgacctttgtaccattgttattttgtactctttcacatttcttttcttttttttttctttttttaaaaaaagattagagtgacaaggtatctgggaaaagaatacaggatgctttgtaaattaaataattgtgtaatagtctcattctagttgtacttgattacatttttctttaatgttgaagcatcaattttgttt

SEQ ID NO: 20529 - DNA, 667 bp, Glycine max
  Clone ID: LIB3242-028-E4_FLI
gtaaaaagccacttgcagaagtatagaactgccagatacaaaccagagccatcagaaggaacgtctgagaaaaaggtgactccaatggaagaaatgaaatctctagacttgaaaacgagtaaggggatcactgaagcattacgtttacagatggaactccagaagcgacttcacgaacaacttgagatccaaagaaagttgcagattcaaattgaagaccaagggaaacgtcttcagatgatgtttgagaaacagagagagatgggtgacagcaaggttaacgtctccttggacgagccttctgctgcagcaccatcagacacagtagaaaccacaaatgaggaacgccacaaatttgaaagcattccaaaagccatacccgaagagaaggagtcaagcacaacaaaacaaattgcaggtgaagctgaagaaatgatcaaggaagatgaagttgcaccacccacaaaacgggtgaaaagttcgtaacagcaggatcgttgttttatgccttctagatttgtttaatattcttagactggtttggactccatggaacttgtagaaatattattggatccaaggatgtttcaacttgctcatttatcacagccatttcctatgaaaatatggcatgagtgccacaagtaatggtggctcattgtgatgg

SEQ ID NO: 20530 - DNA, 254 bp, Glycine max
  Clone ID: LIB3242-036-B4_FLI
aagggatcatgaagataggaatatttttaccctttcgagactattgtgatgttggcctcttgtacatagagaatgagcaattttttgcctttaactgatggttagagactcgggcatttcctttaagcccaccatttgtcaagtatgtggtttctttagttctgtatacttgaacattttagtgaatttaagaatcccttgtatgataataatgatagataggcttgttaggcctcgcgtaactttttgacatt

SEQ ID NO: 20531 - DNA, 1500 bp, Glycine max
  Clone ID: LIB3242-036-C12_FLI
gcaggagtcatctgtttttagagaggttccagtggtggttatgtcgtctgagaatatcttgaccagaattgataggtaagctcttgattaagataagatgctgtttggttttaggagatataagcctttatttttgtttgaattctttgatataattgcttgatttatgtgatgatatttactagatttggatgatgtttgttgattttacctatgctaatggtttggacatgattcacatctagacttgaattgcattagtgaaagacatgatgaacatacttttggatatgcttagatcacctagggtttggacaggattagggcacccagatcacatggtgtttagccatgtgaaaaggggatggagagaggagacaatgatatctgaggaaattattaaaagagtcaagggaatattatggtgaataatttggattttgttacaggtcaatgatattctgtattccgtgtagttgatctcacctaatggaataagattgttgatgttgcattagatccccatatactttctcattctaggttggttctggtaaaattcatctgttgagacttaattcattaataatctcatcatgttagtcacatggagtgttttgggaacatgttgcttccaacttgcacttgtggctacaatgattgaagcatatgaagaaatccagattcccacttgcctaacggtcaactgttgtaaaggaccctgttggcatggaagcaattattgtcactataattgccacataatcatacatcttatcaatacttctatgcatctatacatgaaattattagccaacaccattaggctatgctcaccctcagtgtttcaattgattatgaatatagtttgttaataattacttcaacatttgaacaaagttcataccatattctttatctttacctctcaaatttgataattattttgacttgtagacccaattattcatttttttttttttttttacttttactgattggcagttgcttggaggaaggagcagaggagtttctgttgaaacctgtcaagttgtcagatgtaaaacgcgtaacagatttcatcatgcgaggcgaagggatgaaaggagtaaaaagatctaaaaaaagaagccgatcagatgattgcattccatctctatcaactgcatttgcatcagtttctcatccatgtgatctatcatcacctccatcaccatgtgtatcgcaatcgaagaaatctagattgagcatatagattgagcagcaatgtttatgtctccatttttgcctaaccattgttcatattcaaaagcctctgatgtaatttgcgtttttacactaaacattgctgacaacgactactagaattaggaatgaggaagaggatgacagggtcattttgttctttagttcggtcgcttacatatttttttgctgattttgctgctgtacagagaaagttcattaaattaatgaaaccctctattttgaggggtcttc

SEQ ID NO: 20532 - DNA, 1424 bp, Glycine max
  Clone ID: LIB3242-040-A7_FLI
ttttgcttcagaatgaatgcttgaggttgaggagaaccagaaccagaagcatgaatcaacttggtggtgttagcgttatccttctggttctctcagtcttgtgtttccatgttagagcacagacttctgcaccttcttcaggagatgctgtctccaatttccagccaagccttgctgttgtcataggaatccttggtgtcatgttcttactgacattctttcttctcatgtatgcaaaattctgtcatcgccgccatggcggcgcttcggccgttggagactcagaaaatcaacttacttttgtgagatcaaggtctagattctcaggaattgacaagactgtcatagaatcactccccttcttcagattctctgcactcaaagggttaaaggaagggctggagtgtgcagtgtgcttatcaaagtttgaagatgttgaaattctgagacttgtaccaaagtgcaagcatgcttttcatattgattgcatagaccactggcttgaaaagcactctacctgtcctatttgcaggcacagagtcaaccctgaggaccacacaaccttcacatattcaaacagtttaaggatgttagcaggtgaggaatctaacatagagatcttggttcagagagaagaggaagagcatcatggttcatcaagattcagtgtaattggaagcagcagctttcggaaaacggtcaaggaagaagaattactcatccaaaaaggagcagaagatagtgatggtaaccagaaagggtatcataaacacaaccacaggattactatatctgatgttgtgttcaagcacaggtggagcaacgtgagttcttcagaccttatgtttctgaattcggagatgctcaatgatacatcaagcaacagattcagcagcaacctggaatcaattacaagaggggtagtggtggaaaatgagcaaattatgaacatcaaggaggagatggagaggaagatttcctttgagaacaaagttgttggtgcactaaacaacatcgtttcagatcataaggaagatcctccttttacatcagattctgcaccaaagtatgtgaacccgggtgagaaaaggtcaatgtcagaaatcactgctgtttctagatttggagatttaggcatgaaaatgagggtcttgaaggattctgattcccttcaaaacaaccttaaagaggaaagaatgaggcagatttggtttccaattgccagaagaacagctcaatggtttgtgaatagagaagaaagaaggtctctgcaatctcagaataataaacaacagccattagatgtataatccaatccaatccaaccttcccgaggtacacatgtttggtttcattccttgattaacaactacatgtagatttcaggctgtttttttgttgattagtatatagttaagtaaagc

SEQ ID NO: 20533 - DNA, 855 bp, Glycine max
  Clone ID: LIB3242-041-D6_FLI
gataaagacactgatatttcacacgggtaaatcgcctcgtggcgaaagaactgattgggttatgcatgagcataggcttgaagataaggacctcgctgacaaagggattgctcaggattcctatgtagtctgcaaggtattccaaaaggaaggtcttggtcccgggaagggaacacactatgcgagaccatttaatgaggaagagtgggacgatgaagaaattggaataccttgtgctgctttgactgcacaagttcccaccttgcctattacatctgatggttctgttgcaaatgacaatcatctccctgctagtggatgtattgggtcagcatccacatcatgtctatcaggatcagtgccttctctgggcacagtaaatcctactggtccaaatgatcaagctgttaatgatgatattttaccaatgcttcatatttttaatgatgacaaatggtttgaggagatttataatcctggtcaggaaaatattgttgaaggtgcaccaccttcagatgatttttttgcgggcttggaagactactttgctggtttctcctctggccagaatacaggtgatgttgggaactctgatgacttggacttcttagagttgaatgacctagacaccccattattctatccgaccacacaaccttgaagttaataagagtcgcaataaaggggttgttttggttatgacttacgactgacctttggcaactagctagaggacaatttaaattattgtttttttttcttattctgtgctttgaacattgactctcaagtcccgtgagtgattgtgtgtatatgtgcttgtttttttcattttagaacttccttctcataacg

SEQ ID NO: 20534 - DNA, 519 bp, Glycine max
  Clone ID: LIB3242-043-D5_FLI
ctgaagggacaatcttcagatgttgataatgatgcagattattggcttctatcagatgctgacgttagtataacagatatgtggagaacagattctactgttgattggaatggtatagacatgcttcatcctgattttggaatcatttcgaggcctcaaagtccatcatctgggcttgctgaagtgccatcaacaggagcaaactctattcagaagtgatttcggtttgcctatgcagaaagtatggatggccttcatcctttgcagagggaaactacttcaatagagtgattgttagccttgaggatgtaaacagccgttgaatgtcaagccgagagtggttgatttacctaagttaaataattgactctgacaaataaacttagttacagtagacatactatgctcgtagatgatttagcttggaaggtagagcagttgtgtttacagaaaatgttcctgctgtgatatgtaaacaaagcagtctcataatcagtatatattgtcatatgattagcc

SEQ ID NO: 20535 - DNA, 1151 bp, Glycine max
  Clone ID: LIB3242-043-E8_FLI
aacaatggttctgaattgcttccagcagataaggtggtaggggtatcggctgatcaagttaatgtgattgaaaatatcagtaatcaccttgatgagaaagggcggtggagtcggtgcagagtggccaaagttagtcttttgatctgcccattttggtttttagctcaactcacttttaacctgtcattgaagtatactacagtcacagaacaataattgtaagtctaggtgattcgcaatctggtttagcaacagttgcatcgaatcctcttcttggagacatttttgcacttgcttccgcaggattatatgcagtttatataactcttattcgcaagaaattacctgatgatgatggaaaaagtggtgaagccagtacagctcagtttcttggatttcttgggcttttcaatgttttgatttttcttccagttgccctcatactgcattttaccaagaaggaatcttttagtacactaacctggaagcagcttggtctgataattggtaaaggattgctggataatgtgctgagtgattacttgtgggccaaggctgttcttctcacatctaccacagtagccacagctggtcttacaattcaggtcccattggctgccattgtggataccttgactggcaatgctccgcgctttatggattaccttggagcgatagctgtcatgattggcttcactggaatcaacattccttctgatacttttagcaaatccacagaaactactgtggcattggaaaatgagaacttgaatacaaggactgaagagcttactttgtctataagccaagattcagttgccatatcatagcattgtacattacattcacttcacggtttagttgacgggtggtctttttgtaaccatgccagattagttgcaaaatctgaaatgtactactataccagacaggaaaatagaaaaggtagaacaacggaagatggttcactagacgaacacatgagagattgcgcctggtcagacatgtaaattgccatgtagttcagcaaattattacttggttgagattttcattgatggtttgagtgccttagtggacgaccccttaagaaagggttctcccatgtaccacatgtaatgataagtatgggattctattgattttgagat

SEQ ID NO: 20536 - DNA, 1947 bp, Glycine max
  Clone ID: LIB3242-046-E1_FLI
ggagatttctcagttgtcaacacccttcggcacttcagcacagcgtgtggcagcatatttctcagaagccatatcagcaaggttggtgagttcatgcttagggatatatgccactttgccacacactcaccaaagccacaaggtggcttcggcttttcaagtgttcaatggtattagtcctttcgtgaagttctcacacttcacagcaaaccaagctattcaagaagctttcgagagggaagagagggtgcacatcatagatcttgacataatgcaagggttgcagtggcctggtttgtttcacattctagcttcaagacctggtggagcaccttatgtgaggctcacagggcttggtacctctatggaagcacttgaagccacgggaaaacgcttgtctgattttgcaaacaaacttggccttccctttgagttcttccctgtggctgagaaagttgggaaccttgaccctgagaggctcaatgtttgcaaaaccgaagctgttgctgttcactggttgcaacattccctctatgatgtcactggctcagacaccaacaccttgtggctcttgcagaggtaggtgaagaaagggttttagttttaggtccatttcattcattcattcatttatttaattctattcactgcatggctttatatttatgcattggataatttgcatgatctagagggagcggatatgagctgggtgggggttttttttagtacacggggaaatagttatagtactacttttcatgaaagaattccccaaaaaccttttttcacctttataggctcttgtacccactttatgtctgccttttttcttttctaaggaagattgggaacaatgattaagtcttgttttgaatcactctctgcacatatattaatggggagaaaccaaaaaaagaactgtagaatgtatatagtaaggattgaatgacatggtgatgggtctcgtgtatttatcattactaacattgtcacactaaataatttcaggagtttaattaaaggcatgctactgtaaaaccaatccaaaatcttctttgctatcacctgttaaagtgtttatttattatgaaagttaataaattttgtatcttgctaaccaaactcaatgcttttagcatactaattaagaaattaaaaaaatatttattataagatcacaggagaaaatagaaaaaattatggacaaatagatacttattaacatttgtcataaattcattttatacgaagaattatgattggataatagtataaatatgaaacttattgcatggacttgtgttatgcaggctggcacctaaagtggtgactgtggtggagcaggacctaagcaacactggttcattcttggggaggtttgtggaagccatacactactactcagcattatttgactctcttgggtcaagctatggggaggagagtgaggagaggcatgtggtggaacagcaactattgtctagggagattcgaaatgtgccagctgttggggggccatcaaggactggagagccaaagtttcataactggagggaaaagcttcaacagtgtgggtttagaggcatatctctagctggtaatgctgccacacaagctagtctactccttggtatgttcccatctgagggctataccttggtggaggacaatggcattcttaaacttggttggaaggacctttgcttgctcactgcttcagcttggagaccacccttccatagtgccattacccatcacaactaggcttttgtgttggcctttttcatcatcatctcattattctaatcatgtgtagcatccaccccctctttgttacttaatttagagagagattgttaaggtgatcccatagcacgtgatttttcttgcctaatgtgtaccacttcagcagtaacatattaaaaagaagatatagttaaaatt

SEQ ID NO: 20537 - DNA, 866 bp, Glycine max
  Clone ID: LIB3242-049-B12_FLI
cttctcctcccattgaactccttctctttccccctctctctctctctcacacacaaagaggccatggattacctcgaccatgatcatgatcatgacccattccacgaccacgacgacttcaacagaaggatactcatcatggccatagtttccttatcagtggtcttggttcttgtctttgcacttcacctctacgcaagggttttcctccgccgccaaactcgccgcagagccgccatataccaactgagcctcaacgtggcacaagcacacgccgagccacacaacaacacagggctgaaccctgccctcatcaccacccttccctccttccccttcaaacaaaaccaacaccatgattctgctgagtgtgccgtgtgcttgagcgttctagaagacggagaacacgtgaggcttcttcccaattgcaaacacagcttccacgtcagctgcatcgacacgtggctttcttcgcactccacgtgtcccgtttgtcggaccaaggccggaccggtccagctcgaaccggtccgcctcgaacctcagccccgtgagggccccactggcttggttcttgctgatgttgttgcacccacggctcctctattgtttgaaaacgtggaaggaacctcggatggtgctaataataatgggtcacctaaggttagtggttcgaattcgaggttgagttcgttcagaaggattctcagtagggagagatcgatgaggaggattctaccttctagccatgatgatgttgaacatgacttagagaggcagtgagaactgagaaattaattattgaggtaccaacaccatgtatctggttttgattatttgtgtgaagtgtctctgatttttatttt

SEQ ID NO: 20538 - DNA, 1371 bp, Glycine max
  Clone ID: LIB3242-049-F5_FLI
gttgggacatgatacagatattctggatacttatgataccataattccagaagaatctgattcatttttgaaagaggcagaaaggtggaagagaatgatggaaatgatatctagaggggatttaaaagagatgctttgtacatgtgcaaaagcagtggcaggaaatgatatggagacaactgaatggttgatgtcagagttgcgtaaaatggtctccgtctccggcaatccaatccaacgattgggagcatacatgttggaggctcttgttgcaaggcttgcctcttcaggaagcacaatctacaaagtcttgaaatgtaaagagcctactggtagtgaactcctttcacacatgcatctactttatgaaatctgtccatatctcaaatttggttacatgtcagcaaatggagctattgctgaagtcatgaaggaggaaagtgaagtccacattattgattttcagattaaccagggaattcagtgggtaagcctaatccaagctgttgctggcagacctggagcaccccccaagattagaataacaggttttgatgactccacttcagcttatgccagggaaggaggccttgaaattgttggagcaaggttatcaaggcttgcacaatcatataatgtaccctttgagttccatgctatacgagctgctcccactgaggttgaactcaaagatcttgcacttcaacctggtgaagctattgctgtgaactttgccatgatgttgcaccatgttccagatgaatgtgtggatagtcgaaaccatcgtgaccggttggtgagattggcaaagtgcttgtctcctaagattgtgacacttgttgagcaagaatcacataccaacaacctcccattcttcccccgtttcgttgagacaatgaactactacttggctatttttgaatcaattgatgttgctctgccgagggagcacaaagaaaggattaatgtggagcagcattgtttggctcgagaagtcgtcaacttaatagcatgtgaaggggcagaaagagtggaacgccatgagcttctgaagaagtggagatcacgtttcactatggccggattcacaccatatccattgaactcctttgttacttgttcaataaaaaatcttcagcaaagctaccaaggacattacactctagaagagagagatggggctctatgtcttggttggatgaatcaagttcttattacctcttgtgcttggaggtgatgattcaatgacaactggttcatttttgttatttcagacttttagttagtttatgtatcatcctaatcttctttcgcggaactcatagtcaagttactctataatttgttaaaaaaactcacttgatttatgtt

SEQ ID NO: 20539 - DNA, 990 bp, Glycine max
  Clone ID: LIB3242-052-C10_FLI
aaccatctcaaaatggaagttcagtacatgctcctcaaaatggggtacataatagacctcagacagttgttaatcaaactatgtctatcttacctatatctaccacaagtgctcctggagcagttcctggtcccacaactaatttaaatataggaatggattattggggcacaccaacttcgtccaccattcctgcattgcatggaaaggttccttctactgcagttgctggagggatgattgctgctggatcacgagatggtgttcagtcacaagtttggctgcaggacgaaagagagcttaaaagacaaaggcggaagcagtctaatcgggaatctgcacgcagatccaggttacggaagcaggctgaatgtgatgaactagctcagcgtgctgaagctttgaaagaagaaaatgccactctccgatcagaagtgagccagatcaggagtgagtatgagcagctacgttctgagaatgctgccctcaaggagagacttggggacatacctggtgtcgcgacgcctgggaaggaggatcttaggtctggtcagaatgatcagcatgtgagtaatgacactcaacagagtggtcagacagaggttgtgcagggtgttcattaggatcttgcttcctgctgcatgttgctttttaggtagataacctaaccaagtagcaacagcaagttctagtttttggttcaaattgtattaaaggtgatcatatgtagtattaggatctatttatgtcatatgatccctcattcctaatttgtcatgtttatgacggccaaaaacttgtattgtagttagtgtgtgaatacttggttataccttctctgctacttcaaaagttagtgttagcagtaagaaagtatgattagtgaaactagttattgaccattatatggattgccgtgcttctgcgcaaataatttaatcaggaagatatattaaggaaatggaaatgaagttcagccctgagaaagtt

SEQ ID NO: 20540 - DNA, 2385 bp, Glycine max
  Clone ID: LIB3242-053-H12_FLI
cacaagttctctgcttcttctccccctattgacctttggtcatcacaagcgaaaacccacttctggatcttctggtgtaaaggccattagaagctttagaaattttctaattgagttggtgtatagtgttgaagggggtgaaatctggagcccagtttgttagttgttactcacttcatctgtaagctcataggttgaaccctctttttttggagacttacctgggaaaagatgatgatgtttgaagatatggggttttgtggcgatttggatatgttatgtgtttctcttggagagggggatattgctgtgagacaaactgaaccggatcctgtagttgaggatgactacagtgatgaagaaattgatgtggatgaacttgagaagaggatgtggagggacaaaatgcgtcacaagcgattgaaagaacaaaccaagtccaaggaagggactgatgcaacaaagcaaaggcaatcccaagagcaggcaaggaggaaaaagatgtcaagagctcaagatggaatactgaagtacatgctgaaaatgatggaggtttgcaaggcacaagggtttgtttatgggataattcctgagaaggggaagccagtgactggagcatcagacaatcttcgtgaatggtggaaggacaaggtcaggttcgatcgaaatggtcctgctgccatagtgaagtatcaagctgataatgcaatccctggaaagaatgatggatgcaattccattggtccaactccacacaccttgcaagagttacaggatacaaccttgggttctctcttgtcagcacttatgcagcactgtgatccccctcagaggagattcccattagagaagggtgttcctccaccatggtggccaactgggaatgaagaatggtggcctcaaattggtctacctaaagatcaaagccctccaccttacaagaaaccacatgacctaaagaaggcatggaaggttggtgttctcactgcggtcatcaagcatatgtcccctgatattgccaaaattcgcaagcttgtgaggcagtctaagtgtcttcaagacaaaatgactgcaaaggaaagtgcaacctggcttgccatcatcaaccaagaggaagccttggctagagagctttaccctgactattgccctccattttcctctgctggaggtaatggatccttggtgatcaatgattgcagcgagtatgatgttgatggggccgaagaagagctgaactttgatgtggaggaccggaagcctgaccatcttcttccatcaaacctcgggatggagagaatgaggggaaggatgccaattcagcaaccttctcatccaatgaagggagatgttgtcacaaacctagatttcatccggaagaggaagatttctagtgacttcaacatgatgatggatcagaaaatatacacatgtgagcacccccaatgcccttatagcgaagttcgccttggtttccatgataggtctgctagggacaatcatcaattgaattgtgcatacagaaacagttctgcagattatggtggtggtcccaatttccatgctactgaggataagccagtcatattcccccagtcctttgttcaacccaacactacaacacagtctgcaagtttggttgcaccttcatttgatctaactggtcttggagttccggaggatggacagaaaatgattagtgaccttatgacaatctatgatacgaatgttgtaggaaacaagaacttaagttcctccaactgtgtagctgtagaaaatcataacctttctcaggccagcttacaacaacaagaaagttatttccctggtcaaggaatggtgttggaagggaacttctttgcacgagaggaaggtcaatttgaccggttcaaggccaccatgaacatgaacactcataccccttttgataccaaccatagcaacaataataatatccatttgatgtttaattccccttgtgatttgtcatcctttgatttcaaggaggatatacaaggaggagtaggaatggatcctcttcacaaacagcaagaggtttcaatttggtaccagtgaaaatgacaagaggggaaactcgtgtatcaagggcttttattgtgtcattaaaaggggacatgtgaaagtcccttgactcaaaaggcagttaatgcatttttcttcccatgtaatcgtttaggtctttagatatttttatgctttggcaggtctggtctggtggtactatattatgggttaataaatcatgggtgttcccataatgtaacccttttaatgtgtgtctttatgtgttagccctatgttgttacttactatcatatgtacgactgtgacataaataaaagatttttattctcttataaaatc

SEQ ID NO: 20541 - DNA, 1282 bp, Glycine max
  Clone ID: LIB3242-059-D4_FLI
caaaaccacaaaccaacgctggtaacaatggaagaagactcagggataagactcgtccacacgctgatgacctgtgcggattccgtgcaacgtggtgacctcgcattcgcgggctccctcatcgagaacatgcaggggctgttggctcacgtgaacaccaacatcggaatcggtaaagtcgctggatatttcatcgatgccttgcgccgtcgcatcttagggcaaggcgtgtttcaaacgttgtcgtcgtcctcgtatccgtacgaggacaacgtactctaccaccactactacgaggcctgcccttacttgaagttcgcgcacttcacggcgaatcaggctattttagaagctttcaacggtcatgattgtgtccacgtgattgacttcaatctcatgcaggggctccagtggcccgcgctgattcaggccctggcgcttcggcccggtgggcctccgttgttgaggctcacgggcattgggcctccctcatctgacaaccgcgacacgctccgcgaaatcgggctcaggctcgctgagctggcgcggtcggttaatgttagatttgcatttcgtggcgtggcggcgtggcggctcgaagacgtgaagccgtggatgctgcaggtgaatccgaacgaagccgtggcggttaactccatcatgcagttgcatcggcttcttgcttcggactccgatccaataggttcgggcatcgaaaccgtgctgggttggatccgaagcttgaacccgaagattatttccgttgtagaacaggaagcgaaccacaaccaggaccggttcttggagcggttcacggaagcgttgcattactactcgaccgtttttgactcgctggaggcgtgtccggtcgaaccggacaaggcacttgcggagatgtacctgcaaagggagatatgcaacgtggtgagcagcgagggaccggcgcgagtcgagaggcacgagccgctggctaagtggagggagcggctcgagaaagccggcttcaagccgctgcatttggggtcaaacgcgtacaagcaagccagcatgttgctgactcttttctctgctgaagggtactccgtggaagagaatcaaggatgcttgactttggggtggcatagccgccctctcattgcggcttcggcttggcaagctgcgccgatgcaggacagggaaacgctgcgtttcgagcaatgagtttcaagaaacggaaaaattgtttaattatagtagtaactagtaaacaagagtgatgtataatgtaaatttttctctctct

SEQ ID NO: 20542 - DNA, 1302 bp, Glycine max
  Clone ID: LIB3242-059-E12_FLI
acctagggaggacacattcaatgacacaaaagcatactcaagtactggcttgagacagtgtgcaatgtgtgagaaagaagtgtatggagaacagtctatttgctgtggccggtgtagagcagttgtttactgcagttcaatctgccagaagcaacactggaacgacacacataaaagcatgtgtggactttacaaggccatgatggagagggaagaagagctggctataatgattttcatgttcccatgttctgctgaccagccttgtaagtggcttgaatcattaggtatccaccagaagggtatgtggaggagaaagtgcagttgctattctcactgctcttttggtctccttcctgtgaaaggtgggctgcaggaactatggggtggaattgatgaatttgaataccctcatgactctccatttaataaccatttcatctcaagcccgtttcttctctctggttggcccgagtactacaaccttcgttcgcttccattgtcaagtcctgttgccgacattctctcgcatccattgactgtgtatcacatactaactacccttaatataagttcaaagaaccttatactgaaagggaaagaggtgattgtccactaccttggacctgaaggcgagttggattggatgccagcatttgcagaagtaggacacttgcttaatgggttaggcaatgtacaaatagtgatggtgggaccagaagttccaacaaatttatcgggtacaacctcaggaattggtagcagagttagagtgaatcttgtgaggggtgtttatcaggtggaagcctcctacctaccttctccacatgttgtcattgctctgaattctagattagaaagctattctagttggggtggagctcttgatttaatcaaatcaattggggtgcctgccttcttcactgatcaatccgaagtttcatgtgtaaatgctaaacaagtccttcggaatgctggactgcacatcacacatccggtgactccaaatcctttccggtcacctgtgaaaaatctcacagcttctagcaatcttccttcatacagcaatggttttgtctttggggtgaatacttgaatgcagtccaagaaaatccaaaaacaagtgtctgtctactgtcatgcattctcaagattgcagccaacttcaaattttctcgattgtcgtgcaatttgctgaacatcacagtcacagcaaactacaaagatcattgtatgtctcattgaataatgtatattgatttcagtttagccagagatcttgttatagtctctgagttatgg

SEQ ID NO: 20543 - DNA, 857 bp, Glycine max
  Clone ID: LIB3242-062-G8_FLI
gtggttttggtaaagagaagagccattagtttctatcttcctcttcttcatccagttgaaaagaatcaaagcagaatccatcggaagaactcaatggcttctcagcctctaaagaatgatactgatgcagaagccaagtctggatgcctttatgttaaagtcagcatggaaggcgccccatacttgaggaaagtggatctgaatagttttaccacttacaaggacctctctttggcacttgaaaagatgtttagttgttttacactcagtcaatgtggctcttatggggtttctagtcgagaaaatttaagtgaaagtagattgatggatctccttcatggttcagaatatgttcttacctatgaagacaaggacggagattggatgctagttggtgatgttccgtgggagatgttcactgagtcttgcaagaggctgaggataatgaagagttttgaagcaattgggctagcacctagagccatggaaaagtgcaaaagtcgtaactagtgccaatgctgtatgcttttgtcttctaatccggaaagatggaagatcacatttaagcatataataccttgtttcttacctataattctatatacgagattggggtgtcctaaactttagtgggaaagatatattgatgacagcatattagttttgttgtagtagcggtctatatcattgatgtagacgtttaaggtttaaggttttaggttttaggttgttctcccacacttcaattactgccatcatggcttaccgtagtttgtaaattttgcatttctgtaagcgagcattttgtttgtcatggcaagccaagaaaagaaatatcatactttctttatgtgtcc

SEQ ID NO: 20544 - DNA, 916 bp, Glycine max
  Clone ID: LIB3242-064-F6_FLI
accaaatccacttctccaactaatgggcgtgttcagcgaagatccgaatcccaacccgaacccgatcgtgatccgagaggtttgggcctccaatctcgaatccgaattcgaactcatccgcgaactcatcgatcgctacccttttatctcaatggacacagaatttcccggtgttattttccgaccacatgtggaccccaccaaacccttcaaccaccgcaaccgtccctccgaccactaccgcctcctcaagtccaacgttgacgctctcaacctcatccaggtcggcctcaccctcaccgacgccgccggcaacctccccgacctcgccggaaaccgctccatctgggaattcaacttccgtgacttcgacgtggcgcgtgacgcctacgctcccgactccatcgatcttctccgtcgtcagggcatcgatttcgcgcgtaacaccgccgacggcgtggattccacgtgcttcgcggagctgatgatgtcttcggggctcgtgtgcaacgacgccgtgagttgggtcacgttccacagcgcgtacgatttcggttacttggtgaagatcttgacgcgccgtaacctaccgacgaggttggaggaattcttgaaaaccgtgaaggtgttcttcggagataacgtttacgacgtgaagcacatgatgaggttctgtgacacgctctacggcggattggaccgcgttgcacggacgcttaacgtggaccgcgccgtagggaagtgccaccaggccgggtcagacagcttgctgacgtggcacgccttccagaagattgttgacatttattttgtaaaggaagagcaccgaaaacatgccggtgtattgtttggactataggcattctgttaattataataacataaaaataataaaaattcaattgattgattattt

SEQ ID NO: 20545 - DNA, 994 bp, Glycine max
  Clone ID: LIB3242-074-G7_FLI
gctgaaactgtgccggttgatgctgcggctgctctggggcctagagctcgtggacgaccgaagaaatacgctgatgagatggttgctgcaggccgaggtaggggacgaggccgtggacgtggtggcggcggcggaagaggacgagggagaggacgcggtcaattgcctgcgcagctcagaaaatcaggggcaagacccgtgggtcgtccgaagaaggggtcaacttctgctagtacttctcaaaatgctgctaatgaagatctcaggaggaagcttgaacactttcaatcaaaagtcaaggaatctcttgcagttcttaagcctcattttaaccatgaaagtccagtcactgcaattgctgccattcaagagttagaagtactgggaactatggacctcaatgcaccactaagggatgaaacacttccatcgcaagaggagcagccaccactgcagcagcagcagcagccaccgcagcaacagttcccaccaccacaacagcagccaccacagcaacacctagcaccacaacaactgccgccacagccacaggcaccaatatttcagcaaacatatcctccatttcatctgccgcagttccaccatcaccagccgacgctgcagttccagcagcagccacagccgccacagctattccagcatcaggcacagccaccttcccaccaacagtttcatccttaggaatcaggcccaggctaggaagaattacattgtcctgaatttgataatgatgctaggaagaattacatggtcttcaatttggttatgaacaatctgaaacaagtgttttaacaaggcacatgaggggtaacagatttgtaaagcgagtaggcagtagcagaactgatttttcgttaagtgaattgattgtccatttagtttgttgttgtgcactgttctagattgacccctgaagtaatttttagattttagagtactgataattctgttatttaagtaatatttgtttgac

SEQ ID NO: 20546 - DNA, 636 bp, Glycine max
  Clone ID: LIB3242-075-B11_FLI
tggagaaattaaagagttcacaaacgccaagaggataagacaacaagcacaagcggaactcgacaaagcctactccttgaaagaacatgcaatgaagcaaatcaactccaccatgctccaaatcacttgccatggttgcaaacaacagttccaagctcgaaatgcagcaaccacccccgatgagaattccttggtgttgagctacgtgtcttctgctattaccacggaaggaggaggagaagtagaaaatgataataatgcaaaagatcatggcaaagacaacaactaactccactacttagagagagataatcatcatcatcaccgtcatcatcatctttctctctaaagtttataattctgtattttattttcctatgtcctcctctatgggttaatacttactagtaatacccttttttccatttcaaggctaatatctttgtgcattggtataccaagtgaagtgaaggtgagtgatcgatgttgattatatgtaagtgggatattataatagcgctcgggatggagaaattaaagagtgtaattcttcgtgtatcttgcagtttattgttgtgccatgtaatttgttaattaaatttggtataaatgcagactatgataaaagggttaatt

SEQ ID NO: 20547 - DNA, 405 bp, Glycine max
  Clone ID: LIB3242-080-D12_FLI
atgaatttgctgatggagagaatgttggatcactggattgtgggcatgagttccatagtggctgcatcaagcagtggctaatgcagaagaacctctgccctatttgcaaaacaaccgccttagctacttgatagggagaacctctatcctcttaagctggttctacctatagcttcttttattttttaaactttatgaacttctttgaactggacctctcatttgtcatgattggggacgataacatgtcccctaaaaagaagtaaacaaaaaacattggtgggtgaactataactattgtagagtttcatttatacagttgtaatggatgattacatgtggtttagataagctataagcacttggatattattaaatttcattataaatctaaggttggtggct

SEQ ID NO: 20548 - DNA, 815 bp, Glycine max; identical to SEQ ID NO: 8830
  Clone ID: LIB3242-087-D10_FLI

SEQ ID NO: 20549 - DNA, 1278 bp, Glycine max
  Clone ID: LIB3242-098-F10_FLI
ttctcacttgaactttgaacttcttttttctctattatcatctttctttttttcttcatctcttatatttcacctttattacctttatcgaaggaaaaatgagcaacataagcatggtagaggcaaagctgccaccagggttcaggtttcatccaagagatgaagaacttgtgtgtgattacttgatgaagaaggtggcacacaatgattcccttctcatgataaacgttgaccttaacaagtgtgagccatgggatattcctgaaacagcttgtgtgggagggaaggagtggtatttctatacacaaagagaccgtaagtatgcaacagggctacgcacaaatcgtgccactgcttcagggtattggaaggccacagggaaggacaggtctatcctccgcaagggcacccttgtagggatgaggaagactttggtgttctatcaagggagggcacccaaaggaaataaaactgagtgggtcatgcatgagtttcgaattgaaggacctcatggacctccaaaaatttcttcttccaaggaagattgggttttgtgtagggtgttctacaaaaacagagaagtttcagccaaacctagaatgggtagctgctatgaggacacaggatcttcatctcttcctgcattaatggactcttacataagttttgaccaaactcaaacccatgcagatgagtttgagcaagtgccctgcttctccattttctctcagaaccaaacaagccccattttcaaccacatggccactatggagcctaagttacctgccaaccatgcaactaatgcatatggaggagcaccaaatttgggttattgcttagaccctttatcatgtgacagaaaaatgttaaaagctgttttgaatcagatcacaaagatggaaaggaatccacttaaccaaagcctaaaagggtcaccaagcttaggagaaggaagttcagagagttacttatctgaagtggggatgccccacatgtggaacaattactgatgtgggacttcagtccttaaaccctcttcccctgtgccaccatgggaaaaaaaatgaagaaaaaaacctagaaaaaaatgcttaagggggaagataaaatcaatccattgttttaagtcatggtgaatatttatgttttacttgtggtgttttagctattaatgtatacccatccatgatgtgtcccaatatattaggaaaatgggacttgtaatcgaaacttataaatatttgtagttaattttagttagtggatgatttttttttc

SEQ ID NO: 20550 - DNA, 1082 bp, Glycine max
  Clone ID: LIB3242-101-D5_FLI
caggaatgggagtggaaggacctcttgatgatggatatagttggagaaaatatggccagaaagatatccttggagccttgtacccgaggtaattaaaaccaaatttaaccctcacaaactattatgtttacattctaatttctaagtctcatggattgaactagatttatataattatatactttgtctgtatgcaggggctattacagatgtacccacagaaatgttcaaggctgtatggcaacaaagcaagtgcaaagatccgatgaagaccccaccattttcgaaatcacttaccgaggaaaacacacctgcacagtggccaacaacgtgggttcttcatcaccaattccactagaaaaccaggaaccaagtttgaacaacacaaatattcctcagcatcagcatcagcagaatatcctgcaaagccatgaacaacaacaaaacgaactacttctgagcctgcggaaagggttgagagtccaaacagaaaacctagattcccccgaacaaccattagttccattccgtttccctttgtccacaaacataaaaaacgaaagccatgtttttccttcccctgtgcttgaaaacttcacttctccttcttatgtttcccctgctgcatcaggaataggccacttttctgtgtctccaagtggagtagtgaacagctttgaagggaacccaaatttggcaaattctgagtctcagatcaatgatatgatccctgccactactacaacttcagcagctccaaactcatcaaccgttggcttagagtttccctttgaccagtttgaatttgatggccagaacttcacattcgataacccacggtttttctcttgaatatgctcaattcagagaagaagccaaataaatcataaaaactaattaattttttttaaaaatgaactagaagcatatggtgaaagtttgtggtaacattctagaataatatgaccctttagaaaaagaggcaaaaacatttcaatgtatgtcttagtcagctacttgtgtcgtaggaagaatgtgcaattctaaaattgcttagtcaataagaattttcctttatcatt

SEQ ID NO: 20551 - DNA, 894 bp, Glycine max
  Clone ID: LIB3242-105-B9_FLI
aaaaggttggctgcgatatctcagacatttaacatccgagttgagttccacggcgtgcctgttttagctccagatgtgacaaaagacgtgcttgatgttaggcctggtgaggctttggctgtgaacttccctttgcaactccatcatacagctgatgaaagtgttgatatgagtaatccaagggatggacttttgagattggtgaaatcactttctcccaaggtaactacattggttgagcaagagtcaaacacaaataccactcctttcttcaacaggtttatagaaaccttggattactacttggcaatgtttgagtccattgatgtgtctcttccgagaaagagcaaggtgcagattaatatggagcaacattgtttggctcgggatattgtcaacattattgcttgtgaagggaaggaaagggtagagagacatgagctgttaggcaagtggaagtctaggttaacaatggctggctttcgtcaatatcctttgagttcttatatgaattctgtcataagaagcctgctgaggtgctattcaaaacattataatcttgtggagaaggatggggccatgctactgggatggaaggacagaaatttgatttcaacttcagcttggtattgattacatgcagataggaaataatgcagtggtagaaatatgttgccgactgaggtttatgttgatttctagggccttgtgttccttaccattgttctaaaggtcattatttgataaattagtctattgagtttcatgtcatagtgatgcagataactgcataccaattcttttataaactatttaggtatgtacagtgttttgatctacaaatattgtacttgtacctgaaacttatccttggtatccaatataaattaaatg

SEQ ID NO: 20552 - DNA, 393 bp, Glycine max
  Clone ID: LIB3242-107-C6_FLI
tttcaatggctggttttgcaccatgccctttgagttccttagtcacggatgcagttagaaatatgttgaatgaattcaatgaaaattataggctcggatatagagatggtgctctctatctaggatggaagaatagagctatgtgtacctcttctgcttggagatgttactgactcattgtcatagcctcataggtatatgtatattttcctccttgttaatttcttcccttttttggacacttagtcattattcagtcgtatcttcagtttctcaatagaactagctagttagagacttagctttcttccaacgtgtatcctttaccttttgtgggttcagctgagtcttttaacatttttgtacatttcaatgctacatagaaggtaagag

SEQ ID NO: 20553 - DNA, 282 bp, Glycine max
  Clone ID: LIB3242-113-C8_FLI
tttgaaagcacgatgcgtataatttattgacatattaaaaattgcaaccctctgatacaataaaccaagaaatttccctgtacaatgagaaaattccctttctttccatcaaaataggtggaacctcaaaattcttcatatttacatttcaaaatataactcaaaatagtgagagcaataagagcttgccgccaaaaaaatcccccatcccttatgaagaacttagatcccatgcagaacaaatgaattacctaacctacttgatggcatatgaacgggtac

SEQ ID NO: 20554 - DNA, 1045 bp, Glycine max
  Clone ID: LIB3242-115-A3_FLI
cattaaccgagaacgggaagctgtgcgtgctggatttcgatatcggcgacgggaaccaatacgtgagccttctccacgagctttcggcgcggcggaagggagctccatccgccgtgaagatcgtcgcggtggcggagaacggcgccgacgagaggctgaacagcgtgggattgttgctggggagacacgcggagaagctagggattggtttcgaattcaaagtgctgattcggagaatcgccgagttgactcgcgagtcgctggattgcgacgccgacgaggcgctggcggtgaactttgcgtacaagctttatagaatgcctgacgagagcgtctccacggagaacccacgcgacgagcttctgcggcgtgtgaaggcactcgcgccgcgcgtggtgacgctagtggagcaggaggcgaacgccaacacggcgccgttcgtggcgcgcgtgtcggagttgtgcgcttattacggcgcgctgtttgactcgctcgagtcgacgatggcgcgagagaactcggcgcgagttaggatcgaggagggactgagtcggaaggtggggaactcggtggcgtgcgaaggaaggaaccgcgtggaacggtgcgaggtgtttgggaagtggcgagcgcgtatgagcatggctgggttcaggttgaagccgctgagtcagcgagtcgctgagtcgatcaaagcgcgactcggtggcgctgggaaccgagtcgcggtaaaagtagagaacggtgggatttgctttggctggatgggaagaactctcaccgtcgcatctgcttggtgttaattagttaactctactttttactttttattttctatggatattgtatacacattgttattatattttaatgttacatagagattatggaaagctaaaaaaaccatagagttggaaaattgtgttaaagtataccccactcctcttccttctcccaaccaagcaatagtaaaaagtgtttggattccgagaaaatttatgtgacttgatgcagcatttatgaatataatgattcatttatgtacttt

SEQ ID NO: 20555 - DNA, 1023 bp, Glycine max
  Clone ID: LIB3242-121-D4_FLI
gaatatgccaatttgcagaggggaacaaatggacagtcaattttggttaaaaagcgaaattttcgcatttggtcagaggatgaattgagaaaaatggttacaccagagcttgtttgtgcttacgaaagcatgcaagctgacctctaccgtctaaaacatttaggaataactgaaacacaccccactaatatttcatctgcaatgagtcgtcttcctgatgaagcaatagcattggctgctgcatcacacatcgagagggaactgcagattactccttggaacttgagtagcaattttgttgcttgtacaagccagggtaaggaaaatattgaacgaatggaaattactggtgttggtgatccatctggtcgtggcatgggttttagctatgctcgggcacctccaaaggcaccagtgtcaagtgcaatggtgaaaaagaaagcagctgctaaccgcggaggttctactgttaccggtacagatgctgatctacgtagattaagcatggatgctgcacgagaggttcttcttaagttcaatgttcctgacgaagtcattgcaaaacaaactaggtggcatcgcattgctatgatacgtaaactttcaagtgagcaagcaacatctggggttaaggttgatccaacaactatcagcaaatatgctcgtggccagcgaatgtcctttcttcagttacagcagcagaccagagagaaatgccaggagatttgggatcgacaagttcaaagtctgtcagctgtaaatggtgatgaaaatgagagcgatttagaagggaatagtgatctagattctttcgcgggagatcttgaaaatttacttgatgctgaggagtgtgaagagggagaagagagtaccaatgacttaaaacgtgataagggagatggtgttaagggtcttaaaatgagaagacacccaactttggctcaggcagaggaggaaatagaagatggcgcagctgaggctgctgaattatgcaggctgcttatggatgatgatgaagctgac

SEQ ID NO: 20556 - DNA, 802 bp, Glycine max
  Clone ID: LIB3242-129-H11_FLI
gtgaagttgaaggaaggcacgttactgtggaatttgccaaggggggtcctcgtggttcctgggaatcctcaggtcagggtcagggtccacctactggacctggacgatgttttgactgtggcttgatggtcattgggcccgagattgcaaaactggggatgggaagaacaagtgtttccttagtggggaaagaggtcatatagaaaagaactgtaagaacagtcccaaaaagttgagacatggatgaagtctttcaggtcacattctgctcatcatggcagaagaagggatcgaagctacagccgagaccgcagctacagtcgatcaatatctcctgtcggaagagaacgaagcccagtttctgaagatagatcagagtcctcaaccctcctagataagaaagcatagtgcatcacttgaccaaagcagtccacagaagagaggtgtcacatctcctggcagtgataggttggccacccggcaagatgggtctgactacagtggtggtcctagaaagaaaagtaggagccctgcaagggactgtgatgagggcggctatgatagccctaaagttaatgggcatagccgtagccttagggatgatgacaagagccccattgatgaagatgatgacaaccaccgtcgctcactgtcaccttgaaaagcactttctgataaaatggggtcaggatgtgacccagtttgtatctgctttgtatataaaatgcactccagcttaattctgtgacaattgtttatgaaaacggttttgtgtatggtatttttcagattcttgctggtc

SEQ ID NO: 20557 - DNA, 1222 bp, Glycine max
  Clone ID: LIB3242-137-G7_FLI
gacctctggtgggacccaaaaggttggggtgaagaaggctttggttttctatggagggaagcccccaagagggatcaaaaccaattggatcatgcatgaatataggctaactgataacaagcctaacaataggcctcctcctggttgtgacttgggcaacaagaaaaacactctaaggcttgatgattgggtgctgtgccgaatctacaagaagagcaacacgcataggtcacccatggagcatgacagggaagattcaatggatgacatgattggagggattcctccatccatcaacgtgggccacatgagtgcgaggtttcatcatctttcaaagatgacgacagcctacaacaacggtgcattgttggaaaatgatcaccacaacttgttggaagggatgatgataggtaacagcaacggagggatgaacacaactactactactacacctggtcccatgtcatctcacttagggggatccaaggaagagctttcttttgttccaaccatgactcactcttcaaacacttctaagagaacactttcatcactgtattggaacgatgaggatgtggcgggtacctcatcttcgaacaaaaggttcaatttggaattaagtggggacaataataaccatggaagtgttgtgagggatgatcaagagaatggcactgcttcctctattgccactctgcttaatcaactccctcaaaccccttcattgcaccaacaatcaatattggggtcaataggtgatggacttcttagaacaacataccaaataccaggaatgaattggtatgcttagaacaatttcaggtttgttttaattattgatgaacagagagattgaattactataaagaaggatatatgatatgatcctcgatcagctggtggaaaccctacactattagattgtaatgattttaatgggatattgagattttggttgttaggaatttggaagcagttgttagagtttgatcatttagatgggcctcattatcatccaatgaagttcttcaaccattggagttagctgcaagcaataacaacaccaaaggtcaggccatgggatacttttagttaaactttaatatagctttatacgtatatatagatatttgctttttttattggtatgtaaataaaaaaatggtggtgtgctcttaattaatgtatacaaatattcaaatgagaaaagagatttcaactc

SEQ ID NO: 20558 - DNA, 2209 bp, Glycine max
  Clone ID: LIB3242-140-C4_FLI
aactaaacttcaattataattctcagacaccacttgctcatcattataccttcctgtctacgtgaaataataataatacattaaaccaaaccaatgtcggactggtactttttctacccttttcctttttctccctaaattcttttcaaaattttcttttgctttgcttgcccaaattcctcttgccagatcccaacttcacagcaaaccgtgaatctgatcaagacccaccttccaaaaatgcaacttgggaaatgggttgtagaccttgttctcatattttcacttctcagtcaattctcagaaactgtggcagagacatcatcctattcaacaccacagccacagcctccaatctgttcagaagaagacagagcttctcttctcagcttcaaagcaagcatttcacaggacacaacagagacactgtccacgtggactggcagagattgctgcgatggtgggtgggaaggagttgagtgcaatccatccacagggcgtgtaaacgtgttgcagattcagaggccagggagagatgctgatgcaacttacatgaagggtactctttctccttctctgggcaacttacatttcttggaggtaatggtcataagtggtatgaagcatatcacggacctattcctaatagtttctcaaacttaacccaccttacccaactaattctggaagacaattcccttggagggtgcattcctccaagtttaggtcgtttgcctttgcttcagagcctttcattgagtgggaaccatctgaaaggacagatcccaccaacacttgggggtttgaggaaccttgcccaacttaatttagcaaggaattctctgacaggtcctatccctcttagtttcaaaacccttattaatttgcaataccttgatctcagccacaatttgttatcatctcccatcccggattttgttggggacttcaaaaatttgacgtatttagacctatcctctaaccttctaaccggaaaaattccagtttccttgttcagcctcgtcaatcttttagacttgtcattgagctataacaagttcgcagggaacattccagatcaggttggaaatctgaaatccctgacaagtcttcaactcagtggcaatctgctcacagggcatattccactgtccatatcaagattacagaacctttggtacctcaatatatcgagaaattgtctttcagatcccttaccagcaatccctaccaagggcatcccttcccttttgtccatagacctgtcttataataatctcagccttggaattttacctgattggatcagaagcaagcagcttaaagatgtccatctagctgggtgcaaattgaagggagatcttccacacttcacaagacctgactctctcagctctattgacctatcagataactatctggtggatggtatttcaaatttcttcacaaacatgtccagcttgcaaaaggtcaagctctcaaacaaccagctgaggtttgacatttctgaaatcaaattaccaacagaactgtcttccatagatttgcatgctaatctgctggtgggttcactatcaacaatcataaatgacaggacaagcagctctttggaggttatagacgtgtcaaacaattttatttcaggtcacattccagaatttgtggaaggctcaagcttgaaggtgttaaacttggggagcaacaacatatcaggttcaatcccaatttctatctcgaacttgataaatcttgagagactggacatttcaagaaatcacatattgggaaccatcccttcaagtctaggtcagttgttgaaactactatggcttgatgtatccataaacggattaacagggcaaataccaagtagcttgtcacagataactggtcttaagcatgcaaacttcagggcaaacaggctgtgtggtgaaataccacaaagtagaccattcaacatttttcgaccagttgcttacatccacaacttgtgcttatgtggcaaacctttacaaccatgcaagaaacaatggagtatgggtcagtgagatgctgactctatcatagtaatatgctcatgccttgtgaccattgttacatgagcaaaatagaatagggcactaccacatctgaatatttcttttcaaggtcgacaagttcaattttataattcaatattgtttttaataaaaatatgcactcattttat

SEQ ID NO: 20559 - DNA, 1103 bp, Glycine max
  Clone ID: LIB3242-142-B10_FLI
caactactactactataggtacttactactttgcctagctcctctttctctctcttcccttttgcactgaacttcactctctcttctatatcaagggttgatcacataacctcaatatatttctaataataattgatatagtttgagttattgtttcgagacacacagaaagagagagagagagagaatgggtagagggagagttgagttgaagaggatagagaacaaaatcaaccgccaagtaactttctcaaaaagaaggaacggtttgctcaagaaagcttatgaactctcagttctctgtgatgctgaggttgccctcatcattttctcaagccgtggaaagctctatgaatttggaagtgttgggactaccaatactattgagcgataccaacgtagctcttttactcctcaagacgaacacgttgaatgtgaaactcagagctggtaccaagaagtttcaaagctaaaggcaaagtatgagtctcttcaaaggacccagaggcatttgcttggggaagatcttggaccattgaacataaaggagctgcagaatattgagaaacagcttgaaggggctttagcacaagcaagacaaaggaagacacaaatcatgattgaacaaatggaagagcttcgcagaagggagcgccatcttggagacatgaataagcaacttagactcaagcttgaagcagagggatttaatcttaaagctacggaaagcttgttgagctttacttcagctgctggaaacagtggctttcactttcagcagcctcctcaaaccaatcctattgattaccagcagccagaaccctttttgcaaatagggtaccatcaatatgttcaatctgaggcatctaatgttccaaagagcatggcttgtgagactaacttcatgcagggatggatcctttgatcaatcttattaattgaattaagtatatgatgatttaccttattgtctatatcctttttagattttttgtgttttggctgttgttaaatgtacctttgtcaccagaaaagttgcaaacttgtttagctctttctgtaattggatacaagtactacagacaatggttttactatatgtt

SEQ ID NO: 20560 - DNA, 736 bp, Glycine max
  Clone ID: LIB3242-176-A6_FLI
cttatgacagctatgaaaaactttcctctgctgttgatgagctctttaggggcctccttgcagagatgaagttatctcatattggctcttcccaatgctgttctggtcaaagagattcctgtgctggtggaattcaaaacaaggaacaggaagagaaatccaataagggtttattggttggaagtggggaatatactcttgtttatgaggataatgaaggagacaggatgcttgttggagatgtgccgtggcacatgtttgtatcgacggtgaagaggctgagggtgttgaagagttctgatcttcctgcttttacacttggtagtaagcaagactagttacaccacttgacttgacaatgagaaatgaaggatgaagcagcagcttgaggtcttcttccatgctaaaaattgatgactaagagtgtttttatttgacattttggttcctttgaacattgaagattaggcaatgaaatgttcagtctataagtaatgtttgtatgaatgaatgtatcttgttttctttagtgaagttttgaattgtttctgcattttaaaaatagggtaaggaaaactttacggatgtgtgcactcatgattttgccattaacttatgttggcgtgcgttctgatcgacgccatgtttggaaaaatggtgtgagactccaaaatcaagtttggaggtatagaatatgattttaggtaataataataataatatttggttgttcaat

SEQ ID NO: 20561 - DNA, 910 bp, Glycine max
  Clone ID: LIB3242-180-H5_FLI
gacaaagaaaacattctatggtcgatgctgctgctttcatattagatgtaaaacataacaagtcttatttatacacatattctttcattgagccttctcttgctgttaatttctgcacgacgtgaaagcgaagaaaaatgaagaattctaagaaaacttgcgcgcggaagtaccacaaatcggaaaatccacgcttgcggtggacacctgaactccatgaatactttgttgaagttgtggaaggtcttggcggaaaaaacaaggcaaccccaaagagcattctgcatatgatgcatgtgaaaggactgaggatctctcacattaaaagccatcttcagatgtacaggaacatgaagggaggtacgattctcacatcaatgcaacaggaaatggaagaaaatgtgcatgttaaggatcatcacccaatctgctccaactgttcatcccaaagcataatcttcagatcacaaggaactaaatttaaattaaaggcatcaaaatatgatacggggattgtcaatcaagaaattcacccgctagaaaataaaggactttcgtagaccagtgaaactgattatgatctaaatcaggaacccgagtcaagtgcatgcttatttagtgaatcgtcaaatgaagaaaagagtaggacaatgaaatttcttgatctctcactctctttcggctcttcaccaattccaacaatggacggtgatcaagagagaatgcgtttttcttcaccaaatacagcagataatcatgttatcgattctaattctgtacaatctcatgggagcaattatataaatttagacctaacaatatgaatatgtatcatttctgtaaccacgtacgcaatatttatcatagatttagggttttggcaaagatttataaaattaaagctttaatc

SEQ ID NO: 20562 - DNA, 1594 bp, Glycine max
  Clone ID: LIB3242-192-A8_FLI
ctccgccataacaaaaggatgggcaacagtgctccacattgcggtcggagcaaaccacgaaagcttcgtggaggagttgctgaaactaatgtcgcgtgaagacttagaactgcaagatatcaagggtaacactgcattctgctttgctgcagcggttggaaacgtgcacattgctgagagaatgcgcagaaaaaatgcatcattgccaatgataaggggtggagaaggagtcactcctcttcacttggctgtgttacaaggaagaagtgaaatggcttggtatctgtttgataaaactagagaaacactgtacgatgatgattggtttcaagtgtttctcatttgtgtaaactctcgactttatgaactggccctggaaatgctcaatcagaaggaatcgctagcttttgctcggggtgataacgatgagacagctttgcatgttttggctcgaaagcctttggattgtggttgccgaagtccgctacgatatccaaaacacgtcctgcatttgtgcaagaacatgaaggaccctccggtcctcaaacttacaagacgcgtgtgggatatatttcttaccctcgatgactctaagatgatgactgcaattagagaaccatttcaagtaacatttattgccgcagaagttggcaatttcgagtttctatctgtgattatgagcacttatccggatttgatttgggaattgaatacgatgggtcagagtataattcacgttgctgccttgcaccgccacgctagcatattcaatttgatacacgaaattggcccaagcaaagatctcctgttaacattttgggatgatgaaggcagcacgttactccattctgtcgcagaaatagcaccaacagatcgacttaatgtagtttctggagcagctcttcaaatgatgcttgagttgacatggtttgaggaggtaaaaaagaacatgcaaccatcatatatagagaggccaaatcatgaaggaattgttcctagagaactattcaccgagaagcataaggagttgttgaaaaagggagaatcttggatgaagcgaacagcaagttcttgcatggttgtttcaaccctaattgccacaggagtgttttctgccgccttcagcgtcccaggtggtaccaaagacgattcaggatctcccaattatttgaagaaacatttgttcacggtatttgcaatatcagatgccttggcattaactctttctaccgcctcaaccctaattttcttgtccatactcatctcaagatatgctgaggaagattttcttaggtcattgccattcaagttgatatttggactagtgtcactatttctctcaatagtcagcatgatgggagcattcagtagtgctttcttcataacatattaccatgctaaaacgtgggttgttcctatcaccattgctgtatttgtgttgttcccaatattgttatttatatatctacagtttcgtctctggcacgacatagtgtattctcactacatgtgtggttctttgtttagaccaaagaaacgcatgattcactagaaacattgagtacaagctcaataattattttttttttcttat

SEQ ID NO: 20563 - DNA, 1644 bp, Glycine max
  Clone ID: LIB3242-198-H4_FLI
ctcatccttggcataatcatgggtattgaaacggatgattttgctggatgctgctcgcaagtgatcttgccaaggaagtagtctatgaaggaacaaggagttatagcgcacattttccatcccaatgtgcttaatacaagtagttccattttttgaatggttctagcttcaaacacaaactttggttccccaacctgtaaatctacggattgaggcactttgatctcctccattttagccgcaatcgacaagcaagctacagctaacaattgcacagtccaagtcacacctctcggtaaatcaaaaaccgataggaagcggtccaagtagttcacagctaaacaaaaactcaagggtccaaagccaaaataagaatgagccttacaaatccaatcaatagcctccctcctaacacccaagtccaactccccactcctcagcctcatcaagtaatcatccctcggcaaatgctccctctctctctccaccatagccctcacagtttcctcactctgcgccacaaaacacgccaacaactccgatccaccaccaccaccaccctcatggtggtcccagaactgatgcgagattctggagttggacccatctgcggcatcacaacattccaaatcatcatcgaagcagggttcccgttgcgtgaagccaccgatcatctatggtgatgtgagccgcccaaagccaatgaccgtcttctggtcatctctggctcagagctttaccaagcgcccaatgaagggaatgcttaccggtcctgttaccattctcaactggtcctttgttagaaatgaccaacctagatctgagaccacctaccagattgctttgtctatcaaggacgaagtggaagaccttgaaaaggctggcatcactgttatccaaattgatgaagctgctttgagagagggtcttccactgaggaaatcagagcaagctcactacttggactgggctgtccatgccttcagaatcaccaatgttggtgtccaggataccacccagatccacactcacatgtgctactcgaacttcaacgacatcatccactccatcatcgacatggacgccgatgttatcaccattgagaactctcgctccgacgagaagcttctgtcagtcttccgcgaaggtgtgaagtatggtgctggaattggccctggtgtctatgacatccactccccaagaataccaccaactgaagaaattgctgacagaatcaacaagatgctggcagtgctcgagaagaacatcttgtgggtgaaccctgactgtgggctcaagacccgtaagtacactgaggtgaagccagccctcacaaacatggttgccgcagcaaaactcatccgcaacgaacttgccaagtgaatggtataagaaagtagaatcttccaagtcatttggttctgctttatattataatacaccaaagaaaaattttctctatattgggttgtttcaataactgtgtgtggaatatttaggtgtcttagcatgctctgtgagcaattgattcttcctcaacccctccccccttatttttccccactcctgttttccctaatgaatgttgtatctttgcggcttcgccgcaatccttattgatctggaattttaccagttttgtgc

SEQ ID NO: 20564 - DNA, 1159 bp, Glycine max
  Clone ID: LIB3242-254-F12_FLI
ggaagcataacttggactcttggggtggccttgttggaagctgggaaggcgtattcggttaggtttggactccgtggtttttacttgcttcagatgaagatgaatccgcttattcttattcccattttgatactttctttcattcttctgctttgtgctttgtcgtgggttgtcaattggatgccaagatttttccggagacagtatcttccatttttcaggcataacagtgcgtccagtgcatctggtattaatatcccatctcctttccggtttcagcggtggagtcctatgaattctggagatggaagaacaaagaccccactcagcccaacaattgcaggttcacaggatagaccgtttagcctggggcatggccttagtgataacagtggaaacatccagctgatggaatcttcctttcacccatcagctagtagtgtctcacatagttattcctcgaacaatttagggcagatgcagttcgacagcagtagtataggggcattctggtcacctcacagaagtcagatgcatctgcagagtagaagatctcaatctcgagaagacctgaattcttcattggctgagacacacatggtgaaggcttagggtgtgatcttctgaaaactttgcgtttcagtttttgtcatggagatgacgaccacggggctaaagaagagttggcaagattgtttaattccatactaatttgcttcttctggatctcacttctaaactgatttcctctacaagaggcatagcacaacaaacaagaactcacattccatcattccttaccactctcctttagtggctactgagtgtccatgttctgccgtcgctgtacagttttccggtgaccataaaagccttcagatgtttaaagtttcaaagtcagctgagcgcgagaagcttttcaaaccgtgaagatcaatttatttgtgactattttcataccatttttagactaataaacctccattactacagagaatatccctttgtttcataggagacttttgactgggaaaaaagcacttggatgctgtaacagttaaaccgctaagaaaagttgtaatatgatacaatctcatatcttacatgtcaaaataagcttattaaattactcaattcagttgcaccttgcaagctactt

SEQ ID NO: 20565 - DNA, 291 bp, Glycine max
  Clone ID: LIB3242-265-C1_FLI
atctgttttgaacatgattgtctcttttagaaaatatttgtgatatctaaaagaagaaagagtgacccatcacatattcattagtacaaatcttagatacagttcttttagtggttatagtattattctttgttataattgaagtttcacctcgacaattggagttttactaattatcaaggtgaaatttttgttctgatcagagagtaatagtggtaacccttgaggtactctatctaagttttgtatagataaatattcgagtgcaaataaaatggagacttattgaat

SEQ ID NO: 20566 - DNA, 520 bp, Glycine max
  Clone ID: LIB3242-270-H9_FLI
ggagcagatgttagtagaagcaaacagatccttgacagtgaagctggaagaaatcaattcaagaaaccactacaggcaatcatgggaagctggtgatcaaagtatgccatatggtggtggtggtccagagaattctcactctcattctcactctcagggcttcttccaaccattggaatgcaaccctacactacatattggtcctgattacaggtacaatgctgtagcttcagatcagataactgccacaactcaacctcaacaagtgagtggctttattccagggtggatgctttgaactaattaggctcagtgcattcaggtggagacataaaaaagcaaacaccttacaaaagggcaaaagccaaaaatgcatcttggtgttggcaaggtgtaaatgcaaccctgcttctacagttattttggtgtataagaaactgatgttgtgacttgttcaaacttttgaacttttagccatagacatatatggcaatttataacattaggtatcttttaaagg

SEQ ID NO: 20567 - DNA, 1497 bp, Glycine max
  Clone ID: LIB3242-285-C6_FLI
aaaaccctaacactctctcattctcagtttttctcaatcttatgattaatggaagaccacgcgcatgctgcactacctcccggttaccggttctacccttccgaagaggttctcgtcggttactacttaaccaagaagaacgagaaccgggaggagggtttctacggttctgatttgatcagagaacttgacctctacgatcacgatcccttcgaattaccggacgctgctgcttgcttttcgtacggttacaaagggaggaagaagcattggttctgttacgctaaagagaccaaacgcagaaacagaagaaaggtgaaaagcgggttctggctccggaagggaaaggttcgggatatttccgaccacaacggcgacgacgtcgttttgggcacgaggacgcgtttcgttttctacgtcggcaattccctgaaaaacgctgccagaaccgattggattttgtacgaatacgcattggttgatcgctttctggcttcgtttgtgctttgtcgtgtggtgaataagcctcctcataagaatagtccgtcggagatcggtctgagttgttgtgctgaggagagtgttgtggcggtggtgcgtcacgttggtgttcagtgtgatggatgtgccgaaagtgatgttgttgaagctaaggtgtgtgatgaaggctttgttaatagagagaatgagattgctgagaatccaattagtggtgaacatggtgatccagctgcacctgtttcagttgctcagggaagtcagccggttcaggaaaggctttctaaacttcccagtggcagtgcattgttcgtaggagctatgacatctcagcaacttatgctttccattctagaggaggatttcatagaattggatgatattgcatgaattgattggttttaagagattttgtgaattctaatactgctctgaggagtaattatcacctgaaacaattgtattcagaatggattattgacccagctaaaggggagaaagatttatgataatgagtagctattattccactcaaacgaagaaacatactgtcgaatggggttgaggcaaatgtcatgaaatgatcacttcgcatgttaagattttctcctgtgcctactgcagggcaattggctccagagggatagagttagagttagatattggtattggtaattggaatatgcgatttactctagtatgctatgagcaacttcaccgtacttcatgctttcattgttcccttgatcgacctgttcctatttaaatttaattagcattcctgggatcatcagaatttcctatctgcaccttagtagcaagacctatttgttactgtctgtgctactttctttttcctatattgttcaagaggagaatcagatgaattccaaattgtaagtgttacaacataatgatagtttatgaattgacttaacctttatacttttgaggttatgctgactaattttatgttcttcatggtatttttgtttggat

SEQ ID NO: 20568 - DNA, 1678 bp, Glycine max
  Clone ID: LIB3242-287-G2_FLI
gtacgtaccgacatgactccaacctgatggggttaaacactgcttctgcgtaggattcgatgccgctactccttcttcagtttctacaactgagtttcatatctcctttctattgatgtttatgctgaagactgaataaaagtctgagaaagctgcttactacaaaccaacaagattaactaagaaatcatcttttgggacgatgcaaactgtttatcttaaagagcacgaaggaaatgcgcacaattttgtgggcacgttgtcttctgcagcttcagcaccctggtggagtgcttttggatctcaatctgttcatcagggagagtcttgtggccaagtgaaacccttttcattggagctgccaaactgcatagaccaacttgctgccactaagccactagcaagaggagctgaccaagtgttgggtaaagggcacataactcagtttacaatctttccagatgattgtaaaatgtcagatgatgcgcaaaagcttcagacaaccatgtcactgcagtcatcgcttactgatccacagtctcgtttgagatagggtttagtctgcccacgatatgtgcaaaatatccttatacggatcaattttatggactcttctcagcttatgcacctcaaatttcgggacgtataatgctgccacttaacatgacatctgatgatgaaccaatttacgtaaatgctaagcagtaccatggaatcattagacgtcggcagtcccgtgccaaagctgtacttgatcacaaattgactaaacgtcgcaagccctatatgcacgaatcacgccatctccatgcaatgcggcgaccaagaggatgtgggggtcgcttcttgaacactaagaattctgttgacggaaatggtaaaattggaaatgaagtgcataaaactgttggtgaacaattgcagtctagtggctctcagagttctgaattccttcaatctgaggttggaacttttaattcatcaaaagagactaatggaagcagtccaaatattttctggttcagaggtgactagcatgtattcgcggggaggtcttgacagcttttctctcaatcatcttggatctgctgtccactcttttgcagacatgatagatggtgggcgcggtatgatcatacccaccaaatgggttgcagcagcaggtaactgctgcaaccttaaagtttgatttgcaaagaatcaagggtgggcttgctgtagcattgcaccaggcccatcctcgatgaggccagatgaagaagcttcgtttcagttgcgtgtgctgactgtgacaagtttcgctcggtaagatcgtcctcacatctggtctaggcaatccatccttggctcatactttggcaatccatccttggctcattgtaactgaaggcaactcatccttggcttgatgtacttgcagtaatttgtctttctgcacaggaatgttgttggcatggtacaaactaatgacttgatatcctgatgcagaagacaactatgtttctgtctttgtgtgaaaatgaaagcatgaaactctagttatgtgtgcttcgaataatgtctaaacgtggtgttgtattttgtatttctgacttcgaggaacaatgtattatagaaccttgttctgtggtctttgttagaaaaaataaagcattggtgtgtttttctcctgttgagc

SEQ ID NO: 20569 - DNA, 1202 bp, Glycine max
  Clone ID: LIB3242-293-E6_FLI
aaaggggcaccccaccttctctctcctcctccccctttaatttccttctccttaattgtcttaatttccttgtattctggtataatctagctaaccctttttttccattagccatggtcatcaccatcgccaccttctaggtgggatccagggctcaatatataatatcacactcaacacagttaccagctccaaatctcaacaaatggatagcaagttcagaaaaaagaaccgcaacgttaactcatataccagtgaacaagatcaagacactgatatagctcaagaaaaccttgccgagtcccctccttcttccactgtgttcaacatcgatggcttagtcccctcccccacttcctcatcaaagagaaggagggcaatacagaaaagggtggtgcaaatcccaatgaaggagacagaagggtgtaggctaaaaggagagagcaacaccccaccctcggattcatgggcatggagaaagtacggccagaaacccatcaagggttccccttatcccagagggtactacaggtgtagcagttcgaaggggtgtccggcacggaaacaagtggaaaggagctgcgtggaccccacgatgctagtcgtcacttactcctccgaccacaaccatccctggccaccttctagaaaccacgccaggcccaccaaaaaacctgaaccggttccggacccggtcgaaccggaggagaagttcgcggacgagtccatgataacaaccgcggaagaattggggtggctgggggagatggaagcgacgtcgtccacggttctcgaaagcccgtttatggctacgacgtaccatgctgacgtggcgctgattccgatgagggaggaggacgagtcgctcttcgccgacctcggagagctgccggagtgctcggtagtgttccggcaggggctgctggcggagcggcggcggtacacggcgccgtggtgtgggaccacaagttgagggcaaaaaagtcaacacgaaaagaaaaaaagtagaaaaactagaggtgcctgttagacgcgttcttcgtgcgccacaagagaaaaagataccagcatttttttcctttttagtattgagatattttttattttttttgttttaccgttgttaagacattaattaaaaattaaaagttattgtaaaaattataaaaatattcaaaagaagttataaacaatattatttt

SEQ ID NO: 20570 - DNA, 1843 bp, Glycine max
  Clone ID: LIB3242-294-H8_FLI
gaaaacctagcttctttgagtttaaaccacacaatagatcaaatatggttcccgcagactttgacaaccatgcaagtgaaaaatctactcaaatagatggtcaaggaaaagctcaagcttttgattcatcaccattagtaaaaaatgagtcagcatccccttcaaatgaattaagtctatcatcacctgttcaaatggattgctcaggaggtagtgcccgtgttgaaggtgatttggatgaattgaaccctagaagcaacataacaactgggcttcaagcatcacaagttgacaatagaggtagtggactttccgttgcagctgatagagtatctgatgatggatacaactggagaaaatatgggcaaaaacatgttaaaggaagtgaatttccacgcagttattacaaatgtacacatcctaattgtgaagtcaagaaactatttgaacgctctcatgatgggcagatcactgagataatttacaagggaacacatgatcatcctaaacctcaaccaaaccgccgttactctgctggaactattatgtctgtgcaagaagagagatctgataaagtttctttgaccagccgagatggcaatggatcctatatgtgtggccaggggtctcacctggctgagcctgacagtcaaccagagctatcgcctgtagcaacaaatgatggtgatctagatggtttgggggttttgtcaaaccggaataatgatgaggttgatgatgatgatcccttctcaaagcgaagaaaaatggaccttggaattgctgacatcactcctgtagttaagcctatccgggagccacgggttgttgtacaaactctgagtgaggttgatatcttggatgatggctaccgctggcgcaagtatgggcagaaggtggtgagaggcaatcctaaccctaggagttattacaaatgcacgaacactggttgccctgttagaaaacatgtggagagggcatctcatgatccaaaagctgtgattaccacatatgaggggaagcacaatcatgatgttccaactgcaaggaatagttgccatgacatggcaggaccagcaagtgcaagtggacagacaagaattaggcccgaagaaagtgataccatcagccttgaccttgggatgggaattagcccagctgctgaaaacacaccaaacagtcaagggagaatgatgctttctgaatttggggatagtcaaactcacaccagcaattccaatttcaattttgttcatactacgacagtgccagggtactttggtgtgctaaataacaactctaacccatatggttctagagaaaatccaagtgatggtccatctttaaaccattctgcttatccttgccctcagaacatagggagaatactaatgggtccttaaaattgtttgtacaacaaaaaactaaataaaatgaaattctgagttccattttgctttttcttttttggcgggtaaagctttaaaagcatagctcctcattttctctttggaaatgctgatagttcttttatgttcatatccttatatgatgagagctgctctttagcagaattagctgtagctgtgccccttcaggttgactcttaattctaattgctgtttgtataattatatacagattcttctgtacaaatatgaagcttataccaaagttgcttcaacaaaaaaccttgtaaaagtgtttggtggattcaactatttataagtagtttctagcctgttctcgaactcttggattttattccataggattactgtaaattcatggtagccagagttgctcagcccttgttaaaaggtcatatataccccgcatgact

SEQ ID NO: 20571 - DNA, 1826 bp, Glycine max
  Clone ID: LIB3242-297-B4_FLI
gaaggcccttaaactttcgctctctctgcttcactttctcgcttttgcattttcttgtgaaaaaaaaaaatcctcagaacaaaaataggtcttcttcttctctgatctaccaaagcttcaaattctccttagtttggtttgtctgtgagtttggagtgtaatgtcgccgccgacgctggtaacggaggaggaggggcggagcaccgtggcgtccgattcttcgcaatccttggactgtttctctcagaatggtgctggattgaaagaacggaattacttagggttgtctgattgctcatcagtggatagctgtgcctctactgtgccaagcttgtgtgatgagaaaaaggagaacatgaatttgaaggctacagagttgaggcttggtcttcccggattccaatcgcctgaaagggaaccggatcttttctctttaagctcaccaaagcttgatgagaagccactcttccctttgcttcctactaaagacgggatttgctcgtcggggcagaaagctgttgtttctggcaacaaaagaggttttgctgataccatggatgggttttctcaggggaagtttgctggtaatacagggatgaacgcggtgctatcacctagaccttctggagctcaaccttctgctatgaaagaaacaccaagcaaattgtcagaacgtccttgctcaactaataatggaaccggtcataaccatacaggtgcttctatcagtggcagcgcaccggcttctaaggcacaggttgttggttggcctcctattagatcatttaggaaaaactcaatggctaccaccactaacaagaacaatgatgaagtcgatggaaaaccaggtgttggcgcactctttgtgaaggtcagcatggatggtgctccgtatcttaggaaggtagatctaagaagttatacaacatatcaggaactatcttctgcccttgagaagatgttcctaagctgttttaccctaggtcagtgtggttcccatggagctccaggaagagaaatgttgagtgagagcaagctgagggatcttctgcatggttctgagtatgttctcacttatgaagataaagatggagattggatgcttgtaggggatgtgccatgggaaatgttcattgagacttgcaaaaggctgaaaattatgaagggttctgatgccattggtttaggtatgcattctcagcattgattttttttaccgttattcactgtacctaatgtggaagaccatcacatgaactaatagatccagacccatgtctaagaactataacccgacacatgatcctgtatcacttgaatctagacaaacatcaatatatgctatttcatggaatattagaaacattatatatcaataataatacagggccaagatatcactaataactctgtgccttataaactacaaacaatgtggctcagtttgcttaagtagattttcttgcctcagctcccagggccatggaaaagtctaaaagcaggatttagggtatcctggatttcctcttttgtctaatcaagtgtttattgttggatcctccggaatgggaaaagcaaaggatgatgactgaaatcctggcattggtggtttaacgcccttccacttatttgttttcaagtccctcaagagtttgtcatggtcctgtgttaatttgttaccactgtaatatcatatgaaagctacaatgaaatattagtatttgtggagtctgtaatcattataggaatccgtttgttttggaagaattgaacatctgttacagccgccaccatacggttctaacactatatttgtgatttgcgtc

SEQ ID NO: 20572 - DNA, 1265 bp, Glycine max
  Clone ID: LIB3242-299-B5_FLI
ccctctttacccacaccctctctctctctctctctgtcacgcacagagaaaaactcagacacccacgttcacacttcgcacacaccatctctcactgttctttcttcttcctctttttctttttttttttcttttctcttaatggaatgatggaacacaacatcatcgtcaacaacaacgtgatcgcaccgtttgtcataaaaacctacaatatggtgaacgatcccaccaccgataaactcatcacgtggggcccagccaacaacagcttcatcgtcctcgatcccctcgacttctcccactccctcctccctactttcttcaagcacaacaacttctccagcttcgttcgccaactcaacacctatggtttcagaaaggtggatccggatcggtgggagttcgcgaacgagtggttcctgcgaggacaaaagcacttattgaggaacatcgtgcggaagaagcacggtggagctgggaggaccaattccaattcgcattattcgcatcccttgaagctggaggagttggacgacgaggctatggtgatggagatagcgaggttgaaggaggagcaaaaagcgttggaggaagagcttcatgaaatgaacaagaggttagagacaacagaaaaacgaccacaacaaatgatggcttttctgtgtaaggttgtcgaggacccgcagattctttctcggattctccgagaaagagaaaagaaacacctgggagagaaaaagcgacgcctcattccgcctccgccgccgacggcagcgacgtcgtcgtcgtcgtcctccggcatcaagacagagttcgaagaagacgaaggtaattataatatcaagtcttcgtcgccggagacagggttggaaatcgacaacaatagtaacaatatttgttcgccgccgccgctggggtgttggggtgaacagggttgttatgggtacaattgcgcctccgtgccggcacctttgacggtggtagcgccggcgtttccgacgatgggaggagggtatttgaggcgtggggggttttggggggaaatggcggcggaggggaatgcggtgccgccttatccgttttcgttgttggaagggggcttttagatttagttttaggttatgaaatgaatgaattattactgccacaaaatttcatcttggattttctgtcgtattgaaagttctatccttttttgtgcgttgattctgtgtaaagaaaaaaggttgggaaaaagagtaaaaaggtagtgggaaaattgttag

SEQ ID NO: 20573 - DNA, 729 bp, Glycine max
  Clone ID: LIB3242-301-G2_FLI
gcataattcaagagctgcatgctaggtggggaaacaggtggtcaacaattgcaagaagcttgccaggaagaactgacaatgagataaagaattattggaggactcacttcaagaaaaaagatgaaaactccatctgatgctgctgagaaggcgagaatccactcctcgaggagacagcattttcagcagcaacaacagcagttgaagcagcagcagcaacaattccaattcaacttggacatgaaagggatcataaacttgcttgaggaaaatgaccatagagtgccttctatatctcaagaggcacaagaaatggccagcatgtacccaaacacttcagaacaccagggctacttctactcaatattcaatgtcaatgacaatgacaataatgtctctgcacctgagtcctcaaatgaagaaattctatgggatggactgtggaacttggacgatgttctttgcaatttcaatgcagctagtgccacaagcaaagccagtttacacaatttagtttctcctttctgttaaaaggttttatttagccttgaaaacagttaggaagaatagtagtgtactaatgtcagtcacggcttgataaggctccaaaatcctgcagcttagagttaggattaattgtttcttaaaagtgtggagtctgggtagtaagtaatttctgaaggcgagttattgtgtaaccctttaataaagtatctcaattttgcttat

SEQ ID NO: 20574 - DNA, 685 bp, Glycine max
  Clone ID: LIB3242-304-F10_FLI
cttggacccagatctcagctccagaaatcaaggattttctttgaatcatggattttagctaaataaatcataaatcttcataaatggatcaagttgctcctcctccgattctcatgcaccgcaagcgcgatctctcctacgccgtcgtttcgcctgctcccaacccgagctggagctgggactgggacagcgtgcgtttcgccggcaaaccaccgccaccactctcctccccaaacgacgacgtcgtttttgaggagagtgttgcgccgcctctgcagttaaacctcgggggaaggacgaacaacagcaacagcaacaagagagttaggtcagggtcccccggaacgtcgtcgtatccgatgtgccaggtggacaactgcagagaggatctgtcgaaggcgaaggactatcaccggagacacaaggtgtgtgaggctcatagcaaggcctccaaagcgcttctcgcgaatcaaatgcaaagattctgccagcagtgtagcaggtttcatcctctctcggagtttgatgaggggaagcggagctgccgccggagactcgccggacacaaccggcgccggcggaagacgcagcccgaggatgttacctcggcgactcccgcgccagccgccgccgcgaatttggaaatcttcgacttgttgactgccatagctggagcttcgcaggg

SEQ ID NO: 20575 - DNA, 927 bp, Glycine max
  Clone ID: LIB3242-307-D11_FLI
gttttgttggtcatgtttgtataggtggctgcatctgcattcggatgcgaaggaatgtccagtttgtaagggagaggtgacacttaaaagtgttaccccaatatatggccgtgcgaacaatgtccgtggtcctgaggaggattctgcacttaagatccctcccaggccccaagcgaagagagttgagagtctgagacaaaccattcagagaaatgcatttgcactccctgtggaagagatgattcggcgtcttggaagcagaattgagcttacacgcgatttggttcagccacctgaaccggatgctgcccgtgaaacagctgagagaactacttccttgctaaggttcttgactgcgcaagggatacgtagagagcatcagaatctagtggcacccccagaggatgtaatgggtttggcacaaaacaatgttaatacttctgaggcaggggatccccggactagggtgcagtcccatttgcttcgaagaacacaatcacacagagcaacactttctactctttcatcagcactaacttccgctgaaaggttagttgaggcatatttccgtagcaatccattaggtaggaaccaagaacaacctcctcctccagttgaagacagagattccttttcaagcattggtgctgttataaattcagagagtcaactggacactgctgtagagattgattccatggtatccttgtcaacatcctcttctaggaggaggaacgatgcttcaagagtgtctgatgtggatagtggagattctcgtgctccaaggcggagacgtttgaactgataaaagtctgttagatgctcaagttttactattctatcatgtatcacatatgataataatcttccaacacctatgtaagtgcttcatgctttcttgttaccttatattatgaagttttcacc

SEQ ID NO: 20576 - DNA, 1969 bp, Glycine max
  Clone ID: LIB3242-308-B9_FLI
gcagcactgtccccagaagatctcacagatgctgagtggtattacttggtttgcatgtccttcatattcaacattggccaagggttaccaggaagaactctagcaaagggtcaacccatttggctgaacaatgcccattcttctgattgtaaaatttttagccgttctcttctggcaaagagtgcatccattgagacggttgtgtgctttccgtttagggaaggggttattgagttaggtactactgaacaggtcccagaagatttgagtgtcattgaactgatcaaaacttctttcttgaatagtctgcatgccaatgttcccaataagtcagtagctacattgaaatcaaggaaccaggaaggtctttcttatgcagcatttgatcataatgactataatgttaaatcaattccagaagttgggtatgaaatagccaacacaacctctcctgatggtagttcaaatgcattccaagccaatcaaccgctagatgaaacatttatgattgaaagtataaccaatggcacttctcaagtccaaaactggcaagttattgatgatgaattgagtaactgtgtccataactccatgaattccagcgactgtatatcacaaacttttgcctgccctgagaatattgcttctgcccccaagtctaacaacccttctgatccttgtgcccgaaattttcaaaagtgcaacaacccaaaaatgaccttagtggatcctcgaagtgatgatttgcactatcagagagttctttctacccttataaaaagttctgaccagttacttatgggaatgcatttgcaaaaatttcctcaggaatcaagctttgttagttggaggaaagaacagccaatggattgcaaatggccaagagcaggaacgtcacaaaagttattgaagaaagtattgtttgaagttcctcaaatgcacttggatgggctgcatgagtctcaagaagagaatgactataaagagggaatgagagtagaggctgatgaaaacggcatgaaccatgttatgtcagaaaggaggaggagagcaaaactaaatgaaaggtttttaacccttaggtcaatggtcccttcaatcagtaaggatgacaaagtttcaatactagatgatgctattgattaccttaaaaagctcgagagaagggtaaaagagttggaagctcacagggtggtaacagacatagagactgggactagaagatcaccacaagatacggtggagaggacttctgatcattattttaggaaaaataataatggcaagaaaccagggatgaaaaagaggaaggcttgtggtgtagatgagacagaaaaagagattaattcagatgctttaaaaggaagttatgctaatgatgttactgtgagtaccagtgacaatgaaattgtgatcgaattgaagtgcccctcgaaagcaggaaggctgctagaaattatggaagcaatcaacagtttcaatatagattttagttcagttcagtcaacagaagctgatggaaatctttatctgaccattaaatctgtgctcacaggaccaagtgttgcaacaaccaaaagaatcaaacaagcactccaaaaattggcttccaagtgctgaatttttatctataccttaaaaaccgtggggggtgttgaatctaattcataccactgccgtgtgacatagagagtccattagaatgatggagtcacaactcactagtgcagctcttggagattttttttctttgaagatttctcataaaaggaaaatgtagactttcactcatctttcggcaataccataactcttggtgacgcaagatatatggactttgaatcacttgtaaatgggtaggtaggcttagttgactagatttatgtaattaatgccacttgctcctatgggaacactaaggttgaccaatgactaaatattgacagagagacgtacattattaattatg

SEQ ID NO: 20577 - DNA, 621 bp, Glycine max
  Clone ID: LIB3242-311-C1_FLI
gcggtgaagtccgccgttgaagaggttctgggatggatccggattctgaaccctaaaatcgtgacggttgtggaacaagaagccaaccacaacggggaagggtttttggagcggttcacggaggctttgcattactattccagcgttttcgactcgctcgacgcgtgtccggtcgaaccggacaaggctgctttggcggagatgtatctgcagagggagatatgcaacgtggtgtgctgcgagggaccggcgcggctggagcgccacgagccgctcgctaagtggagggatcggctggggaaagccggcttcagagccttgcatttgggtttcaacgcctacaagcaagccagcatgttgctcactctcttctcagctgagggtttctgcgtccaagagaatcaaggctctttgactctggcttggcatagccgccccctaattgcagcttcggcttggcaagccgcgcctctgggagacgacgaaacgctgcgttttgagcattgaggaacagaacagaacagaacagatcacttgtttttgtttattctagtaactagtagcagtagtagtagtacacgggaagagtggtgaataataataatgtggtcatttttgcgt

SEQ ID NO: 20578 - DNA, 864 bp, Glycine max
  Clone ID: LIB3242-312-F1_FLI
ccgtaatttaattctagctaatttgctaaagtaccagcaaaatgtatcctacagtagatgaacatgatgaggtatatgcagctcatcatagacatccagggtatgttctaccagttgtggtgccaccaaattatggccctcctcaaattccatcctatgctcctccatacatcagcaacagtgttagtgtaaggggtcctgtgattaggacacagcgatggtcaactggtctgtgccgttgtactgatgatcctggaaactgtttggtcacttgcttctgcccctgtgttacatttggattgatagcagagatagtagataaaggcaatacaacttgcacttgtgctggggctatttatgggaccctactagctctgagtgggcttgcatgcttgtattcttgctattataggtccaaactgagggtacaatatgacttaccagaggctccatgtatggactgtttagttcatttctgctgtgaaacatgtgctctatgtcaggagtatagggagcttaaaaaccgtggatttgacttgagcatagggtgggaagccaacatggaaagacaaaggcaaggagctatagtatcaccagtaatgtcacaatctatgacaagatgaaaagtgaaacctctttaggagcattttggtctaccctgagatcgagctgttggttggtgctgttaatttcaactccttgtggtgtgtgtctatatatatatatatatatatatatatatatatatatatatatatatatatatatattctgtttgctgcttcgtttgagttttgttttatcaggagttggtttgagtgtttttattattcaaaagaaatgaacatttgtgtcaaattatct

SEQ ID NO: 20579 - DNA, 1729 bp, Glycine max
  Clone ID: LIB3242-315-C9_FLI
ctcctcaactcaacaacaaaacttccaactaagttccttccacgctggtagagtttccaacaccacaccagccacagaaataagtttgtggaaaataagaaaacaacattttactgttgttaccgttctacctaagaagaacaatctcaaactaatacacaacacaaaaagagttacttaagaagcatagtgtggaattattgacttaagaaatttgaaaaccactttgtcccatcccacttggacttccacctcacccctttttctcaacgccatgaaaatagatatcagcaattgatcaaaggtcattttgtttttgtggctctgagaggggagtgattctaaactaaaatatatgggggctggggaagagagtacagctaaatcttctaaagtatcttcggcagctcaggagacaccaacagcacttgcatatcctgactggtcaagctccatgcaggcctattatgctcctggaggcactccacctcccttttttgcctcaactgttgcttccccaactccccatccctatttatggggaagccagcatcctttgatgccgccatatgggactccagtcccatatccagctatatatcctcctgggagtatctatgctcatcctagcatggcagtgaatccaagtattgtccagcaaagtacagagattgaagggaagggagctgatggaaaagatcgggacttgtccaaaaaattgaaaggaacttctgcaaatacaggttccaaagcaggagaaagtggaaaggcaggctcaggttcaggcaatgatggcatatcgcaaagtggagaaagtggttcagagggttcatcaaatgctagtgatgagaatactaaccaacaggaatcagctgcaaaaaagaagggaagctttgacctgatgcttgttgatggagccaatgcacaaaacaattctgctggtgccatttctcaatcttctgtgcctggaaagcctgttgtcccaatgccagcaactaatcttaacatcggaatggacttatggaatgcatcttctggtggtgctgaagctgcaaaaatgagacataatcaatctggtgccccgggagttgcccttggtgatcaatgggtacaagatgaacgtgagctgaaaagacagaaaaggaaacagtcgaaccgagagtcagctaggaggtcaagattacgcaagcaggctgagtgtgaagagttacaaaagagggtggagtcgctgggaggtgagaatcaaactctcagagatgagcttcagagactttctgaagaatgcgagaagcttacatcagaaaataattctatcaaggaagagttggagcggttgtgtggtccagaagcagttgctaaccttggatgagaaagcaacgcatttcagttcctcagtttagtgtttgatggtaacggcaaaatttgatagattcttaattaagacgaatctgcagctagaattttcttatcaatggccaggtctcttaattgagaataggatataaagtttttttctttgttatactaactctatgtcattaaccctcaattgtaattgcccttgtgattttacatgtcatttgtttgtaatattaaccagtaccttagaatagaaaacgtaggctacttgagcacttttgttcagaacttagttttgcaagtgatgttaagaatcctgcttcaacttttcaaatctttcactagttgactatggaatcatttttgttct

SEQ ID NO: 20580 - DNA, 658 bp, Glycine max
  Clone ID: LIB3242-315-H7_FLI
cttcatccatgaatctgtgagacttatgcatgaggctggttatgagattgggaatttagatgctacattgatacttcagaggccaaaactaagcccacacaaggatgctatcaaggccaacttatctgcactgcttggggtggactcttctgtagtaaatatcaaagcaaaaactcatgaaaaggtagacagccttggagaaaatagaagtatagcggctcacacagtggttcttctaatgaagaaatgagaagacaatctggaaatattgaggaacatgagagaactttaattggaaaaaaaaaacccataaaagttaataaactatgtttttttagcttctagtgtactgtttattgtttatcatatcttatagttcaccctgacagcaaattattcattggtgtgcctcttgccctgcattttgctaagatcttagtggctgtcttttacgttttatcatttggtattaagagggaccctgtataggtttgaacggcagatgcggccagtcggcgacaaatatatttagttatgtctgtgtataaactatgaagtgagcttgtttttaaaacaagcaagggtccatgaaaaatttgtaagtgcttacgtcatttcaaaacaaatttatggtcaaatgtggtggttaacaactttc

SEQ ID NO: 20581 - DNA, 1508 bp, Glycine max
  Clone ID: LIB3242-317-E4_FLI
ggaagggttaccctcttccgtcttctccagtccgaagtctgcgcctttaccgagggtcgcattgaattggaagaaatcaaagaagaacgaatcaataacacgaatacctcaagtgagagggagaaatggaatcgcctccgcagctgggttcaagaggggcagaaacacttaaacatatagctcctggatcatcaatttctgttgcatatcacccatcttttggaccttatgatgacctcctctttctagagcttgatgagaaacttctcccagatgttctgaatgaaagggtggtcttgagaggacagcctgatgaagatgccgttctttgtactctatccaaaacctatgctatgaagtttgttggaacttccaattctgttctgcttgtacctccagcaaatcattcggaatttagtgaaaatccacaaaagaatgatagtactaatgatgaagacaaagttgttgtacctgtactcaaagttgtatctggtaatatggagcttattgagacagcccccagacttgataagcttaaattacttctgtcagaaaagccttacaaattggaggaggatgacatgggaaatttagaagagaatcaggaatctagaataggactatataactggaattatcttgtagacaatattcaagctagtgacaaggaattattgtcgggactgcaggctctttcagcgctggagattaatgggtattggagactagtagacgggagttacatggacatgattctgggaatgcttttgaaaaatgcagtgttgaatgactggtcacttaatgctttaaatgaagatgaagttgtgagtatactggaatcagatggatttcctagggtgcttgcaaggcattgtttgcacgtatatggcaacaaagtaaatgagtgcatgcctagctttgtttggaagttggatgagaagcgagtatgcatacattttgcaagagaaatcctgaaagggggtaagagaaagttagagagtttcatggatgaatggaagcagaagattccagacggaatgcatcccacttttgatcttgtggaaggagaggtattaacagagagacttggagttgagacatgggttcgtgccttcagtgtcgcgtctttgccttccactccagccgagcgtttctccattcttttcagagagaggccaaaatgggaatggaaagatctgcagccctatatcagagatctgaaggtaccaggtctttcttcagaagggttgctactcaaatacactcgaaggacacaaccatcacctgacacagaaccagttttcagtgcaagatagtatgtacttgtgtatcttcaacagtacttattttcttctccctcacttcagattggcaatgtctagtacttctatattaaagtttataatttcttgtatttccactatatgtttgtgtgtgtgtgtaaaatcaagatttgttacaatgctttactatttaagacatgcttagcagaaataacttgtggtgat

SEQ ID NO: 20582 - DNA, 1183 bp, Glycine max
  Clone ID: LIB3242-325-B5_FLI
cccatctctcaaagctttacacgcttttaacactctctagaaaagtggtgttcttttttctttctctgaggactcgttgcttttcctttttcccattctcttcttaaatccatggacacggctcagtgggcacagggtattggagtggttaaacaaccgatggaaggttcaaagcctcctcctcctcctcctcctcctatgttggagagaagggcaaggcctcaaaaggatcaagctttgaactgcccaaggtgcaattcaacaaacaccaaattctgctactacaacaactatagcctctctcagccaaggtacttttgcaagacatgtagaaggtattggactgagggtggttctctcagaaatgttcctgtgggtggtggctctagaaagaacaagagatcaaccccgccagcaccaccatcagcaccagcaccaacaaagaagctttctgatctcgcaacaccaaatttccctcaatctgcttctcaggaccctaagatccaccaaggccaagaccttaacctagcatatccaccagctgaggactacagcactgtctccaagttcattgaggttccttacagcactgaattagacaagggtactactggtcttcatcaaaaccctacttcctcatcaacaacaacatctgcatcttctcagttgtctgccatggagcttctcaagactgggattgcagctgcttcctcaaggggtttgaactccttcatgccaatgtataattcaacccatgggtttcccttgcaggactttaagccaccacatggccttaacttcagccttgaggggtttgaaaatggttatgggggtcttcaggggattcaagagggtcccactggtggtgcaaggatcttgtttcctactgtggaggatttgaagcagcaagttccaagcacaaatgagtttgatcagcagaatagaagtcaagagggttcagctcacgggtattggaatggcatgttaggtggaggatcatggtagatattattagtgaagaaaaaagagaacaaggggttgctgttttagcctttatttttattttattttcttaatggggggagtgtggttgtgtttggagtgtgtgatctgaaccactaacaaaaaataggatacattgcttcttctgttttgcttctctttaatccatttcatttttttt

SEQ ID NO: 20583 - DNA, 1207 bp, Glycine max
  Clone ID: LIB3242-327-B10_FLI
cggcgcaggcgccgaatccggagatttgaagggagagacggcgccggtggacggcctcttgaactggcagaatgcgagattgaaggcggagattttaacgcatcctctgtacgaacagcttctgtcggcacacgtggcgtgcttgcggatcgccacgccggtcgaccagttgcccaggatcgacgctcagctcgcacagtcccagaatgtggtcgccaagtactctgccttcggacaagccatcgttggcgacgataaagaactcgatcagttcttgtcccactatgttctgttgctctgttctttcaaagaacaacttcaacagcatgtccgggtccatgcaatggaagcagtcatggcttgttgggagatcgagcaatccttacaaagtttaacaggagtttcacccggggaaggtacgggagcaacaatgtctgatgacgaagatgagcaagtagatagtgatgccaatctgtttgatggtgctttggatggtcctgatagcatgggattcggtcctcttattcccacagagaatgagaggtccctcatggaacgtgtaagacatgaattgaagcacgaattgaaacagggttataaagataaaatcgtggacataagagaggaaattttacgtaagagacgagctgggaaacttcctggtgacacgacctctgtccttaaagcttggtggcaatcacattccaagtggccttatcctacggaggaggataaggcacggttggtgcaggaaacgggtttgcagttaaagcagatcaataattggtttatcaatcaaaggaagaggaactggcatagcagtccctcaacttctactgttttgaagagcaagcgcaaaaggtcttaatagtgctgatcagtacacgtaaatggaggaaaactcgagaaccaatcccttactgtactctgttagtatgtctctgcggtcaatcatggtgcatggcaagggattcaagtaaagtcaatgatagaaaaaaaagttcagattttgtttttgctcaaggaacaggcctaaaacacagatgtggaggattaaaagcctgtagtacggtgatgcatcaaaattagggagttcaattaggaattatataccgatatcaaaatgggtacctccatgggagcatatttttagtctcattaatgtttgtgaaatatatataatagtgaggggttgtgggtgtatagt

SEQ ID NO: 20584 - DNA, 3097 bp, Glycine max
  Clone ID: LIB3242-331-A5_FLI
gaattcgagggaggagtctaatttgcctcagctgctgcaagagattcaggacaagctcgtcaaaggagctgtcgaatgcatgatttgttatgacatggtgcgcaggtctgcgcctatctggtcttgctccggttgcttctctatctttcacctcacttgtatcaagaagtgggctcgtgcacccatttctgtggatttgtccgttgagaagaaccagggcggcttcaattggcgttgccctggttgccagtctgtgcagctcacttcatccaaggatattaggtatctatgcttctgtggaaagaggccagatccaccctctgatttgtatctcatgccacattcctgtggagaaccatgtggcaagcctcttgagagggaccttcaaggggataaggagcttctttgccctcatctttgtgtcttgcaatgccatcccggcccctgtcctccttgcaaagcatttgcccctccacgtctgtgtccttgtgggaagaaaaatattaccactcgttgctctgaccgccagtctgttcttacctgtggccagcgctgccaaaagcttcttcaatgtggccgtcatcgctgtcagcaaatctgtcatctgggtccttgtcatccttgtcaagttccaatcaatgcctcttgcttttgtgcccaaaagatggaggtaattctttgtggggagatggctgtcaagggtgaaatcagagcagatggtggagtattctcttgtggttccacttgtcaaaagaaacttaattgtggtaatcatatctgtatcgagacttgtcatccaggtagctgtggggactgtgaattattaccatcccgtattaagacatgctgttgtgggaaaactagattggaggagaaacgccacagttgtttagacccaattcctacctgttcacaagtatgtggcaagtaccttccttgcgggattcatcattgtgaagagccatgccatgctggggattgttctccttgtctggttctagtttctcagaagtgtagatgtggctcgacttcccgaactgtggagtgttgcaagacaaaaatggaaaatgagaaatttacttgtgaaaggccttgtgggcagaaaaagaattgtggaaggcatcgatgtagtgaaaggtgttgtccactttctaatccaaataatattctaaatgcagattgggatccacacttctgtcaattgccgtgtggaaagaagttaaggtgtgggcagcatgcatgtgaatccctgtgccacagtggtcattgtccaccttgtcttgaaactatatttactgatttgacatgtgcttgtggtaagacttcaatccctcctccattgccttgtggcacaccgcctccctcatgtcagcttccatgttcagttcctcagccttgttcgcatccagcctctcacagctgtcattttggagattgccctccttgttcaatgcccatagcaaaagaatgtattggtggacatgtagttcttaggaacataccttgtggttcgaaggatattaaatgcaataaactctgtgggaagaccagacagtgtggtttacatgcatgtggcagaacatgtcacctccccccttgtgataatctgtcagctgtgccaggtatccgagcctcttgtgggcaaacatgtggtgctcctaggagagactgccggcatacatgtacagctccttgtcacccttcaactccatgtccagatacaagatgcaaattccctgtcacaattacttgttcttgtggccgaataacagaaaatgttccttgtgatgctggtggcagttgtgctaattatgatgctgatactgtacatgaagcttccattattcaaaagttgcctgtgcttcttcaacccgtggctgcaaatggcaaaaaagtccccctcggacaaagaaaactgatgtgtaatgatgactgtgctaagttagagcggaaaagggttcttgcagatgcttttgagattaccgctccaaatctggattcactccattttggtgagaattcggttgcttctgaattgctggctgacatgttgagacgtgattctaaatgggttttatctgttgaagagagatgcaagtttttagtacttggcaagagcagaggaaatgcacatggtccaaaagtccatgttttctgtcctatgttaaaggacaaaagagatgcagtgagggtgattgctgagagatggaagcttgcagtgaatgcagctggtcgggagccaaagcatttcgtagttgttcatgttaccccaaaatcaagagctcctgctcgtgtgctagggtttaagggtactacaactgtaaatgtaccccttcctccggcatttgatcctttggttgatatggatcctcgacttgttgtctcttttatagacttaccaatggatgcagatattagtgcattggtgttgagatttggtggtgagtgtgaacttgtttggttaaatgacaaaaatgcattggccgtttttaatgaccctgcccgtgctgcaactgcaatgaggaggttggatcatggtacggtttatcagggagctgtggtggtggttgttccaaatgtcggggcatcagtagcatcttcagctaccaatgcctggggaggatctgggacaatgaaaggaggagcactggcagcattaaagagtaatccatggaaaaaggatgttattcaagagccaggttggagagaagatgcttggggtgatgaggagtgggctactggttctgctaatgtcaaattgcctattcagaagaaagaagcccgaatatctgcttcagtaaatccttggagtgtcctaaatcaagaatcgtcttcaagttcatctgttgcagccattaaaattgatgggttctaggaaacactctgaaagtagtgttatcacaaagttggagcctcgtgatggtggttcaaatctaggagggcagcctgcaggaaactttgatgctttggaagcttctgatgtagtagatgattgggagaaggcttgtgaatagcaaggagtaaacatttttcattttattttgttgagaaggaggcagattttgactagtgaaatgtctaaggctctttttgtcca

SEQ ID NO: 20585 - DNA, 2572 bp, Glycine max
  Clone ID: LIB3242-336-C9_FLI
atttccttctctacaacacaacacaacacaacgctctcttctcttctcttgcaaccaaattacaacttgttccactctctactactctataaggatttgatttgggacatgtgcagtgattcaaaaagtaaactactttcttccccaaccctcgtcatggaggatggtctctacaacaactcggttttgcttgaattgtctgcatctgatgattttgaagctttcaaaagagaggtggatgaaaagggcttagatgtgaacgaggcaggcttatggtatggtagaagaattgggtcaaagaagatgggatctgaaaccaggacccctctcatgattgcttctttgtttggaagcgctaaggtgctcaattgtattcttcttgagaagaaaggaggaggtgttgatgtgaacagggtctgtggttctgatagggccacagctctacattgtgcggttgccgggggctctgaatcctcacttgagattgtcaagctcttgcttgatgctggggctgatgccgagtgccttgatgccagtggcaacaagccggtcaatctgattgctcctgcctttgattctttgtcaaaatcgcgaaggaaggccatggagatgttcctcaggggtggtggggaaagagacgatgaactcatgagccaggagattcaagagagaaaagaagcaattagtgataataagaaagaataccctgttgatatatcactgccagacataaacaacggtgtatatggaacagatgattttaggatgtacaacttcaaggtgaagccttgctcaagggcttactcccatgactggaccgagtgtccattcgttcacccaggggagaacgctaggaggagagacccacggaaatacccttacagctgtgttccttgcccagagttccgcaaagggacctgccagaagggtgattcctgtgagtatgctcatggtgtttttgagtcctggctgcatcctgcccaataccggacaaggctttgcaaggatgagactggctgcgctagaaaagtctgcttctttgcccacaaacctgaagagctacgccctgtctatgcttccactggctcggctatgccatcaccaaaatcatattcagctagtggacttgacatgactgccatgagtccattggctctaagttccacatctttgcctatgcccaccgtttcaaccccacccatgtctcccttggcagcttcatctcccaagagtggaagcttgtggcagaacaaaattaaccttactcctccatcgttgcagcttcctggtagccgactgaaggctgctctgagtgccagggatctggagatggagatggaactgctcggcctagaaagccctgcccgccaccaccaccaccaccaacaacaacaacaacaacaactgattgaagagattgctaggatctcttccccttctttccggagcaaggaattcaataggattggtgatttgaatcctactaaccttgatgacctgttattagcatctgccgacccttctgtattatctcaactacaaagtgggcttcagatgcggcaaagcatgaacaaccacctccgtgcgagttatccatccaacgtcccttcctctcctgtgaggaagccctcatcttttgggtttgactcatcagctgctgtggcaactgcaatgatgaattccaggtccgccgcgtttgcaaagcgaagccaaagtttcatcgatcgtggagctgctgcaacccaccaccatcttggggggatgtcttccccttccaacccttcctgcagggtgtcctctaccctttcaggttggagttcccctaccgggaaactggattggggcgtaaatggagatgagctgaacaagctgaggaaatctgcttcctttggtttcagaaacagtggggtaactgcatcatcatcatcatcccccatagcacagccagaatttggcaccgagcaggatgtctcgtgggttcattcattggttaaagatgttccctccgagaggtctgagaagcaacaatatgatcatctcagcaaagagatgcttctttcaccatgggtagaagcaacaatatgatcttcttcagtaaagagatgctgctttcaccatgggtggagcagctgtatatagagcagaagcaaatggtagcatgagcagcaagggctgctgccatgacaatgcttcttggttattctgacatagtttgtttatttatttatttaattattttattcattttgaactgcttctactatccacaacattacacaatattatagttagggataggatgagatatgatattgcaaagaacaaagttcaggttaatccagagatttgaacggagagttccaacttctaggtcagggaagacttggagaaacgttgaacgaagaaggatgctgaattttattttattttattgtataatagtataatttattccccccttttctctacgggtggatggatgtattttctctagcaagtggacctcaaagtatttgccattgattaagcagcacaattcttttttatataaaaattattatgccattttatc

SEQ ID NO: 20586 - DNA, 304 bp, Glycine max
  Clone ID: LIB3242-344-D5_FLI
gagcacagttatcactttcagtgtataaaacaatgggttgcacaaaaaaattttctgcccagtatgtaagcaacaagttgcggctcgacactgagtgactcaacccttctgtttttttggacagcttccattctcatccataaatttgtgtatagtttttcatatccaatacaagcaagagttttcattctttgctgtcaattatcatttcatctttcaaaattcctgcatcctctgcgaggaatcggcaattatatgttatcgagtaaaggtttatattcgggctgagacctttgcatattat

SEQ ID NO: 20587 - DNA, 328 bp, Glycine max
  Clone ID: LIB3242-349-C8_FLI
tccatctttgcaaacagccagagtggatggatataaagatggagtgccctacttgccgacgccctcttccacctgcatgaagagatttcaagtgttcatatcaataggataaacttacactgcccaactacataattttggttgggattgaatccatattccgtataattgcaccttcagtacaatactgaaatacgatacttctcacagttgtatcatgcagcattgttataattttagaccttttttttttcctttttctttcactggttatgtatcaatatcaagttgtacattagaaattcattatgatgatcttttgacatcc

SEQ ID NO: 20588 - DNA, 1780 bp, Glycine max
  Clone ID: LIB3242-355-A3_FLI
gacaatgaggacccatcaactcagaagaagcctcgagttgtttggtctgtggagctgcaccgcaagtttgtttctgctgtcaatctattaggcattgacaaggctgtacctaaaaagattcttgacttgatgaatgatgaaaagcttacaagggagaatgtggccagccacctccagaaatatagactttatctgaaaagaattagctgtggggcaaaccgacaggctaatatggtggcagccttaggtactgcagattcatcttatttgagaatgggttctctgagtggcgttggacatttgcagacattgactggtccacaacagtttcataacaatgctttcagaccctttccacctggtggaatgattggtagattgaacacttctgttggtctgaataatcatgggttgtcttcttcagaagctcttcagttgagtcatgcacaaaatttaaacaactccataaatgatccacttaagttccaatcatccatagcttgtggtaatcaaaatgctatccagggaatgccaatgtctataggccttgatcaattgcaacataataagggtgttagtgttagtgttggtcctattcaaaacatgtcccctcttattgatgccagaccaacttttgctgtgtcaaatagactctcagatcaaataccaaaagtaacaatgggttgctcaccctctccggtcttggacgtctcaaacaatgccttggtattgaaagcagatagtgaaaacacacaagggagaggagtatatgagaatttaacttcagtagcatctcagcattcacaattttcgcttcctttgctgggtcatggtaggtgtagtgatatttggtcaagtcctatgcggtcatctgggacaaattcttaccctccaagtgaaactttgcaaggggggaatctgagtggtgcttcatcaattacttcactgtctaatcaatcccatgattcacagacggatatgcactctcaaggactcatttttacaaataattcaggacaaattagcaataatgtgccatttctcgggtgggatgaccataatcatgatagtagttaccattcaaatgttattggtaactcaatagactctctgattgatccagaaggtcatacttctattaactcaacctacaacagaaacttggacttcaatttctgtgatcccttacaaatgaagcatgatggaattatgggattgagtgacgaaaactcattgaaacaacaacacaggtacatcatgaaccagcagaagtctcaaaacagtcgcgcccctaataatattggttcattggaagactttgtcagttcgatgatgaaacagaaacaagacaaggtgaaattcttggacggatcatatttatgcaacaataattaccctgacggaacatccatgtgatatgaactttggcagtatatttgcgcatcatgtcatgctttgttgatgaattttgtagcgtgacaagtcttggtttaccactcttcccagttttgtcttcttggtggtattttctaggtctagggtattattattactttcagcaagggctttctcaatttgtgaaaatgcgttgttttatggatggggccctctagtgcattatggagttaaccatgtttagttttgtgcagacatgcttttctagcaatttgttagtggtccataagcaagaataaaataattttagtggcaataaactcggggtcttccctttatgaatgcaaataatggccgacgaaatagcattcatgtttttttacac

SEQ ID NO: 20589 - DNA, 784 bp, Glycine max
  Clone ID: LIB3242-355-C5_FLI
cgcactgttcttcagactgagggttcttttccagcgttagtaaataggttattggtaatcaaatccgagtcccttgagttctctcctgtagaaaatgcaatcggaatgattgaaacacgaactgctgccttaagaaatgagcttgaagagcctcgaagttcagagggggatcaacttccaagactccagagtctgcaaagaatcctacaaggcagtgttgcagtacaagtgaatagtggagtcttgagtgtctgcacagccttcttgtccggggagcctgcgacgaggttacgatcacaggaactgcaacaacttatagctgcccttcttgagttcatggctgtttgtaaacgtgccatccgcgtacatttcagattgattggtgaggaagatcaggatttccatacccagcttgtaaatggtttccagtcattgacagcagagttatcacattacattcctgccattctctcggagctatgacaatggcacaagtgtttgcctcttattattttgcttcgatgtgttcatattgtattcttcctctcattccctttccccctttgggtccccctatttcaatcccttgcaaagatgtgtaattgaatttgcatcatggttcgtatatttagaattatgcgaaccagttgaaaactcgaaccatcctgtttgtgtatcatgatgatgtttctagtttccccactttcccctttttggtttgtggcgcggggaatgtcatttgtgtaatattttatttgttttcaagttgttgagccatacagct

SEQ ID NO: 20590 - DNA, 450 bp, Glycine max
  Clone ID: LIB3242-356-D11_FLI
cttctcatcaagaacctgctgctgtctctgcccctcctaaacatcaagagtcctttcaccatgaacgctgccctgacttgaaccttgagctaaccattagtcctccccatcatcctcaacctgatcatccgcacttgaagacccttgtgacaaactcaaacctttgctttccctgcagtctgggtttgcataatagcaaagattgtagctgtgccctccacactagtactgccaacgctactgctactggctatgatttcttggccttgaaaaccaccgtcgttttggattacagaaccttgcacatgaaatgaaatcatattactgaaatctctctctttctttctttctttcttttcttctctaatataatttcttacttacttacttacttacttacttacttgttaatggttgcaaatgataaaaaagttccagccagtacagttg

SEQ ID NO: 20591 - DNA, 679 bp, Glycine max
  Clone ID: LIB3242-382-C7_FLI
ctaaaccttcttcaataagaataataatattctctctttgttcctctctctaaaattaatggctgaagcacaaagtggccaagctagtgaagggattaaactgtttggaacaacgattacgttgcatggaagagaaagaaaagaagatagaaatgatagtgaagatgggacagaggagataaagagacctgataagatcataccatgcccaagatgcaagagcatggaaaccaagttttgctacttcaataactacaacgttaatcagcccagacatttctgcaagggatgccagagatactggacggctggtggggcccttcgcaacgtgccagtaggagctggcaggcgaaaggtcaaaccgcagtttggtcaggaggagaggttggctttggatgaatggcatgttgccgccgtggctcatggtgatttccggcagctttttccatctaaaagacggaggatgagctcaggtggtcaacgtcaaccttgttaagccttcacttctttcattcctttctctccccccccccctttttcttgtattgacatagatctccctttgaggttttttaagtaattcttcttaaaaacttaggtatcaattatcattttaaatgtagttttgttgttgtttctcaataaataaaaaaacacaaggtataacagataattgatc

SEQ ID NO: 20592 - DNA, 812 bp, Glycine max
  Clone ID: LIB3242-387-A2_FLI
gaatgatgagagcaatccaagtataccatctgtttgtcccaacaaccatcagcctcaggaggtggaggtgaatcttgttataacagattactgtatgcctggcatgacaggctatgacttgcttaagaaaatcaaggaatcttcatctttgagaaacataccagtggtgattatgtcatctgaaaatgtgccttcaaggattaacagatgtttggaggaaggagccgaagaatttttcttgaagcctgtgaggttgtcagatttgaacaagcttaaaccccacatgaagaaaaccaagttcaaagatcaaaagcaagaaacagtagaaaggtttgaagactcagaagttcaacagcaacagtcacaacaacaaatcatcatccaaaatgagcatcaccaagcaccaaaattacaagttcttcagccagagtcagaatcagagtcacatccacaaccaactattgaacaacagcaacaaattctacaacaagccaacaacaataacaagaggaagaccatggaacagggcctttcacctgagactgacagaacaagaccaagatacagtggcatagccactgtggtatgatcataaaaatcattggcaaaaattttcttgaatttcaaaaaatgtaattctcatataacttttttttctttcttttaaaaacaaattaactcaagtgttggttaatataggctctataggagtgtaatagagttgtttcctgtacacattttcctggaaatatttccttccaattttgcttccccccaatataatgaaaaggaaaaaaaatattgaattgagt

SEQ ID NO: 20593 - DNA, 1180 bp, Glycine max
  Clone ID: LIB3242-387-D3_FLI
ctttctctctcgctataccaatattaatttgaacctctctcagttcaattccagatagactttgttggcatttgagttttgtcgaatagaaccaaaaagaaaaaatgggaaggcaaccttgctgtgacaaagtggggttgaagaaggggccatggaccgcagaggaggataagaaactcatcaatttcatcctcactaatggccaatgttgctggagagctgtccctaaactagcagggctgttaaggtgtggcaaaagttgcaggctcaggtggacaaattatctgaggccagacttgaagagaggccttctatcagaatatgaagagaaaatggtcattgatctccatgctcaacttggcaatagatggtctaagattgcttctcatctcccaggaagaactgataatgagatcaagaatcactggaacacccacataaagaaaaagctcaagaaaatgggaattgatcctgttactcacaagccactttccaataaaactgagcaaactcaagcccaaccagatgaacaacaaacccaccaaccattgcaagaacaacaagaagaacctatcccagttgagaaagacaccaaatttgaacctgaaaaagagcaaaacaaggagccagagaagccagagagttcaattgaatcattaaccatcactgaagaagccaaggaggaagaccaaattatgacacccttatttgactcatgggaactaatgaatgagttctgcactgatgaagttcccataatagaatcaaatgagattctagttccttctgctccttcttccacttcaccaaccactactactactacatcatcttcaacatcaacatcagcatcttcaaattcaaattcatccaacttccttgaagaccttctgctcccagattttgagtggtctgatgattacaatgatactaattttgacaataataacaatagcagcatggccttgtgggatgatgactttattagaagttggaatttgcttattaatgatgatgatggtgatggtgacagaaagcaagtgtttgaggctcctatcaatcagtacccaagagtgatcatggattcagattcttgggcctatggcttgttttgatttgaaatttttttttctcctctctccccggctgcttacttgtaattgttcttttaagttgttgc

SEQ ID NO: 20594 - DNA, 2295 bp, Glycine max
  Clone ID: LIB3242-387-G8_FLI
ctcttccagctggaactccacagtgggatttctttggtctctttcaccccattgaccatcaattttcttttcaagatgggaagggtatgcatcaagatatagggaatgctgatgacatacaaagactaagggaggaggagggaattcctgagttggaagacgacgaagagaaggcttcatctcatggaagggaacactctagggactctgaagacgaatttgatgaagagcctgccgcagaaactctagtccaaagatttgaaaatctaaatagatctaacagtcatgttcaagccaattttgaacctgccacaactaagcctctcagagggcattcagcttctgaagttgaattagtgaatggagaaaaggggaactctgcttatttatctccattaaagacagcacctatgccagctttgcctccacctgaaacaaataaaccaatggagaaggaaagtcgtaatgaaaataaagtcacccctaagaatttcttttcaagcgtgagagatattgaattgctctttattaaagcttcagaatctggccaagaggttccaaagatgcttgaagcaaacaaagttcactttcgtccaatattccaaggaaaagaaaatggttctctggtgtcctcgtttttgaaggtatgtttctcatgtggggaggacccaagccaagttccagaagaacctgctcaaaactcggttaagtacttaacttggcataggacggtgtcatctcgatcctcctcatccagaaaccctttaggagcaaactcaattgacaatgctgaggaccatgcaaataatctctttgataattcttgtatgatctccggaagtcatgcatcaaccttggataggctatatgcttgggaaaggaaactctatgatgaagtgaaggctagtgagatagtcagaaaggaatatgacatgaagtgtaaattcttaaggcaactggaatcaaaaggagaaaagacctctacagttgataaaactcgtgctaaagtcaaggatctgcactcaagaatcatagtttcaattcataggataaactctatatcaaagagggttgcggagttacgagacaaagagcttcagccacaacttgaggagttgattgaagggttgaatcggatgtgggaagtgatgcatgaatgccacaaacttcagtttcagataatgtcggcagcatataacaacagccatgctagaatcaccatgcattcagaattacgtagacagattacttcctatcttgaaaatgaactccaatttctatcatcaagctttaccaagtggattggagctcagaaattctatctggaggctataaatgggtggcttctcaaatgtgttcgtcatgaagaaaaatcatccaagagaaaaaggaggtctcaatttgaccttagctattatgatcctccaatatatgtcacatgtgcggtctggttggataaacttagtgccttacctgtaaaggatgtagctgattcgattaagagtttggcgacggatactgcccagttcttaccacaccaggacaagaaccaaggaaaaggtgctcatcctcatatgtcaacatggaaggctgatattggtggcgaatcagcagatggtttattgagagatgacatatcagaggattgggttgcaggtcttgatcaatttcggcgaagcttgattcgatttcttagtcaattaaataatttgtctggttgttctgtcaaaatgtacacagaacttcgacaagccattcgggaagtcaaaaattaccagcgtttgaattctcagtctcaaaatggtcatttgaattctcagtctcaagatggtcatccgaattccgaatctcaaagttgatccatcagagttacaatctcaagtggtttaggctgaaaacaaacatccacacgataagagaattgcgatgaaacattgtggaattgcagaattatagcattgtgttgagcatacaagtccactggatgtagcatttgtacatggtaggatgtaataaagtcattacagattgccacacttatttgttcatttagttctaagaatagaagggagctgatagattgcactagagagactatgagtgcatggttaaggactcagtaaaagctgtaagtactaggttctgatggtgaagaaatttgggtgcaatttttttgctaataaagggtttgtaccaggacttatactcccctccttgattttctttgcttgtgccattttttcatttacgttatgtgtatataattattgattaataatattgtttgaattttat

SEQ ID NO: 20595 - DNA, 1170 bp, Glycine max
  Clone ID: LIB3242-388-G1_FLI
ctgatttgaagagaggaatgttctctcaacaagaggaggatcttataattagtcttcatgaagttctaggaaataggtgggctcaaattgcagctcaattaccagggagaacagataatgagattaagaacttttggaattcatgtttgaagaagaagctaatgaagcaagggattgaccctgcaacacacaagcctctcctcagtgctcaagaacacataattataaaggaagagaaggaaaccattttggagacaccaccacctatgttattaccaatgtctcaagggattttagcttcctcacaagagtcaccacttgtagtgaacaattcaagttactgtgatggtggattaaatgtaacagaagctgcttcaagggaagttttcatgagcaagaatgctgctttagaccctttgtcctactttgaattccaaatgggttacaacccaataagacaatttgatcagaaccatgtggggaccaactcaagctatggattctcctcattgccgtgtctgaatagttcttctgatcacgggaacgtgtcggtggcggcggagttttcagataacaactcagcttcaaaaatcagttctttgatgaaggaaagttccagcaatagctcaagtatgagtgtttatccagctgggggagggtgtcaaatgatggaaaatgcagggttctcatgggatggtgagaacaataatactaagatcgatcctttgttacagttccatgtcaatgtgctaaaatctgaagagttcaagacaagttcgtggcaagaagagcagattctgactcagaatttgatagatttcactaactatccgttaatgtcactgtctgaggatctaaccggagcaaattttgatgtgttccagcagatgtgagctgtaaaaaattctcattttcttcttcttattattctgagttgaattttttgaactcttttctttctttctcttgttgaaagttgaaacgaccaagatagaaaacaataggaagatgttgataacaggaaaaattgtagcaaaagatttgagaattgatgagatgatgatctccccccactcccctccggatatctttgtttttcctgttgatgtatctgttttcatcagcagaagtttggatgacgattattgctgattaatgagtgaagctagc

SEQ ID NO: 20596 - DNA, 628 bp, Glycine max
  Clone ID: LIB3242-389-C8_FLI
gtatatatgaagaagaaatacgcaagaatgggaggaggtgtcgaaaactccaaaagtagatggccaccaatggagaaagtatggccaaaaagagatcctgaaagccaaatactcaaggaactactacaggtgcactcacaagtatgatcagaattgtcaagcaacaaaacaagtgcaaagaattcaagaggatcctccattgtataagaccacctatttgagccaccacacatgcaatgacttgctaaactatgaaatcatacctgattccaataataattctccttcggacacttccatattgcttagctttaacaacacctttcctactccaaccaaacaagagtgcccctttttatcatcttttccctcaccaacatcagtgaagaaattagaggaggtgattccggcctcatcttcaaggcataataataatgtcactctgccactgcctgatccctgggatgttatgtctaattctgccatgtgtgattctgttggccttgatgatgtcaacctttttttggattttgatgactaattgggtctgcaaatttaaatttgtttttcaatttgataggagtgctcgatagctagctatttataaaaattttaaattaagtcaatt

SEQ ID NO: 20597 - DNA, 233 bp, Glycine max
  Clone ID: LIB3242-389-D6_FLI
attctggttacatgtgatcttttatgaggtttagttattctttgtgttagaattgtttggggaaaatgttaattttatcagaatttagctagtttcatgtatccgttttctagatatctgccatatccatagctagctttgtatattttgagtttctaacttgaaaggtagcaaaacacaagacatgattttttgtaataatttacccttggaagtaatgtcatctctaaagt

SEQ ID NO: 20598 - DNA, 801 bp, Glycine max; identical to SEQ ID NO: 9441
  Clone ID: LIB3242-390-E12_FLI

SEQ ID NO: 20599 - DNA, 1157 bp, Glycine max
  Clone ID: LIB3242-391-A6_FLI
cttaaaaggattccaatgagcctttttacatatatgcaacttcccttgatcaccggaactcagaagagaacttaggggagaaaatgatgatcacagaagatgaaacgactcttacagcaagcaaagaacaacaaagtgaaatgatgaacggagacaaggacaatcatggaagcgaagatgacaactccaaagagtggttgaacctgagcataggtggaactactactttactctcaacagctgtaccaccagccactgccaaagttttttcatgcaacttctgcatgaggaagttctttagctcacaggcactaggaggccatcagaacgctcacaagagggaaaggggtgctgccagaagataccaatctcagaggtcgatggcaataatgggattctccatgaacacactaactatgtgtcgatcacttggtgttcagccacactcacttgtgcacaagccatgcagagatggtatcatggtggcaccgagctttcatgatgcatatgcaaggattgggatggcatggacacctttctggaccgaggatcaagcggatatggtgtggccaggcagctttcgcttggttccaaaacagccacagtcaccacaggagccactcaagcttgatttagacctcagactctgacaagaggtttggtctcagcttggagccttatcctcctttttagccaaaagagcttgttcgttagtgacctgggagagtcaataactcagatgctgctgctactgcatagtaaatggtaggagatttttgtttttcattgtctatatgactacatgtttagcaccagaaaacccaagttataactccctggctatctattttagttccttcaagtttgatataactcctgatatgcagtgctcacttgacaatgttactgacttggggagatttagcttttcgacattaaagtcctgattttcttcctgcatgtactttagaacatcttattcgattgacagaagattaaaaaagttaagagcaaggactacagaaaacaatttgtggatgctaggtacgttcaagatggaatgcttccaacatgtgtaaagcctcaattctaatactagattttaattaaagacaacatacgaatgaaactttccagtatgacaattgatgctatgc

SEQ ID NO: 20600 - DNA, 878 bp, Glycine max
  Clone ID: LIB3242-392-A1_FLI
caaagaacgttctatgatcaaaattgaaagttgtgctaagggtgatcttaatatagtctcctctctggaagatacttcaactaacaataacatgtcaaagtgtcgtgctctagtggcagttcctgccattaacatggaggcattggcggtggttccattctggcgcaaatctggaaatcctgactttgcacaacgccgaatcaggaggccattctctgttctagaagtagaagcattggttcaggctgttgaaaaacttggaactggaaggtggcgtgatgtcaaacaacgtgcttttgatcacgcaaagcatcgaacttatgtggatttgaaggataagtggaagacactagtgcacactgctagaatctccccgcagcaaaggaggggagaacctgttcctcaggagcttctggatagggtcttagctgctcatgcctattggtctcaacaccagtgtaagcatcaacttaaaccactgtgagtcatttcaatcattgaaggacgcagaagaacaaacacattgttgcaaaagtacagtttccagagtgaagtagtgtagttatgataaaagttgatagtatataacgtttacataatatactcatgtgattccataatttatcctccctaagcctgataatgttttggttgcttgtacatgattgttttggcctaaaggaatatggtgtcactcataccaccccttgtggtcgattgctggtatgctatcaatatgcatactagaatatataataaataatgtatagtagttaaacctcttagaacttgtttcttggttgtatcttcattgttactagccattacaatgacataaaggaatacatatgaacaaatacaaatgaatatcttatgcc

SEQ ID NO: 20601 - DNA, 534 bp, Glycine max
  Clone ID: LIB3242-395-E11_FLI
ttacaagcctccccaattggacgggctttatcaatatctttcaacagtgtttgcaactgatttgcattctcgtgcatttttacggcttcctaaatctgtgggtgtggattttcgtgcctcgtgtttctgccataaacaaacaattgacatgggctatgtgtgttctgtatgcttatccatattctgtgagcaccatgataagtgttcaacctgtgggggttagcatgtcaagaaaagctatgagatgaaggcaatcccagctgattaagatgaagttttcagtcctgtatttggataatctcttgataacacctacacagccgcaacatttccatgagcaaacaattgacatgggatatgtatgttctgtatgattatgttccagcatttgtttctacaaggaaaattacattttagtctattggctactaaaaatttctacaagaaaaattacattttagtctataggctatattggctactagcctatgaatccaattgtagcttttattttaatgtataatacttagccac

SEQ ID NO: 20602 - DNA, 2202 bp, Glycine max
  Clone ID: LIB3242-396-D4_FLI
ctgattaccaatccatcgtttttgaactccacataaggctaaactaaacacctctctctgcaaaacaaaaccactctcttccttccaacgaatctctgccacacaacaaataactctgaacatataatcaacctaagacccgcctctgattctgaacaacaaaaggctaatttggctcttttgacgacaatttttgctgacacctaaagcatctagcagcttatcaaaatggagactaaccatacagcaaaacggtgttgtaggactttagtatgcatttgatcaggagcagctaggaagcatttttacaattacaaagtttgaccactcattgttctgatcactgagtaaataatttctttttagatgcaaacttctaagaagcacccaacttcagctggtatccatttatacctgcagcctgcacaagatattgatccttacactcattaccaaatattgcaaagcaattcatgccatgataatagcagcagccagggaaccactatttcttttgaaaccagcaaggagcaatactttacccttgaatcatccccagcaatcaatgatctcataggttgtgattctccttcctatgctagtgtatcatccaataggagtcctttttctccacaagcttctcattcagaccagcatcagtcatcagacaacacctatggatcaccaacaagtgcacactctagatatgatgatgacggctacgaattgaagaacaagcttagagaactcgagatttcgttgttggggcctgattcagacattgttgatagttggcactgctcctacaagggtggccgccacagagcatcatctccaacggctaaacacaattgggatcagattgtggaaatgattccaaaattagacttgaaagaagtcctcattcggtgtgcacaagccgtggcagatgatgatattgaaacagcagtgggatttatgaacaatgtattggcaaagatggtatcagttgggggtgatccgatccagaggttaggtgcctacatgttggagggtctaagagcaaggttggagtcctcagggagcataatctacaaggccttgaaatgtgaacaaccaacaagcaatgatctcatgacttacatgcacatcctgtaccagatttgcccatattggaagtttgcttacacatctgcaaatgctgtcattggagaagcaatgctgaatgaatcaagaattcacataattgacttccaagttgcacagggcactcagtggctgttgcttattcaggctcttgcatctcgtccaggtggagcacctttcattcgtgtaaccggagttgatgattcacaatcatttcatgcaaggggtggaggacttcacattgtaggaaaacgcctctcagattatgccaaatcttgtggagttccatttgagttccacagtgctgctatgtgtggaagtgagcttgaactagaaaaccttgtaattcaacccggggaagctctagttgtgaacttcccttttgttttgcaccacatgccagatgagagtgtgagcacagagaaccatagggacaggctattgagactggtcaaaagcttgtcacccaaggttgtgacccttgttgagcaagaatccaacaccaacacttctccctttttccaaaggtttgttgagaccttgagttactacactgctatgtttgagtccatagatgtggccctccccagagatgataagcaaaggatcaatgcagaacaacactgcgtggctcgcgacatcgtcaacatggtagcttgtgagggggatgagaggctggaaaggcatgaactcttagggaagtggaggtcaagattttcaatggctggttttgcaccatgccctttgagttcctcagtcacagctgcagttaggaatatgttgaatgaattcaatgaaaattataggcttcaacatagagatggcgctctttatctaggatggaagagtagagctatgtgtacctcttctgcttggagatgttactgactcattgtcattgtcattggtatatgtatttttttttatccacaaatattatttgttagtaatatattagcttttattagcggggaatttgaacccatcacctctccccattcccatcattggtatatgcatattttcctccttgttaatttctttcctttttatgacattaagtcattatttagtggt

SEQ ID NO: 20603 - DNA, 2274 bp, Glycine max
  Clone ID: LIB3242-396-G4_FLI
caaccccttcttcacgttacctacgttttcattcaaaaccacagtacgacatcgaaaaaaacaaaaaagtcataatatatatcaacaaaagggaacgatattttcagcaaagttttgctctccacgtttattgaatcaaggtcttttctaatgctaggtgttgaatttggttaaccagtcttggaggtttatctgctattattaaaagtgttgggatacaagtaccaagcagaagtttgccaaggcagctgcttttagctgatgccatcatcatagtatggacttgaatcaatttttaaattttaacgttattagttcggaaggattcccttgcacatcgtcttgtactcctatttcaccaatatccaaccagttgcttggatccttgaaacttgacataggaaactcacctaactcggccctttctagtcattttgattctgatactctttcttctgcattaagtgacagtcaggaattgcacacctctggggaaattcactctggtgtcaactcttgcaagtctttgcaggaaagcaatcattatttgcacaggccagtctcatttgtagaccatctccaagacggtttacatctatctactaggagctttcttccacaggatgcaagttatgaccatgaaactagacatgcattgctggaattagaaacagctttgatggcacctgatggtgaagatcaaatcaccacatcaagcacttctttgggtgttggcagtagaccaacaacatcttgccaaagaaataggtcctggagctctgagggccagtcaagtgatgttgcacatgtagagaagcaccacaaatcagtggaggaagaatcgctgcaaggatttccatcatgcaatttgaaacaattgctgattgtatgtgccaaagccttgtctgaaaacaacatgcaacattttgatcaattgatagaaaaagctagaagtgctgtgtctataactggggagccaatccagcgccttggtgcttatttggtagaagggcttgttgcaaggaaggaggcatcaggaaataacatctaccatgccctaagatgcagagagcctgagggaaaagatttactctcttacatgcagctactgtatgaaatctgtccctacttaaaatttggttacatggctgccaatggcgctattgctgaagcatgtaggaatgaggaccaaattcatatcatagactttcagattggtcagggaactcaatgggtgacacttcttcaagctcttgcagcaagacctggtggagctccccatgtgcggatcacagggattgacgatcccctttctaaatatgttcgtggtgatggactggaagctgttgggaaaaggttggctgcgatatctcagacatttaacatccgagttgagttccacggcgtgcctgttttagctccagatgtgacaaaagacgtgcttgatgttaggcctggtgaggctttggctgtgaacttccctttgcaactccatcatacagctgatgaaagtgttgatatgagtaatccaagggatggacttttgagattggtgaaatcactttctcccaaggtaactacattggttgagcaagagtcaaacacaaataccactcctttcttcaacaggtttatagaaaccttggattactacttggcaatgtttgagtccattgatgtgtctcttccgagaaagagcaaggtgcagattaatatggagcaacattgtttggctcgggatattgtcaacattattgcttgtgaagggaaggaaagggtagagagacatgagctgttaggcaagtggaagtctaggttaacaatggctggctttcgtcaatatcctttgagttcttatatgaattctgtcataagaagcctgctgaggtgctattcaaaacattataatcttgtggagaaggatggggccatgctactgggatggaaggacagaaatttgatttcaacttcagcttggtattgattacatgcagataggaaataatgcagtggtagaaatatgttgccgactgaggtttatgttgatttctagggccttgtgttccttaccattgttctaaaggtcattatttgataaattagtctattgagtttcatgtcatagtgatgcagataactgcataccaattcttttataaactatttaggtatgtacagtgttttgatctacaaatattgtacttgtacctgaaacttatccttggtatccaatataaattaaatgaattcacagtaaggttattgacaaaaaac

SEQ ID NO: 20604 - DNA, 1990 bp, Glycine max; identical to SEQ ID NO: 7730
  Clone ID: LIB3242-397-E8_FLI

SEQ ID NO: 20605 - DNA, 1233 bp, Glycine max
  Clone ID: LIB3242-400-F4_FLI
gccaaaagcaagagaaaaattcacacatacacacacaaagaaaattagagagagagagagaagataagatgggtgtgaacgaagatttcaacaaggatattgatgatcatcatcatgagtatgtggatgatgatgatgttcctcttccggggtttcgtttccaccctacagatgaagaacttgttagtttctatcttcgaaggaagcttcacaagaaacccatcagcatcgagctcatcaaacagattgatatttacaaatacgatccttgggatcttccaaaaaccagtgccactgcagaagagaaagaagggtacttcttttgcagaagagggaggaagtataggaacagcataaggcctaacagagtcactggctctgggttctggaaagcaactggcatagacaagccagtgtactcacatggaggagaaggaaatgactgcattggcctaaaaaaaacactggtgtactaccgtggcagtgcaggcaaaggcatcaaaactgattggatgatgcacgagtttcgccttccttctaacaaagacaacaccaccaaccttcccagctccaagaattacgtagatgttccccaagaagctgaaatttggacattgtgtcgaatattcaagagaaatgtctcacagagaaagcacacgccagacttgaaacaattatctgctaagcgccactccattcatgacaagaactcaagaatgagcaacgtggagttcaacaatactaatcaagaatcatatataaactttggtggccactatcagaatgagcagaaacccgtgattaactacacaaacagtgatcaaaggaatcagtatcatgtgatgactcatcagttgtttgctgctccagtggcacagcatcatcagcaacctcaacaactaacttctccatcttctaacttttggcttaacagccctcctgggaacgacttcttcacgtttgataactgggatgagcttggatctgtagtgaagtttgtggttgattagcctagcttgtagataaaaaagatgtggttcatgttgagttgatcctagttagatacttagatgttacttagaatgaaatatactccctcccgtcttttttataagaaacaagacttatatatactgaaatttgtttcttataaaatgaaccagaggtatatcataagagtgcgtttgcatgtattagagagtattgatgttggtgatcatgacttttagtagc

SEQ ID NO: 20606 - DNA, 1666 bp, Glycine max
  Clone ID: LIB3242-402-B6_FLI
gatctcttaccttaaaaaaaactccaaaagagagagaaacgttattattaggaactaaagcaaaaaccctaacgctagtgcaaccaaagcacaaatcctatataagccaccgcttaaccttgaccctgtatgcgactaaccctagttcattgcactgcaacttagccacttgaacccccttcgtaagcctcttcacatcttcacttcttcttccgcactaatacgaaaccagagggaattcacaaaagaggttaccatgtcggacgatgagagagaggagaaggagttggatctcacttctccggaagttgtcaccaagtacaagagcgccgcggagattgttaacagggctttgcagttagttatttcagaatgtaaaccgaaggcaaagattgttgacctttgcgagaaaggggattcgtatattagagagcaaactggtagcatgtacaagaatgtgaagaggaagatagagagaggtgttgccttccctacatgtgtgtctgtgaacaacactgtctgtcacttctctcctcttgccagtgatgaaacagtgttggaagatggtgatatagtgaaaattgacatggcttgccatatagatgggttcattgctgctgtggcacacactcatgttcttcaggaggggccagttacaggacgggcagccgatgctcttgcagcagcaaacaccgctgccgaagtggccttgcggcttgtaaggcctggaaggaagaacaaggatgtaactgaagcaattcagaagattgccgcagcgtatgattgtaaaattgttgagggtgttcttagccaccaaatgaaacagtttgtgattgatgggaataaggttgtgctaagtgtatccaatccagatacaagggttgatgatgcagagtttgaggagaatgaagtttatgcaattgatatcgtagcaagtactggagatggcaagcctaagcttttggatgaaaagcagacaactatttataagagagctgttgacaagagctatcacttgaagatgaaagcatctaggttcattttcagtgaaataagccaaaagtttcccatcatgcccttctctgcaagggctttggaagagaaaagagctcgtttgggtttagtggaatgtgtgaatcatgagctcctgcaaccttatcctgttctgcatgaaaagcctggtgattatgttgcacatatcaaattcactgtcttgctaatgcccaatggatcagatcgtgttacgtctcactcactccaggagttgcagcccaccaaaacaatagatgatcccgaaatcaaggcgtggctagcattgggcacaaagacaaagaagaaaggcggtggaaagaagaagaaaggtaagaagggggcagaagctgaaccaatggatgcaacaaatgatgctacaccccaagaacaagattgagagacaaaaaccctttgattttgcttttgatccctttcaattttggtacatttttcaccaagttgtatctgcttgattgtgaatttagtacagctttcggacatccaatgttaataggaatttgatttccttggctattgtacttgacctgaatgctgtactcctgattaagcataaatatgcttaattgttggaggggttttaatttataaacaaaagatatcaaatttaaaaccc

SEQ ID NO: 20607 - DNA, 1213 bp, Glycine max
  Clone ID: LIB3242-403-E3_FLI
tcccatcggttttaaaaagtactttggcgtgtggttggaaacaaataatagagaaaataaaaaaatgaatgttaaggtgcatagctctgatgataccaagaaggatgaagaggttgtgcttcctggctttagattccaccccacggatgaagagcttgttgggttttatctgcagagaaaggtggacaaaaagcctctaaaaattgaactcatcaaacaggttgatatctacaaatatgatccatgggatcttccaaaggtgaattcttttggggacaaagagtggtattttttctgcataagagggaggaagtacagaaacagcgtgaggccaaacagggtaactaggtcagggttctggaaggccacagggattgacaagtccatatattgcgtgaaagaaccccatgaatgcattggcctgaagaagtcattggtctattaccgtggaagtgctggcaaaggcaccaaaactgattggatgatgcatgagtttcgccttccacccaatgcaaaatccagccccaatgatgttcaagaagcagaggtgtggacactctgcaggatattcaaacgcatcccatctttcaagaagtacgctccaaacttgaaagactcaacaccagccaccaaaccaaaccctgtgaattccaacgcatccaccttagattctgacaattgctgcaagccatatttgatttgcagagaccctatgatgatgcaacaaatagaaagaaaaccagttattggacaagttgatgaaaagaaacacttgtttttgggccaatttggcccactatcccatcttcaggccccatcaaccaccccttacccaaatttttggaaccagaataatgttgaggaccacgcatttgccaatgagaattgggatgacctaagatctgtggttcagtttgcaatcgatccatccacggtgtttgattgtaccgaaacatatattccaccctacttttcttagggttggagtgagtaactttggtagatatgttatatatgatgtatgaacatatatagaggttataattgtcattattcttacagttttttaatttcttgtatgagaacacgtatatgttgaaatttgctggttttactagttttgttgtaaaacctaatattgacttgtatcttgtcatttttatcccttttccattgattgagtcaataaatacgtttataccttgatttatca

SEQ ID NO: 20608 - DNA, 1344 bp, Glycine max
  Clone ID: LIB3242-404-A4_FLI
ctaattaccacattaaataaaaagttatttgtgtcccaattcccaaatcacccaatattcagagtggaagaaagaagagttcttcttcttcctttgtcttcaccgttaccgaacacagattcgtttttctccgaggtagtgggggcaccgaaaccatctgggtcgggtgatggaagaaggggttatttgccagtggagcgtgtttagatctctcttggctatccttcagtggtgggctttcaatgtcactgtcattatcatcaacaagtggatcttccagaaattggatttcaagtttccactgtcggtatcctgcatccacttcatctgctcggccattggaggatatgtggtgattaaggtgctgaagcttaaaccactgataactgttgaccctgaagaccgctggagaagaatctttcctatgtcatttgtgttctgtattaacattgtgctggggaatgtgagcctacgatatataccggtttcttttatgcagacaataaaatcattcaccccagcaacaacagttgttttgcaatggctagtttggaggaaatattttgactggcgtatttgggcttctcttatccccattgttggagggattcttctcacgtctgttacagagcttagctttaatgcatttgggttttgtgctgccttattgggctgtttggctacatctacaaagactatccttgcagagtctctgttgcatggatacaaatttgacagcataaacactgtttattacatggccccttttgcaaccatgatcttggcaataccggctttgttacttgaaggcaatggagttcttgagtggctaagtactcatccatatccttggtcagccctgatcattattttcagctctggagttttggcgttctgccttaacttctccattttttatgtgattcattccaccactgctgtaacatttaatgttgctggaaaccttaaggttgctgttgctgtccttgtctcctggctaatttttaggaaccccatatcatatttaaattctgttggatgtgccgtgatacttgttggatgtacattctatggttatgtgaggcatttgctctcccaacagccaccagttccaggaaccccaaggacaccaaggactcctaggaataagatggagttgcttccacttgtaaatgacaaattagatgataaagtctaataataattggtttagtttaggctatgaatgaatgaggtttctgccgtttgtaaaggcagtgatagctaaagggtataaaagtgactttgattatttgttacgttagattttccagtttttaatacatagttttttttttgaagcac

SEQ ID NO: 20609 - DNA, 1915 bp, Glycine max
  Clone ID: LIB3242-431-A12_FLI
gttctgttgtttcaaaattgcaaacgttatccacctcagaccatgcctccgtggtctccatgaacttatttgtggcacttctttgtggttgtattgtccttggccatcttcttgaggagaatcgatggatgaacgagtctatcactgcccttttgattggtgtttgcactggcgtagtcattttgctgtttagtggtggcaaaagctcacatattcttgttttcagtgaagatcttttctttatatatcttctaccacctataatattcaatgccgggtttcaggtgaaaaagaagcagttttttgttaacttcatgaccatcatgttgtttggtgctattggtacattaatatcatgtaccatcataactttgggtgccacacaaatttttaagaggttggatgttggtcctctggaattaggggatttcctagcaattggtgcaatatttgctgcaacggattctgtttgcacattgcaggtgctaaatcaggatgagacacctttgctgtacagtcttgtatttggggagggtgttgtgaatgatgctacatcagtggtgcttttcaatgcaatccaaagctttgacctcaaccaaattgactcttcaattgctgtacactttttgggaaatttcttgtatctatttatcgcaagcacaatgcttggagttttgacaggtctacttagtgcttacattattaaaaagctgtacattggcaggcactctacagatcgtgaggttgctcttatgatgttaatggcatacctgtcctacatgcttgctgaattatgttatctgagtggcattctcactgtattcttttgtggtattgttatgtctcattatacctggcataacgtgaccgagagttcaagaatcactaccaagcattcttttgcaaccttgtcatttgttgctgagatctttatcttcctttatgttggtatggatgccttggacattgaaaaatggaaattcgtcagtgatagccctggaacatctgtagcaactagtggagtattgttgggtctaattcttcttggaagagcagcttttgttttccccttatccttcatatccaacttggctaaaaaatcaccaaatgagaaaatcagcttcagacagcaagtgatcatttggtgggctggccttatgagaggtgctgtttcaatcgcacttgcatataatcagttcaccatgtcggggcacacttcactgcgaagcaatgcaatcatgatcacaagcaccatcactgttgtgcttttcagcacagtggtgtttggtctgttgactaagccactcataaggcttttactgccccatactccacatcataaagaatcaagcatcacgataatcacagatccatctactccaagtccaaaatcagtcactatcccacttcttgggagtgcccaagaatctgaagttgatatcgatggccatgatattcatcgtccaagcagtattcgtgccttgcttacgactccaacacacactgttcatcgtttgtggcgtaagtttgatgatgcattcatgcgtcctgtttttggtggcaggggttttgttcctgtagaacctggctcaccaactgaacgtaatggccatcaatggcgttgagagaaaaaaagccaagaaatttgtaatttgtattgtaaactgcataagttttgtggagatcaagcaatgcgtgtataagaatccggtcctgagattttgcttagctctttgggtagtgagaagtgagaaggctgtgcaatgcaccataagcatctcaactcatgtctgcgttttccgtaaaatgtaatatttgattattagatttcttgtactaaaagtttgaataactaaagctaaattttttttccaagttgtatttgttgggtttatggtatgctgcttttgcctgt

SEQ ID NO: 20610 - DNA, 1741 bp, Glycine max
  Clone ID: LIB3242-431-H1_FLI
atccaacggaccaggagctggtgttgcactatctctgccgtaaatgcgcgtcgcagcctatcgccgttcccatcatcgccgaaatcgacctctacaaatacgacccctgggacctacccggtaacattatcttcaacttctgatatattcttattcttaattcttaattcattcattttttgaattgttattgtacaggattggcttcctacggagagaaagagtggtacttcttttcaccacgggaccggaaatacccgaacggttccaggccgaaccgggcggcgggaaccggttactggaaggcaaccggggcggataagcccattggccaccccaaaccggttgggataaaaaaagctttggtgttttacgcagggaaagctccgaaaggggacaagagcaattggatcatgcacgagtatcgtctcgccgatgtagatcgctccgttcgcaaaaagaacagcctaagggtacatacatacatgaatgatgatgcatgccctttctagttcaagattattaggataggataattgcatgaaattacgactttgccctcaagttgaagctgaggatgataatcatttcccatgcaaattgcaaaatctatggccgtaatatcttaaatgttatctcaccgcgcagaaccttcaccagttgaagacttagccatcgcattaaaaacaataattgatgtggaaagagaaaaaattaaaaatataaaatcttctgccaaatcgcaattatcactttctatttttagaaattattccttcttatcactctcacctgccaccgcctgcgagattaaattaatcttacgttggtttccgattatgcagttagatgattgggtgctttgccgtatttacaacaagaagggcacgatcgagaagttccaaccaagcagcgatgttgttgttagccgaaaaatggaatcatcggagatcgaagacaggaagccggagattctgaaaagcggaggaggttgtcttctgccgccggttccgccgccgcaagcgaaggcggcggtgaagacggattacatgtacttcgacccgtcggattcaatcccgaagctgcacacggactcgagctgttcggagcacgtggtatcgccggaattcgcgagcgaggtgcagagcgagccaaagtggaaggagtgggagaaaagcctcgagtttccgtttaattacgtggatgccactctgaacaacagcaacagcttcacgacgcaattccagggcaataatcagatgatgtcgccgctgcaggacatgttcatgtactggcccaacaagcccttctgaacaaaccgatccacgccgcccattcgcatttgcacggtagcacgagactcaaggtctatgagtgtgcctgtgcgaccacacacagacgattatttatcaagttagcttagctagggcaaagaaagataaaaacattgaagctggaaacgcatgtgtttgttgggtccaccgtctgcaccggttctttttggtgttttgctatgtgacgacgacgacgacgatgacgatccaacggtgcatgtttgttgacctgtccctagtagtagtagcatgtgtacagctattgtatgtagaatgtagataggtacactactacacgttgttgtcatgtgatcatagaagctctcttaccgggaaaaataaaaattgatagaaggatggaaggtgtatttggaccttccctaattaatatttgttgaattattatc

SEQ ID NO: 20611 - DNA, 1381 bp, Glycine max
  Clone ID: LIB3242-432-H12_FLI
ccatagttggtgtagctagcgagggagggatatagggggaagcgtttattcattcattaagatggcatcggagcttcaattgcccccaggcttcagattccatccaacggaccaggagctggtgttgcactatctctgccgtaaatgcgcgtcgcagcctatcgccgttcccatcatcgccgaaatcgacctctacaaatacgacccctgggacctacccggattggcttcctacggagagaaagagtggtacttcttttcaccacgggaccggaaatacccgaacggttccaggccgaaccgggcggcgggaaccggttactggaaggcaaccggggcggataagcccattggccaccccaaaccggttgggataaaaaaagctttggtgttttacgcagggaaagctccgaaaggggacaagagcaattggatcatgcacgagtatcgtctcgccgatgtagatcgctccgttcgcaaaaagaacagcctaaggttagatgattgggtgctttgccgtatttacaacaagaagggcacgatcgagaagttccaaccaagcagcgatgttgttgttagccgaaaaatggaatcatcggagatcgaagacaggaagccggagattctgaaaagcggaggaggttgtcttctgccgccggttccgccgccgcaagcgaaggcggcggtgaagacggattacatgtacttcgacccgtcggattcaatcccgaagctgcacacggactcgagctgttcggagcacgtggtatcgccggaattcgcgagcgaggtgcagagcgagccaaagtggaaggagtgggagaaaagcctcgagtttccgtttaattacgtggatgccactctgaacaacagcaacagcttcacgacgcaattccagggcaataatcagatgatgtcgccgctgcaggacatgttcatgtactggcccaacaagcccttctgaacaaaccgatccacgccgcccattcgcatttgcacggtagcacgagactcaaggtctatgagtgtgcctgtgcgaccacacacagacgattatttatcaagttagcttagctagggcaaagaaagataaaaacattgaagctggaaacgcatgtgtttgttgggtccaccgtctgcaccggttctttttggtgttttgctatgtgacgacgacgacgacgatgacgatccaacggtgcatgtttgttgacctgtccctagtagtagtagcatgtgtacagctattgtatgtagaatgtagataggtacactactacacgttgttgtcatgtgatcatagaagctctcttaccgggaaaaataaaaattgatagaaggatggaaggtgtatttggaccttccctaattaatatttgtt

SEQ ID NO: 20612 - DNA, 1156 bp, Glycine max
  Clone ID: LIB3242-433-F5_FLI
gactacatgcttggccaaagctcctgtgctctgtatctcagtcttcggtatcatcttctgcatccagactacttgttttatagaataaggaagttgcagaagaatttcaagcttcgtgtggttttatgccatgttggaagatgtaataaagcctcttcttgaagttacaaaaacagctttgcttcatgactgtacactcctatatggatggagcctggaggaatgtggccgttacttggaaaccataaaagtctaagaaaacaagcctgcagacattattcaaggccaaatggatacagattatctatcaaggctaacacatgcccttacaacagtccggcatgttaacaagactgatgtagtcaccctcggtaccacatttgggtctctttgtaacattatgggtgcatctatggaagatctagctcgttgccctggcataggagagcgcaaggtcaagcgcttgtttgacacttttcatgaacccttcaagcatgtggaatccagccggcaagccattccagagacttctgtccagaacaagccagctagtccgtccagtctcatcgatcaggaacaatgctgaatcttcctccttgattgaagacaagcatgaggatgcagaagatgtgagctaacgtaggaagaaagaacttgaagttactgtcaaatctgccctttctgcagcttttgccaaatattctggtagagttggaaagaggaaaagcacttcacaggtggaggaaaaaggagaatcaattatttccaaagaatcagaagctgaaacataaaattaccatgaagtttttcactggttcaataatttacccataaacaagataatctcatgagattaagaggcttcatttttaatctctatgcatgtaaagccatggaactctattgggagtgtaaaggggaacatctctaacaaatgaagaggtagttagttgtaatatgatagctgaactgttaggtagttatgaggctttaatcaaatgggaaggaagagaaaggagagaggtggggtcatatggttataacaacaaatcgagggaagaatggattttcggttgttgagaattgagataagttgggagggagagttagtacctttgaaattcttgatttgagtgatattcttatctttgtaagg

SEQ ID NO: 20613 - DNA, 1243 bp, Glycine max
  Clone ID: LIB3242-438-G6_FLI
ggcaccatgaggaatgttcctgtgggggcaggacggcgaaagaacaagaactctacctcgcattatcgccacatcactatctccgaggcccttcaagcagcaagaattgatgctcaaaatggaactcatcttccaactttgaaaggcaatggtagagtcctcagctttggattagatgcacatgcacctatttgtgattccatggcatctctcatgaatcttggagagaaaaaggctcttaatggcacaagaaatgggtttcatcatggctttgaggatcaaagactccccgttccttgcaaaagtggggaaaatggtgatgactcttcaactacatcctccattacaatttcaagtcccaagggagaaaataacaaaagcaccttccaacaacaaccattgccccaaaatcatggtttccttcctcaagttccatgcattcctggtgttccttggccctatacatggaattctccagttcctccacctgctttgtgtccttcaggatttcccctaccattctatcctgctacattttggaattgtggcatgcctgggaattggaatgttccatggttttcctcaagttcacctgcttcaaacctcaagtctccaagctccagtcccaattctccaactttggggaagcactcgcgggacagtgacatgattaagcaagactctttgcacaaagaagaagcttcaacgccaagaaacgggagtgttttggtcccaaaaacgttgagaattgatgatccaagtgaggctgcaaagagttctatatgggcaactctaggaattaagaatgagtcagtgagtgggggagctatgtttaaggccttccaatcgaagaagggtgaaaagaatcatgttgaagcctctccaatgttgatggctaaccctgcagctttatctagatccctcaattttcatgaaaactcctgaattagtggcactggtgaaaagtccttacagcaaagttagtcacttcttgagttatttgtctagctagcaagagacggtgaccatctttgagtgacattgaccttgtatagaagaagcgaaagggtggtagtctctgatttcctcggcacaagtgagacgacgaggactaattctgtctttaatttcattcgacaatattaaaatagagtatataggttttttttcatgtgcttagtttgatgagtgagttcatgtatatgtacatatataaaaatatgtgaaatactgatctttagcc

SEQ ID NO: 20614 - DNA, 699 bp, Glycine max
  Clone ID: LIB3242-441-D11_FLI
gagggtgaccagtgaacacaatacagggcagcatcgccatgggattgagtattctgagaagcacttccatttccactcctatctcttcctccaaatccaaacccattttctcaactcttgttcgttcatctttcgcctccatttcccccacaaagtgtgttactcccaccactcttttcgtttctgccacccccttcttcaccgcctcacccaagcgcggctttcgtggtgggattgtggccatggccgccgctggctcgctccgcaaatcagaggaagagtggcgcgcagttctctcccctgaacagtttcgtattctcaggcaaaagggcaccgagttccctggaacaggagagtatgacgagttctttgatgagggagtttacaactgtgctggttgtgggacacctctctacaggtccttaacaaaattcaattctggttgtggctggccagccttctatgaggggattcctggagccataaatcgcaatccggaccctgatgggatgaggacagaaataacgtgtgctgcttgtgggggacatctaggtcacgtctttaaaggagaaggatttccaacgcccactaacgaacgccatcgtgtcaatagcatttcactgaaatttgcgccagccaattcttaataaaaattgagtctgctgttcggacgtgactgcttaagtacccaacattagt

SEQ ID NO: 20615 - DNA, 1139 bp, Glycine max
  Clone ID: LIB3242-441-E4_FLI
gacccaaaaagaaaaagaaaaaaattctcaccataacaccatcccctaacatatatcaattatgtatacttcattcaagcccaattctcacaatcacaaacaccagaaagaccacaatgtaacaacaaccacaacaaccaacaccaaatacagcgagatatcacacttcagccacaaacaacacaagctagcgtttgactactctgaatcccccttcaaatgtgacgggtgcaaggaactaggcatagggtcacgctacaagtgctccatctgtgactttgatcttcacacacactgttccattccttctccttctttgttccaccctttctaccccaaatgctccttccacttcctctcccagccccccggcgacacttcgcgctactgcaacgcgtgcgagaagccggtgaaggggttcctctaccactgcttctcgtgcggcttcgacctccacccgtgctgcgcgaagcttccgacagtgctcggaagcgacgagcacggcgtgaggttgtttttgtacaggaaggtgagctcggcgtgccataggtgcgggcggaaggggagtgggtggagctataggtcatcgtgcaagaggtacaatttgcatgtggcctgtgtgagggagatggtggtggagagttggcatgaagggggtgggttgatgaatgttgtggagagtgggttgtcataaggggaggggcaaaggaagtggcggtagtagggtgaggaggtgttgtgaggtggccggaatggcggtgcaggtggctgtgtccgcggtgctgggcgatccgaccgttcttattgccggaatcatggggtccttgatgtcaagggcttaataaagtaagagaaattattatatagttgaagatgttatgatgtcaaactaatttagaaaactaaagactcatacatgttattattttttttattgtatattaaaaaatgtgacaacatatcataaaaattagttgagaacatatgattctgaaccatatatacaataatttcttgattgtcatgaaattgagaatggtcagtttatgttgtatttgttggagatgtacaaattaattagttaaggggttaaccacccgtgaaaaaagaaatagatatatttcttaagtgttttttgc

SEQ ID NO: 20616 - DNA, 1178 bp, Glycine max
  Clone ID: LIB3242-444-D2_FLI
gatgggaagactgccttctttcccaatcaagggagaggctgttacaaatttggatttcattcggaagaggaagatctctggtgacttcaacatgataatggatcagaaaatttacacatgcgaacaacctcagtgcccttacagtgaaattcaccatggttttgctgacagaaattctagggacaaccatcgattgagttgtccttatagaggcagtgcttcaacagattatggaggttcaaattttcatgttaatgaggcaaagccggtcatattcccccaacagtcctttgttcaaccaaaacctactactactccgtctgttgttaacttggttccatctgttattgatctaaccggactcggagttccagaagatggcaagaaaatgatcactgaccttatgtcaatctatgatacaaatgttcaaagcaacaaaaatctaagttccagtaaccatgtatctgcagaaaatccaaaccttcctcagccaggcattcagcagcaacatgacaacttctttcgcagtcaaggaatcagtatggaaggaaacttctttgaagaagccaacatgtccaacaacaatcatcacatgtttgcaagggaggaaggtcaatttgaccggttcaaagctttgaatgcaccaccctttgagaccaatcacaacaacaacttccatttgatgtttggttccccttgtgatttggcatcctttgatttcaaggaggatatgcaaggaggagtagtagggatggatgctcttcagaaacagcctgatatctctatttggtaccagtgaaaatgacagcttaaagcttgaaacctcctcatcatcttcatctatcatggactcttttattttccttctaaaagggttggcacccccctaatcatgtgaagttcctttggccgaaaaagggtttcactgcaattttcttcacatgtaatcctgtaggcccggtagaactaaataatattttaagcttggcaggtctagtatgtgttatatacataataataataatatataataaaaacttgcatgttacccattatatgtagctttgtgaattgtgattgtgtgtttctatatcagtgtagccatcttgttgttacttaaatattattactcttatgtaagactgtgacataaataagatttgatgaagttctcttcc

SEQ ID NO: 20617 - DNA, 1951 bp, Glycine max
  Clone ID: LIB3242-444-G4_FLI
gcgagaagacgacagaaggggacgaccttcccattgtttcctcaccgtgaacaacacaacaccacccactcacaattcctattttctaaagcctaacgaaccctaattcttgattattcctcaattctttgttcccttcccatcttggggacacaaattcgccttcttcctcatttcgcaaacaaattcctcttccaagcatccccaattttcttttaatctattttttcgcctttttatttcacccatttaaacctgtggcttcttttcgacgcccccccccccatgtgtcagaatggattagtgtaaattattgaaagatacccatatataaaagcatgggtagtagtgacatggacaaaactccgaaagagaaggagtctaagacacctccagctacatcacaggagcagtcatcaacaactgccatgccaacaactaatcctgactggtctaactttcagacatattctcctatacctccacacgggttcttggcatcaagtccccaagcccacccatatatgtggggcgtccagcattatatgcctccctatggcactccaccacatccctatgttgcaatgtatccccatggtggcatatatgctcatccatctattcctccgggatcttatcctttcagtccttttgccatggcttctccaaatggtattgcagatgcttcgggaaatgccccaggccgcatcgaagttggtggtaaacctcctgaagtgaaggaaaaattacctatcaaaagatcaaaaggaagtgctagtggtggtaatttgaatatgtggattacagggaaaaataatgaacctggtaaaataccaggagaatctgctaatgggattcattccaaaagtggtgagagtgcaagtgacggaactagtgaaggaagtgatgagaactcccagaatgattctcaattgaaatcaagggagaggcaggactcttttgaagatgaaccatctcaaaatggaagttcagtacatgctcctcaaaatggggtacataatagacctcagacagttgttaatcaaactatgtctatcttacctatatctaccacaagtgctcctggagcagttcctggtcccacaactaatttaaatataggaatggattattggggcacaccaacttcgtccaccattcctgcattgcatggaaaggttccttctactgcagttgctggagggatgattgctgctggatcacgagatggtgttcagtcacaagtttggctgcaggacgaaagagagcttaaaagacaaaggcggaagcagtctaatcgggaatctgcacgcagatccaggttacggaagcaggctgaatgtgatgaactagctcagcgtgctgaagctttgaaagaagaaaatgccactctccgatcagaagtgagccagatcaggagtgagtatgagcagctacgttctgagaatgctgccctcaaggagagacttggggacatacctggtgtcgcgacgcctgggaaggaggatcttaggtctggtcagaatgatcagcatgtgagtaatgacactcaacagagtggtcagacagaggttgtgcagggtgttcattaggatcttgcttcctgctgcatgttgctttttaggtagataacctaaccaagtagcaacagcaagttctagtttttggttcaaattgtattaaaggtgatcatatgtagtattaggatctatttatgtcatatgatccctcgttcctaatttgtcatgtttatgacggccaaaaacttgtattgtagttagtgtgtgaatacttggttataccttctctgctacttcaaaagttagtgttagcagtaagaaagtatgattagtgaaactagttattgtccattatatggattgccgtgcttctgcgcaaataatttaatcaggaagatatattaaggaaatggaaatgaagttcagccctg

SEQ ID NO: 20618 - DNA, 925 bp, Glycine max
  Clone ID: LIB3242-445-G6_FLI
gcaaaagcaagctttggcaaagcagttgaatttgatgcctaggcaggtggaggtgtggtttcaaaacagaagagcaaggaccaaattgaagcagactgaagtggattgtgaatatttgaagaggtgctgtgagaatctaactgaagagaataggaggcttcaaaaggaagtgcaagagctcagggcattgaagttatccccacagctttacatgcaaatgaaccctcccaccactctcacaatgtgcccttcatgtgagcgtgttgctgtctcatccgcatcctcttcctcatcggccaccatgccctctgccctgcctccagctaatctcaacccggtgggccctaccatccagcggccaatgcccgtcaacccttgggcagcaatgttgaatcagcaccgtggccggccataatcaaaccctccaggccgtaggtaatagggtaaagttcaggatggaagctaggacattttagttgtgctagacagaaatgaatcaaagaaataggaatcttatgtgttggttaactttactaggactttgagagctcatggtttgggaaattctatttgcatccttttttttttcattgcaccttccattctcttttacattgcagaaattagttttcggaatctacaatgcaattatagaaattaatttttgaaatgtaaaagaaaaggtagagattttgaagagttaaaaaaaaaggatgcaactagaatcatcctcatgcttttggttaactctttttgtctaggcttattttactttgagcatagatagaacatgtttttagtcaactttaggatgtgtaaagtttggacatgttaaagtagttagtgttttcatctgctgaacagtgtttgttatttgttaaccttggaaagttggaaaagggaattggaatctgtattttatttt

SEQ ID NO: 20619 - DNA, 1187 bp, Glycine max
  Clone ID: LIB3242-447-E12_FLI
gcgagaagacgacagaagggggatgaggaaacattggtagaagaaattggagagagagagagagagagagggttggattggttttcttcttcctcttcctaaagagaatctaatctcaatcctcattacacacatatctacagatttcttcattcctctctcaatcttttctgttttcttttcccctctttgacatcctcgttttcgccgaaacaaaaacaactaagattttgttttttgttgtatttttcttcctgttgttatttgactcggttgtctgaatcagttgttgcagcagggtcgggagccacagctatgcagagccaagttgtgtgcaatggttgtaggagccttctgctttacccaagaggagcaaccaatgtctgttgtgcattgtgcaacacaattacctctgttcctccacctgggatggaaatgtctcaactttattgtggaggttgtaggacattgctaatgtacacacgtggagctacaagtgtgagatgttcctactgtcacactgtaaaccttgttccaccagcatctaatcaagtggctcatgtccattgtgggaactgccggacaacactcatgtatccttatggagctccctcagtcaaatgtgctctttgtcactttattactaatacaaacaatggaaggcttccaatccctgtccatagacccaatgggacaaacaatgcaggaacattaccttctacatcaacatcaatgcctcaatctcaaagtcaaacggtagtggtagaaaatccaatgtctgttgattcaagtgggaaattggtgagcaatgttgttgttggcgttacaacggataagaaataacatcatcacatataaaaggtacagttcacgtcatgacgcatcaccacagttgctgtcacaggaagatattgtttgtgtatatgaatatatatatgatattgcagcctgcaatggtttaattgaaatcaatatttttccaatataagagttggacgaatatcatgtatgtatgaatgtatatgaggcggacaagtcgtgaaaaggccataaaacctgttttgtgtgattgccagagcctactttgttttttgcttggtacccatacccaagtcaattggttcattcggataaaatatgttgacttccaagtcctagactagtaaatgctactatttctttcatgg

SEQ ID NO: 20620 - DNA, 998 bp, Glycine max
  Clone ID: LIB3242-448-A11_FLI
cgacagaaggggaattggatgagttcagcgcagctttggagcactcagaaaaccaaatcgagaaatgaggaagatgataggtctgtgccagcgaacccaattaatgggaattcgtgtgtcctcgagaaggagggttcccaagttccgaggtttggtttgatggctcgtgcttctgaactgagtcatagcaattccaagagtgttggtggagatattagttctggctcctctttgctccgtgttgaggtacagagtcagccacaaccgccgcaacatatgcaacagaatccgaggaaacaacgccgctgctggtcgccggagcttcaccgccgctttgtggacgctcttcaacaacttggtggagcacaagtggccactcctaaacagattagagaaccgatgcaggtggaaggccttacaaatgatgaagtgaaaagccatttgcaaaagtacaggcttcacgttaggagatttccagtttcttcaactggccaggctgataatgggtcatggatgtcacaagatgaatctggggataaatcaaagggaaacaacatgtcacagtctggttctccacaaggtcctctcacacctctgatcctaggaggaggaggaggaggatctgctaagggtctctcaagccctggacagaacagtgtggatggagaagatgagcaatctgattgccggaattggaaaggagggcttcaccaccaccagcttgaagctgataatcaatgcctctaatattttgcagataaattataatacaatacataaatgatgaagagttgaagacccagaatttgacaacataagaataatagatctaacacatagaagaactatagggatcaagttttatgctaccattattttaaactgtttggtagagagcaactgaggttttacaaatttttcgggtttcttcttttttaaactcggtatagttgtatggagcttaacttttactgggcaattttcatagattaatcctc

SEQ ID NO: 20621 - DNA, 672 bp, Glycine max
  Clone ID: LIB3242-453-H1_FLI
ggagcctgatctatcctgggttcaatcccttgtcaaggaatctccgtccgagataaaagagaagttgacaggttctggccctgttgcatctgttgatggaccgagttcaaatccaaagtcaaatccgcaagttgagtctgttgatcattctgttctaggagcctggcttgagcaaatgcagctggatcagcttgtagtctaatcaaatttgacccattccatcttgtgataggtatttaatttcacaacgtattctttttgtcaatttttttgggtggagcaaggagagggaatgtaatgatactgaagcgagggatggctgcaaagtacccgaatgataatctatttttccccccccattattttgtcattcattgttttactaaagagcttcagggggagtggtaagaaaccctctctctggggttgatgatatcccagtaaaaaagaaaatattcttccaaaactctagtttcaggactcttttcttcattttattcctagccatggaaaaaccaagagcctcatatttgtattcaagttcgttttcttggtaggaatctgctagtatattgctatgctattgcatgtatagaagactagagtgtgtttattgttaaggaattagaggtgatctgcgccattaatatttattgccggcagatcgtttag

SEQ ID NO: 20622 - DNA, 1347 bp, Glycine max
  Clone ID: LIB3242-463-E7_FLI
gatgatgtttgctttgttctctttctctctcctcaaattttttcctctctctctagggttccaagagtgtcttgaactactccagaaccctctcttgtttttcacaaatttgggtttagtagagtactgacccagaaaagaaggttcaacaggtacctaagagaggggatagaaagaaaaaaatagaaactgtacgtataaaagaagaaagaaacaaagatataaggaaaaagggaaaatattttgaataaggaagatataaggcaatatataaaaatattagtatttgataataattaggtgtagaaatattatggggaggggaagagtggagctcaaaaggatagagaacaagataaacaggcaggtaacgtttgcaaagaggagaaatgggcttctcaagaaagcctatgagctttctgttctctgtgatgctgaggttgccctcatcatcttctctacccgcggcaagctttatgaattctgtagcaccaacagcatgctcaaaacacttgaaaggtaccaaaagtgcagctatggtgcagttgaagtcagcaaacctggcaaagagcttgagcagagcagctaccgtgagtacttgaagctgaaagcaagatttgaatctcttcaaaggacccaaaggaaccttcttggtgaagacttgggcccactaaataccaaagatcttgagcagcttgagcggcaactggattcatctctcaagcaagtgaggtccacaaagactcagttcatgctggaccagttagctgatcttcagaataaggagcatatgctggtagaagcaaacagatctttgaccatgaagctggaagaaatcaattcaagaaaccagtataggcaaacatgggaagctggtgagcaaagtatgtcatatggtacacaaaatgctcactcccaaggctttttccagcctttggagtgcaaccccacattgcagataggttctgactacaggtacaaccctgaagcctcagagcagcagctagctgccacaactcaagctcaacaagtcaatggatttattcctggatggatgctttgacctaagctctcagtattttggatggctacataaataaaattagcaaacacctaagaccaaagtcaaaatgcctcttgctgttggaaatgtgtaaatgctgcttgttctttagttatttatttgttttggcataaaaacagcagtgactgacttaaaactattaaaactttagccatagtcataggatgtggcatgaaggttatagtattttgaatatctttggaggacaagttttatctgactgaatgacctgttaatgtcatttttcttttgcaatcactttc

SEQ ID NO: 20623 - DNA, 1184 bp, Glycine max
  Clone ID: LIB3242-465-C3_FLI
cagaatcagaatgatggcagcaactatggagcagcagcagcaacgcccccaacaacaagacgaagctgaagaaatacaacatggccctttacccgtcgagcaacttcaggcatcgggcatagccgccacggacgttaagaagcttaaagacgcgggaatttgcaccgttgaatccgttgcttacactcccaggaaagatcttttgcaaatcaaaggtatcagtgaagctaaagttgacaagataattgaagcagcttctaagctggtgcctatgggtttcaccagtgctagtgaactccatgcccagcgcgatgcaatcattcagataaccacgggatcgacagagcttgacaagatattggagggtggagttgagactggttctatcaccgagttatatggtgaatttcggtctgggaagactcagttgtgtcacactctctgtgtcacttgccaattgccactagaccaaggaggcggggagggtaaagctatgtacatagatgctgagggcacatttaggcctcagcgactcttacagatagcagataggtttggattgaatggtgctgatgtattggaaaatgttgcttatgctagagcatacaataccgatcatcaatcacggcttctgcttgaagcagcttcaatgatggtggaaactagatttgctgtaatgatagtagacagtgctactgccctctataggacagatttctctggaaggggggagctttcagctcggcaaatgcatctagcaaagttcctgaggagccttcagaaattagcagatgagtttggtgtggctattgtcataacaaaccaagtagtttcacaagtagatggttctgcagtctttgcgggacctcaaatcaagcctattggaggcaacattatggctcatgccacaactacgaggctagctctcaggaaagggagaggggaagagcggatctgtaaagtgataagttctccttgcttagcggaagccgaagcaaggtttcagatttgtgcagaaggagtttcagatgttaaagactaactgatttcagaatgtttgaattttttgttttcctatttgcatatcattttgtaaggtgtaccagttgactttcaacttgcaacttgcaagtatccagtatcaaaattttcaatatatgtcagtttggtgccccctatttttt

SEQ ID NO: 20624 - DNA, 1340 bp, Glycine max
  Clone ID: LIB3242-468-F1_FLI
gacaattcttctaccaccaaatcaacaatctgcaaagataaaataaacaaaaagaactcgaaagaaggaggaaaacaaaaagaaaaatttagtaactaccgataccatataataataagaatagtattattaaaagagaaagggaagggaaggtaacacgctatggcggcggaatcgggtggtacgccgacaaactttgatcttcccgaggaggtggtgcaagtgctaccgtccgatcccttccagcagctcgatgtggctcgcaagatcacttccattgctctatcgacacgtgtcaacaccctcgaatcagagctgtcctcgcttcgcgcccagatcgccgacaaagacaacctcatcgccgaccttcaatctcagctcgactccctcgacgcttccctctcccaaatcgccgacaaactcctccaaaccgaacaagataaggagagcttgctccaggagaatgcttcgctttccaacaccgtcaaaaagctcaatcgagatgtctccaagttggaggttttcagaaagacgcttatgcaatcacttcaggaggaggatgataactctggagcagctccagacattgttgctaaaatacagagtcaagcaagtttgacttccacgtcgcagattggagataatgatgtttcattgccaccgtctgtatcttcttcaacaggaaattcttttgccaaggatcatgaatctgatgccataagacctagagtatcacagaatctcctcttagcatctcaaggttccacccctcggattactccccctggttcccctcctagtttgtcggcatcagtatcacctacgagaacatctaaacctgtatcaccacagcgacattcaatttcctttgcaaccacaagaggcatgtatgatgacaggtcttcaatgttttcctcaatgtccttaactcatggttcaatatcaagctctgatgcaggaacaggatcacaaactggacgaacacgggtggatgggaaagagttctttcgccaagtcaggaaccgtttgtcttatgagcaatttggtgcattcttggctaatgttaaagaattgaattcccataaacaaacaaaagaggaaacgctacggaaagctgatgaaatttttgggcctgaaaacaaggatctgtacactatatttgagggattgattaatcgcaatctccattgacattgtgcttaagagattctttccaaatttgtaataacggatactatcgtgcatgtctccttatttatagcaactttttttttctcccctctgtataatacaatacttttttttgaacatgaaaaccgaatgacagtcttggcaggact

SEQ ID NO: 20625 - DNA, 1359 bp, Glycine max
  Clone ID: LIB3242-470-B8_FLI
ccaaccttaaagcttgaaactttcactaagcagagaagcatggtgtcaaaaaatccgaacccctctgaggctttttacttggacccctccggcatgtcgctccccggaatccttcccttcgccgccgcagccaccgccaccgcagattcctttgaggaccctgctaagaagactcgcaagccttacactattaccaagtctagggagagttggaccgaacctgagcacgacaagttcctcgaagctcttcagttatttgaccgtgactggaaaaagattgaagcatttgttggatcaaagacagtcatccagatacgtagccatgctcagaaatactttctaaaagttcagaagagtgggacaaatgaacatcttcctccacccagaccaaaaagaaaagctgctcatccatatcctcagaaagcttcaaaaactgctccagtactctcacaagtatcaggatcctttcaatcttcatcagctttgcttgaacctggatacatattaaagcatgactcttcagcaatgcctaaaactcccattattaacactgcagtgtcttcctggtcaaacaactctctgcagaaaaccaccagcgtattgcatgggcaaaaacaaaaagtgaataattgttgcagtagcagtagaagtcctagagcgcagttggttggtgaatctaatggtcaaaggaataacagccatccattgagagttcttccggattttgccgaagtatacagcttcattggcagtgtatttgatccaaatgtaactggacatgtacagaaactaaaaaggatggaccctatagatgttgagacggtgctattgttgatgagaaacctgtctatcaatttagcaagcccagattttgaggaccatagaaggctgcttgcatcatatgaggtggaacctgaggtcgataaatataaatgcagattgaaccatgcttgatgtgcagttgaagtgtgctacttagataggcggaggccgaaaatggctttgtttttcggctactgaatgcagtctggaaaaattttgcatgatgataaaatgccttggcatggcaactggctgaagtaaaaatgctgctgctcatcatcttggctaagcaacacttttaattctcttaattcaatttggttatgtatatagtaaaagaaattaatgtggaaatgtatagggtacatagttttgcataggtatgcacagtactagatatctgtgctctagatttagccaaacgtctaatatctggaaagcgaggcagctccctattaaacactttctaacattgtacagcataaaaattttgagcgctttgtttactaagagactcaactgagatttgttcagctc

SEQ ID NO: 20626 - DNA, 1383 bp, Glycine max
  Clone ID: LIB3242-478-G7_FLI
ggggacctgtgcaatatgcctttacacaatgaaaccagggcagggacatgccatttttactgcagaatgttctcactctttccatttccattgcatcacttctaatgtgaaacatgggaaccagatttgccctgtctgcagagcaaaatggaaagaagttccttttcagagtcctgcttcaaatatgccctatgatcgactcaaccaagtatctcctcgggaagaaggctgggcgactgtcttacggaggcttccttctcctcaaggtgacgctgctcggcagatttcatcactttatcatgtcactgagccagctatttttgatgatgatgaagccctggatcaacaaacttcagttacccatcctaaaaacgagattgataatgatgtaataaatacagtggagatcaaaacatatcccgaggtttcatccgttccaaaatctgcctctcgtgatgcctttgctgtattaattcatctcaaagctcctcattcagggagaaaacaaaatattggagaaaacaataccgaatcacctcctctggttgaaaactcgcgtgcctcagttgaccttgttacagttcttgatgtgagtggtagcatggcgggtactaagctggcactgctaaaaagagctatgggttttgtcattcagaatcttggtccatcagaccggctgtctgtcattgccttctcctccacagcacgccgcatatttcctcttcggaagatgactgacactggacggcagcaggcattacaggctgtgaattccttggtttcaaatggtgggacaaacattgctgaaggcctgagaaaaggcaccaaggttttttctgacagacggtggaagaactcggttagcagcatcattttactctctgacgggcaggatacatatacagtcaatagcaggcctaatgtcggaacagattacctgtcacttgttccaaactccattcatcgtaataacggtacgggcatgcagataccagtgcatgcatttggttttggctctgaccatgatgctacttcaatgcattcaatatctgagatatctggaggtacgttttctttcattgaagctgaggatgtcattcaggatgcatttgcacagtgtattgggggactcttgagtgtggtggtgcaagaattacaagtacaagttaggtgtgttcaccctcaattgcaacttagttcagtaaaagcaggaagttaccaaacaagcttgatggggaatgcaagactggctactatcagtgtaggagatttgtatgctgaagaggaaagagactttttggtgacagttaatgttccagttgatcaatcgagtgatgagacgtcgttgttgaccgtgagatgtctttaccgagatcctataac

SEQ ID NO: 20627 - DNA, 809 bp, Glycine max
  Clone ID: LIB3242-479-E7_FLI
aagcgcagcgtatagaaagggaaaagaagataatatggtggtagtttaagataatggtaatctatggcccaagtttatcggtgtactgtgggtcgtgggtacgagatggtgagagcaattggcaagataggtgcagccctcagaaattgagtgggtctgggagaagaagcatcacctgcaaattcgagagtgtgagactcagtagagcatgcagtgtggcactgactaccttgctcacaaccgctgcggtgatagcttctgtggcagcagctgatgaacccgagactctatccaacataccccagactttgtccggtgagtgcacgttgcccaaagattgcaagaaagctagaatacagaaaccaaagtcaaggaaagcggaatcatgcacaatcaagtgtgtcaccacttgcatcagaggtggagatggctctcctggggaaggcccttttaacgtgataagacctctggttgttttcaagcaagggtttcgaactcgtcaatactgtttggtggaatgctcagatatctgtaatttgataagcgatgctgtagtaacaaaaactaggtagtcactctttcagtaaatgcttatttgcccatgtatactttccttgtgtaatttagtactatgttcaaatatatctgtaatttttttttaagtgatgatgatagacattcaatttctgtttggtttatagcaataattataattgttatgtgtactcttttaagaagaagaaacaccaccaataataataatgtgtattttgatgctaaaaaccaaacagaaattgaatgtaatcatc

SEQ ID NO: 20628 - DNA, 1361 bp, Glycine max
  Clone ID: LIB3242-490-B6_FLI
ttcagagggggagaaatgggtcggtccagagttgcgttgcgctccgctgacgatgacccaaaccacagatcaaagagaaaaaaggctgctctgaatgtagaaaattcagaaaccttacctacaggccaaggagtaactactagcaaggtatctctctatcactgcaattattgtaacaaagatatttcggggaagattcgcatcaagtgtgctgtctgtcaagattttgacctctgcttagagtgcttctctgttggtgctgaggtgacacctcacaaaagcaatcatccatatcggattatgattggaatgcagatgaagagttgttacttctagagggcattgaaacgtatggatttgggaattggaatgaagttgcagaatatgttggaacaaaaaccaaatctcaatgtattgaccactataatgctgtatatatgaattcgccatgttttcctctccctgatttgtctcatgttatggggaagaacaaagtggaactctgtgccatggcgaagggacatgaagccaagaaagaattttctctgactgcagagcttactctgaaagaagaagctttgttcactgatcgaataaactatgaagaatcaaagaatgcagaaatcaataatcaaactatgtctaggttaacctcagcatgtggcaaagcttacccaagtacaattaagaaggcatccaacgtgatccaaaataatggtggagttaaggtggaagagtctcgagcagattggagcattggagagaagaaacctaaattatcaggcgaagataggccttctatgacagatttgagtggatacagttttaagcgagaagaatttgatgttgaatatgacaatgatgcagaacaagtgttggctgatatggaatttaaggacactgatactaaagctgaatatgcaatgaaactgcacgtgctccatatctactcaaaaaggtaaccacagataagtggatgaatattattgatatgggttatgtgattgcatcaaggtatttctaagcaatggttgtctcatgttgtcaacaactttgttatggtcaacacattgtgattatcaagcaaaacagtggcctactccttatattagttgaatgtaccagtatactaattacatgaggttgatcacacaacatgttgatttaagagaagattgaacattttgttattgtttgaataacttacatagttatgacaacatggataatgcatgtaacactttctaatcatatttgtataatgaacacaatgttttcgatcgaacataatagtcaaatacaaaataaacgcaaatgttaaccacagtcaaatacatagtcaatcaaataattaaagtatt

SEQ ID NO: 20629 - DNA, 1192 bp, Glycine max
  Clone ID: LIB3242-502-H8_FLI
cagtcagagtatattcctcgggaaccaagagagccttctggttctggagccgatcaagaaactacaaataaagatgttaataagatgctaagacgcctagctcagaatcgagaggctgcccggaaaagtaggctgcggaaaaaggcttatgttaaacaattagaatcaagccgtttgaagctcatgcaattggagctggaaattgggaaagcaagaaagcagggtctgtatatgggcactgcattagatgccggctatataggatcaacatcagaaacaataaatccagggattgttgcttttgaaattgaatatggacaatgggttgaagagcaagaaaggcggaatgaagaacttagacatgcatttcaaacacaagcacctggtgtacagctcaacgtagtggttcagagtgtcttaaatcattactcaaatcttttcagaatgaaagcagaggctgtaaaggctgatgtcctctatttactctctggtgcgtggaaaccatcagtggagcgaattttcctttggattggaggctcccgtccatcgcagcttctaaacatcatcgtgcctcaacttgagcctttgactgatcaacaaattgttagtattaacaacctccgcctatcgtctcagcaagctgaagatgctctttcacaaggattggaaaaacttcagcagagtttggtccacgacatggcagttgatccattgagtgtaggaaacttgggacttcagatggctcgtactatggaaaaatttgaggcactagaaggttttgtaaaccaggcagatcaccttaggcaacaaactctgctgcacatgtcacgcatcctgtcaattcaccaagctgctcgcggcttgctggctctcggggaatactttcatcgtcttcgtaccctttgctctctctggtctgctcgttcatgtgaacttgcctaggctccttagaggaagagacctagctgctctgcttcaactgaatcatctcttctgtgcttttcaaaacagttactcgattttggatatgaatgagttaatgccgtgtaccagcatgaagcaaaattatgtgatttgctgctcttgtgagtgtgcttgtacataaacagtgtatcatctttagtactatattatatatattatgtaaaactttctagtatctttcggaataaaatgtccattatgttacttt

SEQ ID NO: 20630 - DNA, 2743 bp, Glycine max
  Clone ID: LIB3242-510-A7_FLI
ttttcccttttctcttctctttcttttcttctttccatggctactcacttcaatctgcaacaccaactgttcagcaactccagatccgtgggattagatatcagaaaaagaacaactgcttatgcccttcaacatgccaattcaaatgcattagatgagagaaacaataattctttgaatagtggcctgttagttggatctctgtctgtatgttacacatccttaaagaagtgctcatcattggcagcatcagctaaggctcatttttccagtagtgatgatcaaagcaaagaagcagatgaggttaccaatgttatatccactagtcagggaatggaaattagtagggtggattgtgttgtgtggttattgcatgaatcttccaggagcttttccaaagcaatcaactcgcttggagtagcaatgagtggtccagctcttgcaatggcttggattgggaaggatgtgcatgaatggcatagacgtattgcttatcaggttgcagtttatgctttaatgaaagctgcaattgatttggagatattgctttcacatgaacggctaaatgaattttcccctgttaaaaagattttgagcccattaatgaatcaaatgggagagcgcattgaaattcgactgaaaatgaagcatccatatttggtgcagtggtttagagagactgaaatgccacgaatagcaggatattttattccacttctaaaaaagtggtctgtggaatatgcaggaaggtttgcttgaaacaaccttgttttcagaaacatatatttgaaccttggatgaaaatcctttttcatagtcaacaaatgtccttgcattggcttgaatttcaaagttattcttcaagttgatgattttatgttcatttctgttagattcgccaaatattcagaagaaggaatttagcctgacagaaaactattcagcggtattgcaggaattattgtggctataacctgttgtagtgcagtggtgaaattgggcgccaggcgcatctgctgccccttatttgtattgtctctcgaagatgctttggtcaagctcatggatttctcactcaatcttgcacctgtggacaaattacactggttagcaactgaggcgggatttgaactgaatttcttgtcccattttggtgggaaggtttttcccagtgagaaaactgaggacctagagttttggatcggtttagcccataagaaactattgaaagctttctgtaaagaaagcatcacttcaaagaagcaaaattttcagcaaaagatacaagcagataatttggccacattgggactttttacatatcttggaaaaaggacaagaatatttttgtcggcaatgggcattaaggatcttgatggagtagttaagaacttcctcagttacttggaatgtggaattcttttcatatatccagaattttcctccattcgagtgtatcagtgtttcatggaggtggtaactgatgagataggatggcttgatttttatggttcatatgttcaaataaattgcaaggagaaaaggtctaaacataatgctcgccaggcagagaaagagataatttcttctgtagtttttactgtgtgctatgatgttttctctgggtttgcacacttcaatcgcacaactcaacaatcattggacacagcttcacgctcatacttgcttcgttgtcagggtttgctaagtatttgtctgcaatatcactgggctgcttatgacaattcaggtgaatcactaaatactgtggatcatgcttcatttgacaaccatacatcatatatgggaagtataaatggacccaagttacctctggtgtttgaagtgcaacagatgtcacatgacttaactacagaaggatgtccaaagagtgatttccgaaacagttctatattcaaaaaagctccaatttcagcaatcgcgaataagaaaacatacgaggaagatacctgtgtcaacaagtctaatcctcagcatgaaagttttatcaagagatacagcatcaagttggcatccacaagtgcagacctctggatgggtactgtgttgctcttcatagacattatggttgctttagaactacttgtaaggcaagtgcatggctgcaaggcttccgagagtcaaagaaagaaactacacagaaccatgactgacataattgtgctaattccagtgacaattttgatgctaattcctgtaacagctgtaggccatgcagctattctagcagctatcaagaagtatatgccattcttgatcccctcctctttttcttcagagcggttggatgttgtaaagctaataaagcaaactagaaagatgggttatcagttacattcggctcagtttgaccttgaagatcaaccagcaaccatttcttgagtatgaccgactctcggttacatttgggtcgggcttaatcattcgaatcaaacttcatagtgattagttcaagccttagagtggataataattgcaatgaccttccaagttgcatcagtacccaaaaagtttaggtatatttggatagccgttataaacatatttttgggtgctgcacattctcttcgaaaaggatactctttgtttgtatcttttattctgaacaggctttcggaaggtgtaaaagttatccaaaatcatgcacctattcttgctgcaatgtgagtgagaataccatgattatgacaaaaagaacactcttaataatcaatattcatct

SEQ ID NO: 20631 - DNA, 1269 bp, Glycine max
  Clone ID: LIB3242-512-E11_FLI
ctttctctcttacacccttccattttctccttctcttcctcccatggtgtaattgctccaactatggccgtggacctcatgacgacgggttgcagccgaaacgacaacatcaatagtttcacaaccaaagccgaggaaaatgccgtccaagaagctgcttccggcttagagagcatcgagaagctcatcagactcctctcgcaaacccaaacccaaacccgccatcaaatcaacaacaatagctctaatgaaatcgccatcgccatggactgcaaggtcgtcgctgacgtggcagtctccaagttcaagaaggtcatatccctcctcggccgaacccgtaccggccacgccaggttccgacgcgcccctctccccaaccaaaaccaacacactcaacctccctccgaaccacccgtgttccacgctacgccgctgcaccagatcccaccaccctcccttcaccaaattcccaaaactgaaaggaaccttaacgattcctcctcttctaaaaccattcatttctcatacccctccgccgctacctccttcatctcctccctcaccggcgacggcgccgccgacaacaaacaaccttcctcgtcgccgcccgcggcggcggcgacgacgacgccctttcagatcacgagcctctcgcacgtgtcgtccgcggggaagcctccgctttcgacttcctctttcaagagaaagtgcagctctgagaatttaggctctggaaaatgcggtagctcctccagccgctgtcattgttccaaaaagagtaggaaaatgaggttgaagagggtagtgagggtaccggctataagcttgaagatggctgatattccaccagatgattattcttggagaaagtatggacagaaaccaattaaaggatcacctcatccaaggggttactacaagtgcagtagtgtgagagggtgtccagcgcgaaaacatgtggaacgagctttggatgatccagctatgctggtggtaacctacgagggagagcacaatcacactctctctgctgctgatgctactaatctcattctagaatcgtcttgaaagtcgtaaccaaatcatcttttttccgtgacaaggttttaattaagtagtagaagaaacgcaaaccattattaatcaacgttacaagttttcaacgggagcaattatggcgtgttgaattgaattgcaactttactctagtcagtcagggggcattaatcttgaaagatattattagtgggtgctgttccctttccctgt

SEQ ID NO: 20632 - DNA, 360 bp, Glycine max
  Clone ID: LIB3242-512-F10_FLI
gaaggtgttgccgtgttcgcatcgttaccatggggagtgcattgtgccgtggttggggataaggaacacttgtcccgtttgtcgctatgagttccccactgatgatgctgattatgagcggaggaaagcgcagagatctgtaatgtgatgatgatgatgatggggttattattagggtcagttttttgactttcagtaatagggtaatggatgaaaacttgaaaaagtatagattttttttttttgctgccgaagaaattgtgctttttaatttaaaaaaaaaattgagtctagggaatgatgtttctctttgaattgtactttttgggatacatcacagaaatgaatcatttttccatc

SEQ ID NO: 20633 - DNA, 1909 bp, Glycine max
  Clone ID: LIB3242-516-A9_FLI
atccaatccaattcccaattttcgaatctaccctttctctctctacgatggagccttcctcgatctctccaccgccagctccgcctgccaccgccgtccccttccccgccgaacccaacgaccaccttccaccacccattcccgaaccaccttctaaccacccaccctacgccgagatgatatacacggcaatcgaggcgctgaaggagaaagacggttctagcaagagggcaatagcgaagtatattgagcaagtgtatacgcagcttccaccgaatcactcagacttgttgactcagcacttgaatcacttgaagagtaggggattgctccaaatggtaaaaaaatcttacgcccttcctagatctgtgcccgtgtctgttcctggacctgcacccacacaagggacatcagcagtgccggctgctgttgttgccatcacgacgactccgaggcccagaggtcggcctcgcaaggcccaaaatccagttcagaactcgcctctgcctcaggacactgtcaacgtgcaggttcagcagaatgccgagccggtctgggctgcgcttgggcttgcagacgagcccgtgcaagcggaaggcagtggcaagaagcgaggtcgtccgaagaagagtggcatcttaggagcgggcctgaccaagaggggccgtcctcccggctctggaaaaaagccgggccgtcctcccaaggcaaccacaacagatgtttctgcttctgctgggcccaagagacgtccaggccgcccgcccaagaatcagtcgcagcccactctcattccctttgctccggctgtatctgccgcttccgtggatacagagcacgtggcagcatcagctgaaactgcgccggttgatgctgacgcggctctcggaccaagagcccgtggacggccgaagaaatatgctgacgagatgattgctgcgggccgaggcaggggacggggccgtgggcgcggtggcggcggaagaggacgagggagagggcgtggtgaattgcctgcacagcccagaaaaccaggggcaaggcccgtgggtcgtccgaaaaagggttcaacttctgctagtacttctcaaaatgctgcaaatgaagatctcaggaggaagcttgaacactttcaatcaaaagtcaaggaatctcttgcagtgcttaagcctcattttaaccatgaaagtccagtcactgcaattgctgctattcaagagctagaagtactgggaactatggacctcaatgtaccactaagggatgaaacacttccacatcaagtggagctgccaccaccacagcctccagtgcagcagcagcagcagccaccacagcagcagctcagcagccaccacagcagccaccacaagcaacacctagcaccacaacaactgccgccacagccaccgatatttcagcaaacatatccctccatttcatctgccgcagttccaccatcaccagccttcgctgcagttccagcaacagcagcagcagccgccacagccaccgccacagctattccagcaccaggcacagcctccttcccaccaacagtttcatccttaggaatcaggcccaggctaggaagaattacatggtcctcaatttgataatatgatgctaggaagaattacatggtcttcgatttggttatgaacaatctgaaacaagtgttttaacaaggcacatgaggggtaacatatttgtaaagcgagtaggcagtagcagaactgatttttcgtcaagtgaatcgattgtccatttagtttgttgttgtgcactattctagattgatccctgaagtaatttttagattttagagtactgataattctgttattgaagtaatatttgtttgactttggcagctttagattattagtcatattgttcatgttggtct

SEQ ID NO: 20634 - DNA, 935 bp, Glycine max
  Clone ID: LIB3242-516-D7_FLI
gccatcggcgcaacgaccccgtttttcacagctatcttcgctttcttaatcacatgcaagaaagagaccggggaggtttacctcgcgctgttgccggtggtgttcggcatcgttgtcgcgagcaacagtgaacctttgtttcatttgttcgggtttttggtctgtgtcggttccaccgctggtcgtgctttgaaatccgttgttcaggggattttgttgacttcggaggccgagaagcttcactccatgaacttgcttctctacatggctcccttggcggcgttgattttgttgccgtttactctctacattgaaggaaatgtgttggctttgactgttgagaaggccaaaggtgacccctttatcgtgttcttgctgcttgggaatgccaccgtggcgtatttggtgaacttgacgaattttcttgtcacgaagcataccagtgcgttgacgctgcaggtgttggggaatgcgaaggcggcggtggcggcggtggtttcggttctgattttcaggaatccggtgacggttatgggaatggcggggttcggaatcaccatcatgggggttgtgctttacagtgaggccaaaaagaggtccaaagttaccactcattgatgtttcttttttggctttcacaccttattcttcgggtattttctttcttttgtttttattcatattgcacaattgcactatttttagtttcatttaatttttattattgtatttccgtggaattgggtcgaattaattacagcaattggactgtataggaattaggaaggaaggaaggagaagcagaaaaaaggggtgggagggattattattacttttgtgttgttgttgggttcctgaaattctcttggccgttgtgtaagcttatatatgaaacgctctatgccctttggcaacatacataaaaacgttcgaag

SEQ ID NO: 20635 - DNA, 648 bp, Glycine max; identical to SEQ ID NO: 8307
  Clone ID: LIB3242-523-E12_FLI

SEQ ID NO: 20636 - DNA, 979 bp, Glycine max
  Clone ID: LIB3242-533-E7_FLI
cacactctctctttctctctcttcaaatcaaaacccatcacaattcacaacaacatacaaatcccaaatcctatcttttctcttctcatataaaagaacccttctttcgaatccttcccgctcttttccctctgatttaattcatgcgcagatccaaaccctaatccatctctccgagggtttgatggctgaccaaggattggaagggagccagccggtggatctacagaagcatccttctgggatcgtgcctacccttcaaaatattgtgtccacagtcaatttggactgtaagttggacctcaaaacaattgcacttcaagctcgtaatgcagagtacaatcccaagcgttttgctgctgtcattatgaggataagagatcccaaaacaactgcacttatttttgcttctggcaagatggtttgtactggagctaagagtgaacaacagtctaaattggcagcaaggaagtatgctcgtattatccaaaagcttggcttcccagccaaatttaaggatttcaaaattcagaacattgtcggctcttgtgatgtcaagttccccatacggctggagggtcttgcatattcccatggtgctttctcaagttatgaaccagagctgtttccagggctaatctaccgtatgaagcaacctaaaatagttttgcttatatttgtctctggaaaaattgttctaacaggagccaaggtgagagatgagacttacactgcctttgaaaacatatatcccgtgcttactgagttcaggaaaaaccaacaatgattgtaattcaagaaagagcaggagcagtggtttggcagagaagttcgtggaactgtaaatattaagacaaaggatataatctagattgatataaattaaagacagccgtttgtgttgccccttgtctttgtttttttgatttgtcttgatgtagtaaagtggcagacgttgtctattgaattgacatttttg

SEQ ID NO: 20637 - DNA, 1760 bp, Glycine max; identical to SEQ ID NO: 6302
  Clone ID: LIB3242-535-G12_FLI

SEQ ID NO: 20638 - DNA, 965 bp, Glycine max
  Clone ID: LIB3242-542-B11_FLI
ccgccatttctttcacaggccctcaaaagcatacacgactggaacaaggaaaagaagaaaggttcacactgatgatgaaggaattgaaacaagatggcacaaaacgggaaaaactagagcagtttttgcatctggtggtgcagtaaaaggttttaagaaaatactagtactctacaccaactatggaaggcaaaagaagcctgagaaaacttactgggtgatgcatcaataccatcttggcaatactgaagaagagaaagatggagaactagttgtttcaaaagtcttctaccaaacacaacctagacaatgtgttaatcccattatcataaaggacccgtacgaaaaaatgttgaatggtggaagtgtccaagacagcacaaatacatcaataactaaaactactgcaactcttttggattgctacaatgctccttacatagattatgatcatgcccatgcgagtcataatagggaaagttcctcacaactaataattcccagctcggttgttcaggttgatggctcttatattcgctcaacaatggatgcaaagaaagcaagatttgaaagtaacactgggaagagcttctaggtagacaagcagtgacaatgatttacagcatgtcctccatattgtttccattactaattgagtaatagtatttatatgtgaaattagactgaaggaattccaagggttggaaaaatataggtttttccttgaattattgagatcaatatggcgcaggcatgatggactttcccataattgaccctggttgaagttgagagacaagcaagaaggtatatatatttgcggtactgtagtttgattttaattttagggtacatgtatattcgtaaaatgtgtttatactttatagatattacaatacgtggtagggttatcgtttattgacaactcttcagaactatgtcagtctatatattatgttttgtct

SEQ ID NO: 20639 - DNA, 1440 bp, Glycine max
  Clone ID: LIB3242-545-F6_FLI
tttctcaacaacttctgctacttcctactccaaccgcacttctgctccgcaattatcatgggcaaggtcaagatcggaatcaacggatttggaagaattggccgtttggtagccagagtggctctgcagagagacgatgttgaactcgttgccgttaacgaccctttcatcaccaccgattacatgacatacatgtttaaatacgacagtgttcatggacactggaagcatcacgatgtcaccgttaaggacgagaagacccttctcttcggtgacaagccagtcactatttttggacacagaaaccctgaagagatcccatgggggtcaactggagctgacatcattgttgagtccaccggagttttcaccgataaggacaaggccgccgcacatttgaagggtggtgcaaagaaggttattatttctgcccccagtaaggatgcccccatgtttgttgttggtgtcaacgagcacgagtacaagccagagcttgatattatttccaatgctagctgcacaaccaactgccttgccccacttgccaaggttatcaatgacaggtttggcattgttgagggtttgatgaccactgttcattccatcaccgctacccagaagactgttgatggaccatcagccaaggactggagaggtggaagagctgcttcatttaacatcattcctagcagcactggagctgccaaggctgttgggaaagtcctccctgctttgaatggaaaattgactggtatggcattccgtgttcccaccgtggatgtctctgttgttgacctcacagtgaggctggagaaagaagcttcctacgatgaaattaaaaatgctatcaaggaggaatcagagggcaagttgaagggaattcttggttacactgaagatgatgtggtctccactgactttatcggcgatagcagatcaagtatttttgatgcaaaggctggaattgcattgaataagaactttgtgaagcttgtttcttggtacgacaacgagtggggatacagctcacgtgtcattgatcttcttgtattcgttgccaagaagtctctttaaggtgttacttcaaagtagcttgtcttcacattattatcgtatgtttatgtttagctgcgatttagtgtcttgctcgagcaaaaaatgagaggtctgaataaatcggtttctgaaaccagtggtgttacttgttggaggagcattagctcttttttggacttttgatgttttctcttgtggagggggatcgagtttttggatttttatatactcgctgatgtacttggcttgaatacttgctaatgtacttgttattgattgttatagtagatatttgtccgtcctttttttcatttgtggttctcgtatatttgatcctgtttgctttgaatcttggattcgtggtttaaacatttttctgtgctt

SEQ ID NO: 20640 - DNA, 861 bp, Glycine max
  Clone ID: LIB3242-550-A8_FLI
cgtgacccggaacccgctatgagtccctacattttagaagtgtctggcggaaacgacgtcgtcgaggccatcgcgcagttcagtcaccgcaagaacatgggaatctgcgtcctcacgggttctggaaccgtcgctaacgtcacgctccgtcaaccttccaccacgcccggcaccaccgttacttttcacggccgtttcgacatcctttctgtttccgccaccttccttccgcagcagtccggcgcttctccggcggttcccaacggattcgccatctcgctcgccggaccgcaggggcagatcgtcggaggacttgttgccggcgggctgatggctgccgggactgtttttgtgatcgctgcctcgttcaacaacccggcataccacaggcttccgccggaggaagagggcgcctccgccggagatggacattcgccgccagtctccggcggcggagacagcgggcatggacaggcggagtcgtgtggaatgtccatgtacagctgtcacttgccctctgatgtgatttgggctccaacggctagaccaccgccgccgccgccgccgccttactgatcgatcaatcacacgtcgagtttctgtttctttttcttctgaggttaactttgtggttattgtaatcaattctactatatgttgctctgtttaatttgatttagttggtgtagttgatatatctggtattagtttaactattattattattattataattaggttaagtttataaatggaaacattagtatagtatagttattatgtagctagggtggtttatttgcggcgctaactgtattatgtcgatggctctctaccttgttgaagagattttgtttatcg

SEQ ID NO: 20641 - DNA, 1558 bp, Glycine max
  Clone ID: LIB3242-553-A5_FLI
gccagaacatccaccacggaagtgatatctagtggaattaacggaacaagagatggagcacttcaattaatgcatgctgaacttcaagttctttcgcctttggttccggttcgtgaggtgaatttcctacggttttgcaagcagcacgcagaagggttgtgggctgtggtggatgtgtccatagatagcatcagagaaagttcaggagcacccacttttgtgaacggtaggaggcttccttctggttgcgtggtgcaagatatgcccaatggttattccaaggtgacatgggtggagcatgcagaatacgaagaaagccaagttcaccagctctataggcctttgttgagctcaggcatggggtttggtgcccaacgttgggtggctacccttcaacgccaacgcgagtgccttgccattctaatgtcctcagcagcaccctctcgagaccattccgcaataacagcagggggaaggaggagcatggtgaagctggcgcagcggatgacgaacaacttctgcgcgggggtgtgcgcctcgacggtgcacaagtggaacaagctcaacgccgccgctaacgtcgacgaggatgtcagggtcatgacgcgcaagagcgtcgacgaccccggggagccgccggggatcgtcctcagcgccgccacctccgtctggctacccgtctccccccaccgcctcttcgacttcctccgcgacgagcgcctccgcagcgagtgggacatcctctccaacggtggccccatgcaggagatggcccacatcgccaagggccaagaccacggcaacgccgtctctctccttagagccagtgcgataaattccaaccagagtagcatgctgatactgcaggagacatgcatagacgcagcagggtcgcttgtggtgtacgcgccggtggatatcccagccatgcacgtggtgatgaacggtggcgattcggcttacgtggcgttgttaccttcagggttcgcgatcgtccccgatgggcctgggtctcgtgggcctcatcagaacgggcccacttcctcaacaacaacaacaacaaacggcggtgataacggcgtgacgcgcgtgagtgggtccctcctaacggtggcgtttcagatccttgtgaatagtctccctacggcgaagctcacggtagagtccgtggaaaccgtgaacaacctcatctcctgcaccgttcaaaagatcaaagccgcgctacactgcgaaagttaaccgtcacgtgattaccatcttcgggtcacgtgattaccatctctcgggtcacgtgaatctttttttttttttttttgtatttattgaggttcttgttcttgtggaaaattttaacgttgtagcgaatggaccttgaaacgtgtaataggtggcgcgtgggttggttggttgagtcaagaacgaaccgcgcgtggggaaaaaaagagaaaactccttgcatgggttatgttccttaacacaaggcaagggtcgtggttcgggtattgactcgggtcgaccttttttgtttgctcgagtacaagaaagcaatagaggaatg

SEQ ID NO: 20642 - DNA, 1517 bp, Glycine max
  Clone ID: LIB3242-570-B7_FLI
atcattttgttagaagcgactttctcaaaccaatagtagatgcctttgttgctaatggtaatcgctacaatctgctcaactctgctgttcttgaacttttcgagtatattagcaaggagaatctgaaattattattgaagtatttagttgattctttctgggaccagttagtgaaatttgagtatttggtttccattcattcactgaaagtaaaatatgagcagtgtttggataatgatgggacaaaaggtactgctattatgattgaccttcgaagacgacttgatgagcgtgctctggataaagaagaggaagactactttaatgacagtgacgaggaggatacaacctctgcatccatttcacataatcagaaagtgcagcaacaacaacctgtgctatccaatggagttgctgcaagctattcaaagttaagtccaaggcctggtggactggttgactatgatgatgatgaggatgaagattacaggccacccccaaagaggccagaagcttctgaagaggatgaagggataatggagtctctcaggcagaaaagaaaattgccttctgagaaccctgagcttgcaaagaagttgtcaaaaaactcaaaatcaaaagatagtgtttttgcttccttgtgttcaacattgagccagactgtgctgcctggtaagaaaccttcagtcaatgttcatactggtccttgtagagaagacaataaagaggagtcaaatgtttctagaaatttctgtgagaatagcaatgcaacggctgaagtgaaccatgtagagaaagagactgccgcctatagaaatttttctgatgggttgtacggcacttcagataatggacagttgggtggtgaggaacatacattggtttcaccaaaatcctccccagagatggccgtaaatggatcttaagattttcaaaccatacagaggaaggcagattgtttgtgctatttgacgtatatgcatttgctggtgctaagtggttgctgtgcttatgtgaaacaaaggattgcattctacaaagtggtaggttctgattattcattccttctgtggaggacatgtggaaatactgtacagtgccactgagaagtgggcaagatattatacagcaacttcaatctgcttttgtaggctttttgggcatggtaattgttgcttctgtgtaacattcaccagcaataattctcttttacctttccttctcaacctcttacagttcatttttcattctgcagaggattctgggttggggggttgatcctcttatcattttttacttatataagttatatttacttattgatagagggcgtcaatattcgccctacacaggtttttttttttcctacccaattttggtggtgaatgtgatatagggatttgtgcagtgagtttctagggccaatttttcgcaaatgtagtaaggagaaaacatgatccgatgtaaagctatattggattgtaacgtatgcattagacttcccatattgtcatcgt

SEQ ID NO: 20643 - DNA, 1157 bp, Glycine max
  Clone ID: LIB3242-662-B11_FLI
gcaatacagaactcagtcccagccattacatttctcatggcagccatattaagaatagagcaagtgagattgaaccgaaaagatgggttgggtaaggtggcgggaacagtgctatgtgtggttggagccaccgtgatcacactatacaaaggtccaacaatatatagcccaacaactggtgtgaacataaacaacacaagagtgacacaagtgtttgaattggggtcagtgtcactgggagatgcaaaggggaagaactggaccctagggtgcttatacctcattggacactgcttgtcgtggtctggttggcttgtgttgcaagcaccggttctcaagaagtacccggctcgcctctctgtcacttcctacacctgtttctttggactcttgcagtttctcgtcattgctttgctccttgaaagagacgcgcaggcatggcttttccactctggtggagaagctttcactattttatacgcgggagtggtggcatctggaattgccttcgctgtacaaatatggtgcattgacagaggtggtcctgtgtttgttgccgtctatcaacctgttcagacttttgttgtcgccatcatggcttccattgctttaggagaagagttttacttgggcgggatcattggtgccgtgttgattgtagcgggactgtaccttgtcttgtggggtaagagtgaagagaggaagtttgcaagggagcagcttgcgattgcatccactgagcatagcatcataaggcccgcaagccacgccaaagcatcacttgctcagccactcctttcttcatcaacagagaatgtttgaacaagatcaaaattccaacttcaaaccacacaccattttcttggtgagaagaagtaaaagaaaaaaggggaaaaaagataccagctataccttactagttactactgctactactacattatgtcagcaagtttgtgtgtgttggaaccggttttcatcttttcctttctttttttttttatttaattcaaatgcttttttagtaggtcatttagaatatgagagaattgtgggaatggttgtaatggtggatgccactttaagtggggctagagcctgaaatccccccatatgcttttgtatgtcaattaatttatggtttgatttaagaaatg

SEQ ID NO: 20644 - DNA, 899 bp, Glycine max
  Clone ID: LIB3242-677-A1_FLI
ggtcctccaatctcgaatcggagttcgacttaatccgatccgtcatcgattcgttccctctcatctcgatggacaccgagttccccggtgtcgtcgtgcgtcccgacgccggcgacccctccttccgccaccgccaacccgtcgcgcactacgccgtactcaaagccaacgtcgaccgcctccacctgattcagatcggccttaccctttccgacaacgccggaaaccttcccaccctcggcacctccaacgccttcatctgggaattcaacttcaaagatttcgacgtcgcgcgtgacgcccacgctcacgactctgtggagttgctgcgccgccagggcatcgatttcgagaagaatcgcgatttcgggattgactcgttccggttcgcggagctcatgatgtcgtccggtctggtctgcgacgacgccgttagttgggtgacttttcacagcgcctatgatttcggatatttggtgaaattgatgacacatcgcacattgccagaagaattaagagagtttctgcgtctggtgagggtgtttttcggagacagagtctttgatgtgaagcatttgatgaggttctgctcaaacctgcacggtggattggaccgtgtttgtcagtcgctgaaggtggaacgtgttattggaaaaagtcatcaggctggttctgatagtttgctcactctgcacgcgtttcagaatatcagagagaattactttgacaaggctgacggacttgttcagtacgctggtgtcttgtatggtttggaggttttctgagctttcttatatatgaaataatagtaatcaatttggcctaggtttcttttctcagctttaaattgtaaagcttacacattttctctggcttatcaatatccattaggaattatt

SEQ ID NO: 20645 - DNA, 1770 bp, Glycine max
  Clone ID: LIB3242-679-A5_FLI
ccttcttcttcttcttctctcgcgccgcaataataatactaaaacatgtccaactctgatggagccattaacgccgtccctcccaacgacgccaacaacaacacaatcgttgagtaccagcagcgaaccaccaccaccaccaccgccgccgccgccgccctcgccgtcaagaaaccgccttccaaggaccgccacagcaaggtcgacggccgcgggcgccgcattcgcatgccgatcatctgcgccgcccgcgtcttccagctcacgcgcgagctcggccacaagtccgacggccagaccatcgagtggctcctccgccaggcggaaccctccatcatcgccgctaccggctccggcaccactccggcgagcttctccactgtctccgaccacaagcccctcctccctccccctacccccttcatcctcggcaaacgcattcgccctgacgacgactccgccgccaaagacgacgccgtctcgctcgtcgccccccccacgccgcccgccctctgggccctacctccccgccccgacttcggccaggtctggagcttcgccgccgcgcccgaactcgtgtcggtgtcgccgcagaattcaatgtttcaccatcaccatcaacaccaccagcagcaacagcaacaggccgccatgggagaggcctctgccgcaaggctcgggaattacctccccggccacctcaatttgctcgcctcgttgtccggcggccacgggaattccggccggcgggacgacgagcctcgctgaatgaatcaatttctgaaattatgatggatttgattgtgatcttcttcgtatataaatatatgtattattgtgtgtgggtgggtgagtttgtattttgtctctgtgactttgttgttgtgtgtggactactgtggacaaggagaaggattgaagattcttagtgaaatttttagggttagttttttttttttatttttaatttttggtagtatttcgagtggacaagtccatgaattaaggaattcaattggattattagggttttccttgtttggaaaactgattaggttacttgttaggagatgatgatgaatttgtttagaacattgctggaggagagacaacagagagtatgatgatgagatgaataaccagggattgaggcttggaagtgggtttcaggacctcgatccattgatcggtatgcagatgcagatgcaaatgcaaatgcagacgcagatgcaagtgtaatgaaatgaaaaattaatttaatgatgttattgtggaaaatatcacaccagagtccaaggcgaatgaattcaaggttaagcttcttcttgtttcttctgtctcgctttcactgtgggttttgatcaacttgacttactttctttcactttcctaatttgctcattaaaagtgattagtgttcatagtcttagtttgagtgattgtgtgtttgacaatcaagcgtcactcccattttcttggagtaaacttctttccaatgtttattgagaattcatgttattgcgcatcattgaaggattgtggtccttctaattatgcattctaccttgcttagttgctctctccttcactttcggggatgcctaacagcctgcttctgcaatgtaagacctctgtttctagatttttatctgaaattctcagccatttcttagattcgtcagcgtgacaataatgtcttttctagtatgtaactggatttccgtggggtgttagtgaagtgaataaagacccatctgctcatttctctct

SEQ ID NO: 20646 - DNA, 1031 bp, Glycine max
  Clone ID: LIB3242-679-C10_FLI
caataataataactccattttccctctgtcttccccccctcctctacacaaaaatatattattagcatggagaaggtgaattttgtgaagaatggagagcttagattgcctccggggttccgtttccacccgactgatgaggagctggttctgcaatacttgaagcgcaaggtcttctcctgccctttgccagcctctatcattcctgagcttcatgtttgcaagtctgatccttgggatttgccaggttcctttctattttccattcacacccatcatcccctttctctttctctaatttcaattccatgcccccatttttaggtgatttggagcaagagagatacttctttagcaccaaagtggccaaatatcccaacggaaatcgctccaacagagccacaaattcgggttattggaaggcaactggcttggacaaacaaattgttacttcaaaaggcaacaaccaagttgtcggaatgaagaagacacttgttttctacagaggcaagcctcctaatggatccagaactgattggatcatgcacgagtatcgcctcatccttaacgcctctcagtctcagagccatgttgttcccatggaaaattgggttctgtgtcgcatatttttgaagaggagaattggtgctaaaaatggggaggagagcaactctaaggtggttttctatgacttcctagcgcagaacaagaccgattcctcctcatcggtcgccagtggaattacacatgaatcagatgaacatgaagagagcagtagctccaacaccttcccttatactattagaagaaaaccttaacaaccttccttaaaaatttaagttcattatctagttgttgtttttaattgtctttccctttccctgtaattatcatcaatcacttgttgaaaggaagcatcctcttcccaaatgagaccggcattaagggtagtctggagagtatggtactaatactagtagtagtgtgtaatacacttctcatttcccttcaatttaacccctttttttcta

SEQ ID NO: 20647 - DNA, 672 bp, Glycine max
  Clone ID: LIB3242-679-C12_FLI
gtgttacccctccaaatgcaaggagttgaggagtttccaccaagcaatttctcaggttatacttctggaaacgtctcacaatggcccattgaagaatttctcggattaaatgaactcagtcagtattataattacatggatggatcatctaaggctgacagtggtaaacttggggattctgattcttctgttttgaggtctggtgaagaggatatggatgatgacggcttcttgggacgtgttccagattcatcctggacagttcctcagatcccttcccctcctacagcttcgggtttatattggccgaaagtccctcaatatacatctgacagtgccatgtctgttcctgacatatgcttttctcatgtgcgacagccccaccatgcccagcataattctaatgtttccaaaaggcgtaggcaactataatttgttctctgatcactagctcaatatgttaaaaagattgttttttatctgttagagatggagcgaacttttgaagttctacccttctttagatcatttgaagttcagtttgctacatgtttcttctattcacggcagtcttcatttctttttgggagcaaatcccttaactctccatttgttattgggaatttgacaaagaaaatagctggaacaacaatgtaataggcttctcatttc

SEQ ID NO: 20648 - DNA, 851 bp, Glycine max
  Clone ID: LIB3242-679-C9_FLI
ggtgagaatcggaggggccgttttttgaaggtgtctgaagcttctgtcagcagaaaccgtagcactataattgttcctgctggaagctccagggatgaaggatgggcagcattcaggaacgttttggcagagatcaatgaagcctcaaggcttttcattctgcccaatcagcaaaattctgaatcctcagagcgtcttgttggactttcggatgatgttggtgctggcttcatatctggtcatagtactcaacctgccacttcttctgagttgaatgtggacaggtctgttgatttgccgcctcaggatgaaattgggaacttgggggtctcaaaagtaatcagggctgatcagaaaagattcttctttgatcttgggagcaataataggggtcatttcttaagaatatctgaggttgcgggttctgatagatcctccatcattcttcccctgtcagggcttaagcagtttcatgagattgttggtcactttgtggaaatcacaaaggaccgaattgagggaatgacagttgctaatgttcgcacagttgatccccctcaaagatgaatgctaacttggggtattcatggttaataattaatcccccttccaaggtttcaatgggataagaatgggtgttgtctttgagtctgatttgtgtattttattttccctcagcctccttctccttctcatattgttcttccattaatgcttttgaaataatgcaaactgtggttggtccgcagaataatttgaattgcttggcaaggttaatatgaataggaataatgtatttgtttggatagtttggcacccaagctacaatctgtaataatgtttgattgttt

SEQ ID NO: 20649 - DNA, 1494 bp, Glycine max
  Clone ID: LIB3242-680-B11_FLI
aataattattcgcaaaaaaaaaaaaaacacgttgaacagataccatcatcattcatcttcatccccacatcatcagaatttcaagactcagtttttgactcactaagtaagtagccaaacaatttctcgggttcctgttcaagttgattcctttgataagttaccaacttcactcgataaaaacccattaacaaaccaaacagagtgacaaagtttgcaattacaaaaggttcaattatcaaatctggtcagtggtgatacggaacaccaggaagagtctgccatggctgacgccagtcctagaactgatatttctacagatgttgacacggatgataagaatccacggtttgatagaagtcagtcccttgttgctgtggcttctgactccagtgacagatcaaaggataaatcagatcagaagagtctccggaggcttgctcagaatcgcgaggctgcaagaaaaagtcggttgagaaagaaagcttatgttcaacagctcgaaagtagtcgcttaaagttgacccaactggagcaagagcttcagagagctaggcagcagggaatctttatatcaaactcaggtgatcaagcacattcaatgagtggaaatggggctatggcatttgatgtagaatatgcaaggtggctggaagagcagaatcgacaaattaatgagctaagagcaggtgtaaattctcatgcaggtgatacagaacttcgcatgattatcgatggtataatggcacattatgatgagatatttaggctgaaggccaatgcagctaaggctgatgtcttccatttgctgtctggaatgtggaagacaccagcagagaggtgttttctatggcttggtggttttcggtcatctgaactcctcaagctcctggtaaatcagttggaacctctgacggagcaacagttagtgggtatcaccaacttgcagcaatcttcccaacaagcagaagatgctttgtctcagggcatggaagcattgcaacagtccctttctgagacattatccactggatcacttggctcctctggttcatcaggcaatgtggcaaattacatgggtcaaatggctatggccatgggtaaactagggacacttgagggattcattaagcaggctgacaacttgcgccagcagacgttgcatcaaattcaccgcatattgacaactcggcagtcggctcgtgcactacttgcaatacatgactacttttctaggttgcgtgcccttagctctctttggcttgcccgcccaagagactgatgggggtaaatagtgtgtcattaattttcatggatctggcaccagaatcctttggcataggttttttactcttgcaattttactgtgttgtagttttcacattactgatattagtttcagtaagttattatctagaaactgaattggtgacatgacaagggtatgtattttgtttattactactaacgtaataatattgtctattgtaacac

SEQ ID NO: 20650 - DNA, 875 bp, Glycine max
  Clone ID: LIB3242-681-F1_FLI
gcctcacgtcaacgctgttgggtctgggcctggacacgggcccgggccaggacccgggccaggcggacttctccttgtccccaagtctgaagaagtcggtcggcccatggactttgtcggctcacgaattggactcaatctcggaggacgaacttacttctcgtcctctgaggatgacttcgtgagccggctctaccgtcggtctaggcccgtggaaccgggttcgactatctcgtcgaactcgccgcgatgccaggccgagggttgcaatgctgatctgtcgcaagccaagcactatcaccgccgccacaaggtgtgcgagtttcactccaaagccgccaccgtcatcgccgccggcttgactcagcgattctgccagcaatgcagcaggttccatcttctttctgagtttgataacggaaaacgtagctgcaggaagagattggcagatcataatcgccgcagaagaaaaactcaacaaccaactcaagaaattcagaaatctcagccttctttggataatgttgcaagatctccaccggactccggagctcagtcttcatcgtcggtgacggtggcagtgtcgccaccggattatttccggcagaggccataccaaagcacaaacaacccttcatcgatttcaagctcactgtttttctcaagcgggtagagttcacgttggagaagtttaatttgcatggctaattaatatttgcaagaaattaacggaggagcgtcaacaataatatatagtgaactactacttccacttgtaactcccaatttaatttcaaactcttaatctcgcgttattaatttgtacgaattgtgatttaaagcatctatgttaatccctccccttaattttctat

SEQ ID NO: 20651 - DNA, 1731 bp, Glycine max
  Clone ID: LIB3242-682-C4_FLI
ctcttctctatctctttctcttcttccttcttacttaattctatcaccaacatagccacagacacaaacataggcactacttatttctcttcttaggccttattatcatcatataccacatcatcaaagcacttgccatcatagagtaccatgttagccaataacttatctccatcgtcagttcccacttctgagccttttccctgcactgaaaatggcactgccaccaataaaaggaagagaaggcccgcaggaacaccagatccggatgcagaagtggtgtccctctcgccgaaaacgttgctggaatcggatcgttatgtgtgtgagatctgcaaccaggggttccagagggaccagaaccttcagatgcataggaggaggcacaaggtgccatggaagctattgaagagggagacaccagtggtgaggaagagagtgtttgtgtgtcctgagccaacttgcttgcaccatgacccatgtcatgccttgggtgaccttgttgggataaagaagcatttcaggaggaagcacagcaatcacaagcaatgggtctgtgaaagatgctccaaaggctatgcagtgcagtctgattacaaagcacatctcaaaacgtgtggcacccggggccactcttgtgattgtggccgcgttttctcaagggttgagagtttcattgagcaccaagatgcttgcaacatggggaggctcaggcctcatgaatctcaacctcttcaaccatctgcatgcctttctagaacagcttcaagcccaagtccttcaagtgagaccaatttcagcacagctccatggccaacaaggatgataatacaaaagccatcagaaacacccacaatcttcatgaacaaccctattactgctatcaccactgctgaaacctcctccaagagcaacaacaaactactccaccccaacttggatcttcaactctccacccccaccaataacaacaactccaacacctccaacaccaacacatcaaatattgcaaaccccattgataatgctgcaatatcagctaagagggatcattatcatgagaaccattcaacccatttgcaactctcaattgggtcatcagatatgagtgagaagaatgatcaatcaaacaggaactcatcagagaagagcagcaataacagcaacaacattaatgatcagaataataagcagcagtccaacaacatggccttgttgagggttcaagagcaagcaagggagcacttgaggatagccatggcagagaaagcatatgctgaggaagcaaggaagcaagcaaagaggcagattgagcttgcggagcaagagttcacaaacgccaagaggataagacaacaagcacaagtggaactagacaaggcctacgctttgaaagaacatgcaatgaagcaaatcaactccaccatgctccaaatcacttgccacttttgcaaacaacagttccaagctcgaaatgcaaccaccaccagccccgacgataattctttggtgctgagctacgtttcttctgctattaccacggaaggaggagaagttgaaaacgataatattgcaaaagatcatgccaaagacaacaactaactctactacttagagagagatattaatcatcttcatcatcatctttctctctaaagttgtttattctgtattttatttttctatgtcctcctcctttatgggttaatacttaataccctttttttttcc

SEQ ID NO: 20652 - DNA, 1015 bp, Glycine max
  Clone ID: LIB3242-683-E1_FLI
ctcaattctcaacaatggccactacaacacaacttcacttaccccctggattcagattccatccaacagatgaagaactcgtcatccactacctttgtcgcaaatgcgcttcgcaacatatcgcggttcccataatcgccgaaattgatctgtacaagtacgacccttgggaccttccaggaatggctttgtacggagagaaagagtggtattttttcacgccgagggaccgcaagtacccgaacggttcgcggccgaaccggtccgcgggaaccgggtactggaaggcaaccggagcggataaaccagttggtaaaccgaaaccggttgggatcaagaaagcgttggttttttacgctggaaaagcgcccaagggagagaaaactaactggatcatgcacgagtatcgtcttgcagacgtggatcgttccgttcgcaaaaagaacagcttaaggctggatgactgggtgctgtgccgaatttacaacaagaaaggtgcaattgaaaagcaacaactaccaccaccgagtggggtccgcaaaattgaatgttccgaaatggaggacgagaagccggagattctgccgccagatccgccgtatacggcggcgacggtggcggattgcctgtacttcgaggcttccgactcggtgccccggctgcacacgacggactcgagctgctccgagcaggtggtgtcggcggagtttgcgagcgaggtgcagagcgagccgaagaggggcagcaacaacaacaacgagtttgcatataattacgtggatgccactctcgggaataatcagatgtcgccgctgcaggatattttcatgtacctctccaagtccttctgcaattaacacgcaccaccaccacgacgagacgacgtcgttctgtgttgtgtgtatgcattatgcatttttgcagtagctgctccactgcaccatttgcacggaagcacgagactgagtgaagatccgtgagtgtgtccgtgctggttcgtgtagacgattattac

SEQ ID NO: 20653 - DNA, 1545 bp, Glycine max
  Clone ID: LIB3242-683-E4_FLI
ctgcaatggatttctagcattcaacccttccttttctccttgcctctgtcctgacccgttcttttcttctccatgcattcccagaaagttgtagagatggaagacaagacagaaagtcatatgagttcagctgcggcctttgttgaaggggggattcaagaatcctgtgatgatgcttgcagcatatgccttgaggagtttggtgcaagtgatccttcgacggtcactacctgcaagcatgagtttcatctgcagtgcattctcgaatggtgtcagagaagctcccagtgtcctatgtgttggcaacctattagcttgaaggatcctactagtcaggaattgtttgaggtagtagagcaggagagaagcttgagggctaccccatcaagaaatgctgctatttttcatcaccctgcctttggagattttgagttgcagcatttacgcatgagtctaaatgatgctgattttgaagagagaattattcaacatttagctgctgctgcagcaatgaggagagctaaccaacttggttggagggaagggcagcgagctcgttcatcagctcatggtcatccacaattcttagtgttctctaatcagcctattgcaccttcatcagttgctggaggagaaaatgacccaactgcaattcctaatagaagtccatctaccccaataacatccgttggaaatgaagcatcgcagcagatcctgcaccttcaaactcaaagttcttcttcagcttctggatctcctgtcatggctacaaatcctcgaggaatttactctaatgaaagaggctctactgcttgttcttcaccagcaaaccaagatagagcagagccatcagagttgcagtcattttctgattctctgcgatccagacttaatgcagtgtccatgagatacaaagagtcaatctcaaaaggcacaaggggatggaaggagaggctgttctctcgtagttcttccatgtcaaaacttggttcagaaacaaggaggagagagataaattctggaattgctagtgtatcccgattgatggaatcccttgaaactagtgaaaataatagagttgtgggtacttctttgtcaaatcatacggagggttgttccataggaggggtgagcaaccagaacaatgttgaagctagaggggagaactcttcacatgatgacaatactccagctgcttgttctgctaactcacatttaaattgagctcttttttggtttccgttaatgcatctctcctcagcatctcatatttggaggtaactttctcacgacatgacatggtgaggagcagatgctttggaaatagtcgtgtggcatttacgtcgtggtttgcaataaagattaagatctgaaaaacagctgtgcttatagctaaaaagttaatgtttctatgtatataaattatgcctggaacagtgaagagttgtgcgtgtctgggtgaacggatttttaaactggcatgtactctggacatcaatctatccatgggagaaaaatgctatgaaattcaacagaacttatgcc

SEQ ID NO: 20654 - DNA, 772 bp, Glycine max
  Clone ID: LIB3242-683-F2_FLI
attccagtctccactggactctacatgaaccctcccactcctggtagcccctctggatcagatgtgagtgagtccagcgtactggttgcatcctcctcacatgttttccgacccgtgcctagaacaggcgcggttctaccacccgtagaaacaacaacgactttgtcttccaatgaccctccaacctcactttccctatccctccccggtgttgactcatccgaagtttccaatcgaacaactgagccgattcatgccgcacctcctccgccgccacagccacagccacagccacagccgttgaatactatccctttgctcccaatgatgacggtgccctcggtttctccgacggggatggcgccgtttaattttagcgcagagtttctggcggtgatgcaggaaatgataaggaaggaggtgaggagttatatggagttgcacaatcagaagaatgggatgtgttttcaggctgcggtgaatgatgggtttaggaacgcttcggtgaagcgtattggaattagcagggttgattcgtaaatattatcatcgaagaatggaacaacacaagtagagatgaggaaaaaaactaagaacctgtttttttccctgtttttttttaatcaatgttcttaggcaataattttggttgatgtacagcgagacagaactctcgatccctaaagaggctgaatggaaattggaacgaaagagggagatagatgttacccattagataaaatctgaaatctctgttgtaactttttgtatc

SEQ ID NO: 20655 - DNA, 1840 bp, Glycine max
  Clone ID: LIB3242-684-A4_FLI
gttaacactaaggacactgacaaggttctgaacgggatgccaagctacgctcctccattgccttcttcttccaattccatggccatggaagcaactaatgctcatccttcccgtatttctgaatttggaaccctggagcaatctcttggatttcgtgttgaagataccattaatcttagcagaaatccgatgtttaatcaaatgaaatcaaatagccaagctctaggtgctgatattcaatttggtgctttaaataagtcaattgcaacatcggatataaacctctctgctgctattgctgcatctcaggcactggtattccaaaaagattcgcaaccaactctggcttcgacatctgctggtcgtgagaactggggagagaccaacatggctgatgctagccctaggactgatacttcaacagatgatacagaagacaaaaatcaaaggcctgaaagggatgaatccagtggatcaaaagataaatcagatcaaaagacattaagacggcttgctcaaaatcgtgaggctgccaggaaaagccgactgaggaaaaaggcatatgtgcaacaattagagagcagtaggttgaaactgacccaacttgagcaggagctccagcgatctcgccagcagggaatatttatttcaagtactggagatcaggcacagtcaatgagtggaaatggcgctatggcatttgatgtagagtacgcacgatggttagaagagcataatagacaaaccaatgagctaagggctgcaataaattctcatgctggagatattgaacttcgaaccattgttgacaatttcatgacgcagtttgatgatatcttcagactgaaaggtattgcagcaaaagctgatgttttccacattctgtcaggaatgtggaagactccagctgagaggtgtttcatgtggattggaggctttcggtcatccgaactcctcaagcttcttctaagtcagttggagcctttagccgagcaacaattgatgggcatctacaacttgcagcaatcatcccagcagactgaagatgctctttcccaagggatggatgcattgcagcaatcactatctgagacattggctaatggttcgcccagctcatcaggctcctcgggaaatgtggcaaattacatggggcaaatggctatggccatgggaaagcttggtacacttgaggggtttcttcaccaggctgacaatctgcggcagcagacattacaacaaatgcttcgaatattaacgaccaggcaatcggctcgtgctcttcttgccatcagtgattatttctcacggctgagagcgctgagttctttgtggcttgccaggccaagggagtgaagcatttcacagccccattagtggacttctttcatgcctgactcccttaaacaccgatgatcattgaatcttgtgctctgaatgagttcaatggaagctggtgtcttttgacaatgaattcctcttgaagcctagttgtgatgctataaacattaaatgctatgatttttctactctgccaactgctggtgtggtgcaacatttttctttaagcttttgtggttttaaaatagtctcaataatttgattatataggtgtatgatagatagaagctgttgaagggaaaaatgtagaaatagtgtatctgtatttttaggttatagctgttcattgtatttcagaaatcagcttttatttgagggggtatttacctctctttagtttcatttcctgcttaatggtttgtggttggttgcacataaggctccatggtgtatgtatttatacgttctcttttggtatattagaaagacattactaact

SEQ ID NO: 20656 - DNA, 1075 bp, Glycine max
  Clone ID: LIB3242-684-D12_FLI
gtggtaacaaaaggcaacctacttcgccgaagcgctcgcgaggcgaatctacagagtcttccctcagcagcactccctctcggattctctacagattcacttctacgaaacttgtccttaccttaagttcgcgcacttcaccgcaaaccaggcgattctcgaagcgtttcaagggaaaaatcgcgttcacgtgattgatttcggaatcaaccaggggatgcagtggccggcactgatgcaagcccttgcgcttcgcaacgacggccctccggttttccggctaaccggaatcggaccgccggcggcggacaactccgaccacctccaggaggtagggtggaagctcgcgcagctggcggagaggatccacgtgcagttcgagtaccgcggcttcgtcgcaaacagcctcgccgatctcgacgcctccatgctggatctccgagaagacgagtccgtggcggtgaactccgtcttcgagtttcacaagctcctcgcccgccccggcgcggtggagaaagtcctctccgtcgttcggcagattcggcctgagatcctcaccgtcgtcgagcaagaagcgaaccacaacggactgagttttgtcgaccggttcaccgagtcactgcactattattcaactctattcgactcgctggagggttcgcctgtgaacccgaacgacaaggccatgtcggaggtttacttagggaagcaaatctgcaacgtggtggcgtgcgagggaatggaccgcgtggaaaggcacgagacgctgaaccagtggcggaaccggttcggttcgaccgggttttctccggttcacttgggttcgaacgcgtacaagcaggccagcatgttgctatcgcttttcgggggtggggatgggtatagagtggaagagaacaatgggtgtctcatgttgggatggcacactaggcccttgattgccacctccgtgtggcaactcgctacaaaatcggtggttgctgctcactgagtcgactcgccgattcctcagccagctttttctttttattttttgttttaaattaatttctaatcatgcccaccgaaaaaaagg

SEQ ID NO: 20657 - DNA, 871 bp, Glycine max
  Clone ID: LIB3242-689-D6_FLI
cggttgcagagatgagtggatgaattaattgatgaatgaaattcaaatactaattgttgctatcacaattcacaagagattggattttggaatggaaagggtgttgtcagtagatgagatatcggagcaatactgggtggctgcatcatcttcttcatcatcatcatcatcatcgttcaagtcaaagatgaaccggagcgaatccgaatgggcctttcagcagttcctacagcaggaagctgcttcttcttcatctaattctgatcatgatgatgatcatcatcatgctaaactcaaaaaggaatccaacaccaacatccctgttactctacatgttgattcccaagactaccatgctattcttaagaccaagcttaatctcgcatgcgctgctgttgctatgactcgggtatgttcatttttcggaacaaccccatgttttttttttttttagttagctcttggaattgtttcattttatatttgaaacaatttttatttatttattttttctaaaagaaagccaacaagtctctgagtctcacacatcataaatcacacagatattacctatttatgattttttctccttcccttaaactcagttgcaaaatgaaagtttgttctttcgaccaataggtagaagagaagcagaataatgcttccgcgtagaaggtctacagtggctctcaaggaaaattccacatacactctggaaaatataggatggtgatattagaaattaaagggcacgtttggatggatgactttgaagggggaaatgggactacaatctttttttcccatgtaaatgtatcatccccgctccccaagattgtttgttaaaatgagaggcataaaattaaagatt

SEQ ID NO: 20658 - DNA, 566 bp, Glycine max
  Clone ID: LIB3242-691-F1_FLI
ggagtgggtgaggagaatcgagatgatgcagctgcggccgaagattttggcggcggtggagagtgcgtggcggcgggttccgccgtggagggaggcgttttacggcgccggaatgaggccggtgcagttaagccagtttgcggattttcaagcagagtgcctgttagcgaagtctcaaatcagaggatttcacgtggcaaaacgccagaacgaactggtgcttttctggcatgatagggccattgttgccacgtcagcatggcgctgttagaacatggagtgttattattggcagaggggattatgtaataatgtagtaattataataaactgcaacgaaagtaaatttaggttccaatttcgaagtccactacactcgttcaaactattgctatgatggaaaaaatctaggtatctttggcaaaaggaaaaggtggggagggggtggtagataagataaacttgtatttttctgtaccattttgttgtccttctttgttggatggactctttgttatcctgatgaactttactactggttttctaatcaaagggtttggcagatt

SEQ ID NO: 20659 - DNA, 1580 bp, Glycine max
  Clone ID: LIB3242-692-B12_FLI
cttgaccatgatgatactgaaaagcagatgctgagaaagttaagtaaacaacttagtggtgaggaccagatatagatcctattgcccagcacagtgtgttcaaattgttccaaaacatttccctgctacttcatcttcttcttcttcttcttcatcaccggtggttctgttcattcttccttgcaccttcttctttgaagatcgaaattgtgtttttgaaaaaatgggagttccagagaaagaccctctttcccaattgagtttgcctcctggttttcggttttaccccaccgacgaggagctcctcgttcagtatctatgccgcaaggtcgctggccaccatttctctcttccaatcattgctgaaattgatttgtacaagttcgacccatgggttcttccaagtaaggcgattttcggtgagaaagagtggtactttttcagccctagagacaggaaataccctaacgggtcccgacccaacagagtagccgggtcgggttattggaaagccaccggaaccgacaagatcatcaccaccgaaggtagaaaagttggcataaaaaaagccctcgttttctacattggcaaagcccccaaaggcaccaaaaccaattggatcatgcacgagtatcgcctcctcgactcttcccgaaaaaacaccggcaccaagcttgatgactgggttctgtgtcgtatctacaagaagaactcgagtgcacagaaggcggtgcaaaacggcgtcgttccgagcaacgagcacactcaatacagcaacggttcctcttcctcttcttcgtcacaactcgacgacgttctggaatcgctgccagcgattgatgaacggtgtttcccgatgccacgtgtcaacacgctgcagcaacagcagcacgaggagaaggtcaatgttcagaacttgggtgaaggggggttactggattggaccaacccttcggttctgaattcggtcgttgatttcgtatcggggaataataatcataatcaattggtgcaggaccagacgcaaggcatggtgaactacaacgcgtgcaatgacctctatgtccctacgttatgccatgtgggcacgtcagttccgcaaaagatggaggaagaggtgcaaagcggcgtgagaaaccaacgggtccagaacaattcctggtttcttcagaatgatttcacacaggggtttcagaattcggttgacacgtctgggtttaagtacccggttcaaccggtggggttcgggttcaggaattgaaccctgttatcgattaataatagtagtaatcttttaaatcggtaaataggtgggggattctttgggcttaactcgtgggggttttagattaatcctttagaaaagggaagaagaagaagaagaagaaggtgaaaattttggtcctcattttcagctaaagatgtagggtatacaaacgttcaatgaaccaatccacgagataaagcaatgacgggaccattttaatttgttacgacgtagttttcggcccacacaagcccttactcagccacatgaatcacatttgtacttcaaatgaacagcaagaattttttttact

SEQ ID NO: 20660 - DNA, 571 bp, Glycine max
  Clone ID: LIB3242-694-A3_FLI
cgcgccggtggacattccggcaatgcacgtcgtgatgaacggcggcgactctgcttacgtggcgcttcttccgtcggggttcgccatcgtgcccgacgggtccgtcgaggagaacggtggcgcgtcgcagcagagggcggcgagtggcgggtgcctcctgacggtggcgtttcagattctggtgaacagcctccccacggcgaagctcacggtggagtcggtggagacggtgaacaacctcatctcctgcaccgtgcagaagatcaaatcagcgcttcactgcgaaagctgaaagtcacgtgactctggctttgtctattattattattattatttttgttttggagaatttaggttacattttgtagttaaaggtggcgcgtgtgaaggacgcgaggggtgggggtgttgagtcaagaacgaaccgcgcgtgggtgagagaactccttgcatggtgatatgaggatccgagaccttttccgggttgggttaggattttcaacacaaagcaagggtggtggttcgggtattgactcgggtcgacccctttgtttgctccatacagtagcag

SEQ ID NO: 20661 - DNA, 435 bp, Glycine max
  Clone ID: LIB3242-694-G10_FLI
gattttcttcgttgagcagaaagctaaaggctaaagcctagaaccttcttcctttacacctcgctggaaccagcgatggatcctcagcctgagccagtcagctacatatgcggagattgtggaatggagaatacgctgaagcccggtgacgttatacagtgccgtgagtgcggttaccgtattctttacaagaagcgcactcgtcgcattgtccagtacgaggcacgctgaagaaaactgctataacgtttgcaagtaatttccatgaagaaattgttactacatctgtgttgtgtgatattgaagaactacttttaattctacagtagattgctttttgggtgatgtttagcaaaagataaaaactttgaatgtgaatatattacaaacatccgtgtttcattagtttgcaattttatccctactatggttaag

SEQ ID NO: 20662 - DNA, 2601 bp, Glycine max
  Clone ID: LIB3242-694-G9_FLI
ggaaggaagagagattcaggagggagccagagtgagggatacagagaaagaagaaggataaagatttaaaattggaagaggaacaataggaagggaagggagaaaaccctaattaatagataatagaaagagattgcatgatcgatggaaaaaccctagaagaatcatcggagcaggcaggcaagggggcacaatcgacgacgccgtagatgcttgttgcggttggagcgtcgtgggatctgaattggttcctgcaactgttgctctccgtcatcgtcgtggccgttggggttcactatttcgtcaaggccaccgcttccaagtacttcttagtcgacgccaatttcgaaggggaccaccacgccctcgccgccgccgacccaatgcccggcgctctcgccgccgccgttgatcctctctgcgccgtctgtgccacgcccgcccctaagaaatgctcgcgctgcaaagctgtcagatattgttcacaagcatgtcagcagtcgcattggatgtctgggcataagacagtgtgcaagaattttcatgggaccaatgcaagaagctcggctcagaatggggtaattaatcgtgggtttaagacttctgctgctgggggtaaaggctcgtcgtcaattgcactgatacctgactgtggagatggagcaatttccaggccaatcaagcaggctaaagatgttctttttccttacgatgaatttgtcaagtttttcaactgggacaagccaggatttcctccttgtggactattgaattgtggaaacagttgctttgcaaatgtggttcttcagtgcctctcattcacaaagccacttgttgcctacttgttggagaagggccaccgcagagaatgcagttgtaatgattggtgctttctatgtgaatttgaaaatcatgttgaaagaacaaggctaagttcacaggcgttttctcctatgaatattctctctcgtttgcctaatattggtggtacactgggctatggaaaacaagaggatgctcacgagttcatgaggttttccattgatacgatgcaatctgtttgccttgatgaatttggtggagaaaaagctgtccctcctaaccttcaggagaccacccttattcaacacatttttggtggtcgtcttcaatctgaggtgatttgcacaaaatgtgataagatttcaaatcagtatgaaaatatgatggacttgacagttgaaattcatggagatgctgcctccttggaggaatgtctagaccagtttactgccaaggagcggcttgatggggaaaatatgtataaatgtgaggggtgcaaggattatgtcaaagcatggaaacgccttacggtgaaatgcgctccaaatattcttacaattgccttgaaaagatttcagagtgggaggtttggaaaacttaacaagagaatagccttccctgaaactttaaatcttagcccttatatgagtgaagctggagatggatctgatatttataagctatatggtgttgtagtacatattgatatgctaaatgcttcattttttggtcattacatctgttacatcaaggatttccagggaaactggtataggattgatgactggaaggttatgactgtggaggtggaagaggtactttctcagggagcatacatgctcttgtatagcaggtgtagtgcccggacatcaagctttcaaattcaaactagcgaatcttcagggatagcagaagttcagacagaagtggaagtggaaatggaagtggagcccggacaaactgaacaagatgaatgcctctcaaatatgaaggctttgacttgtagtagaggttctgaggttttgccatctgatgctagtccagaattgaaggtttcttccagctatgactgcgagtcttctgctggattgaactcacaagccaaaagagaacagtttgaggatgtgaacatgatggatgttgattcaactggtattgcaaatgagctttcttgtggtgctgttgaatcatcttatgtgcctatttctcaaacagacagtgatttgggggatgtggatatgggcagatcattagaagagacttcaggctgcaagcaagagcaagatgatactgatatggttaggtctggttcttgttcgggtctaccaaatggctcttccttctttgataagcacccttccgtttcacgggatcatcaaaacatggaagaacattcagaacatatagatgtggttaactgcaagttgattacagctaaagataatgcatactatggtaatggatatgtcagtgcaaacgattcttcaatgccagttgaagacgcaggcacacaattttctggcatcagttcttttcccactgaaaatgacaaaggaaatggaattaagaaagtggaaatatcagctgacatttaggtgcagctatttttgttatttcttcatatcatttaattatcccatcatcgaaataggtggtgagttgggaaatttttgtccggggttttcattatttgcaggaaccttggattttatttgtaacatttctagatggatatcctaatttaattttactgatagaatacaagtcctttgcccttag

SEQ ID NO: 20663 - DNA, 1892 bp, Glycine max
  Clone ID: LIB3242-696-H2_FLI
gcggccgcggccggattcgataggtcggtggagaggtcgatgtttcttgagcttgccttggctgctatggatgagttggtgaagatagcgcagactggggagcctctttggatgaggaatgttgaaggagggagggaaattttgaacaatgaggagtacgtgaggaccttcactccttgcattggtttaagacccaatgggtttgtgtctgaggcctctagggaaaatggaatggtcatcattaacagcttggcacttgttgagactcttatggactcgaatcgatgggcagagatgtttccttgtatcattgcaagaacctccaccacggaagtgatatctagtggaataaacggaacaagaaatggggcacttcaattaatgcatgctgaacttcaagttctttcccctttggtgccggttcgtgaggtgaatttcctgcggttttgcaagcaacacgcagaaggggtgtgggctgtggtggatgtgtccatagatagcatccgagaaagttcgggagcacccacttttgtgaactgtaggaggcttccttctggttgcgtggtgcaagatatgcccaatggttactccaaggtgacatgggtggagcatgcagaatacgatgaaagtcaagttcaccagctctatagacctttgttgagctcaggcatggggtttggtgcccaacgttgggtcgctacccttcaacgccaatgcgagtgccttgccattctaatgtcctcagcagcaccctctcgagatcattccgcaataacagcagggggaaggcggagcatgatgaagctggcgcagcggatgacgaacaacttctgcgcgggggtgtgcgcgtcgacggtgcacaagtggaacaagctcaacgccggcaacgtcgacgaggacgtcagggtcatgactcgcaagagcgtcgacgatcccggggagccaccggggatcgtcctcagcgccgccacctccgtctggctacccgtctccccccaccgcctcttcgatttcctccgcgacgagcgcctccgcagcgagtgggacatcctctccaacggtggccccatgcaggagatggcccacatcgccaagggccaagaccacggcaacgcagtctctctccttagagccagtgcgataaattccaaccagagtagcatgctgatactgcaggagacatgcatagacgcggcggggtcgcttgtggtgtacgcgccggtggatatcccagcaatgcacgttgtaatgaacggtggcgattctgcttacgtggcgttgttaccttcagggttcgctatcgtccccgatgggcccgggtctcgtgggccaccgaacgggcccacttccacaacaaacggcggcgataacggcgtgacgcgcgtgagtgggtcccttctgacggtggcgtttcagatccttgtgaatagtctccctacggcgaagctcacggtagagtcggtggaaaccgtgaacaacctcatctcgtgcacggttcagaagatcaaagccgcgctccactgcgaaagttaaacgtcacgtgatcggtcacgtgagtctggttttttttttgttattttgtatttattgaggttcttgttgaaaattttaacgttgttgacgatggatggatgggtggcgcgtgtgaaagacgcgtgggttggttgagtcaagaacgaaccgcgcgtggggaaaaaaagagaaaactccttgcatgggttatgttccttaacacaaggcaagggtcgtggttcgggtattgactcgggtcgaccttttttgtttgctcgagtacaagaaagcaatagaggaatggaaaaaaaaaaacaagaaaaaaaaaaggttttgttagcttttattaattaaagtgttataacttgtattgattggag

SEQ ID NO: 20664 - DNA, 1165 bp, Glycine max
  Clone ID: LIB3242-698-A1_FLI
aatatttatttcaagtactggagatcaggcacagtcaatgagtggaaatggcgctatggcatttgatgtagagtacgcacgatggttagaagagcataatagacaaaccaatgagctaagggctgcaataaattctcatgctggagatattgaacttcgaaccattgttgacaatttcatgacacaatttgatgatatcctcaggctgaaaggtattgcagcaaaagctgatgttttccacattctgtcaggaatgtggaagactccagctgagaggtgtttcatgtggattggaggctttcgctcatccgaactactcaagcttcttgaaagtcagttggagcctttaaccgagcaacaattgatgggcatctacaacttgcagcagtcatcccagcaggctgaagatgctctttcccaagggatggatgcattgcagcaatcactgtctgagacattggctaatggttcacccagcacatcaggctcctcgggaaatgtggcaagttacatggggcaaatggctatggccatgggaaagcttggtactcttgatgggtttcttcgccaggctgacaatctgcggcagcagacattacaacaaatgcttcgaatattaacgaccaggcaatcagctcgagctcttctcgccatcagtgattatttctcacggctgcgagctctgagttctttgtggcttgctaggccaagggagtgaagcatttcacagctccattagtggacttctttcatacctgacccccttaaagactgattgttgaatcttgtgctctgaatgagttcaatggaagctggtgtcttttgacaatgaattcctctagaagcctagttgtggtgctataaacattagatgctacgatttttctactctgccaactgctgctgtggtgcaacacttttctttaagcttttgtggttttaaaatagtctcaataatttgattatataggtgtatgatagatagaagttgttgaaggggaaaaatgtagaaatagtatctgtattttaggttatagctgttcattgtatttcagaaatcagcttttatttgtggttggttgcatatatggctccatggtgtatttatgtatggatgtatatatacgttctctcttggtatattagaaagacattaccaactagc

SEQ ID NO: 20665 - DNA, 2126 bp, Glycine max
  Clone ID: LIB3242-698-A2_FLI
ggcagcacaagcagaaaaggagaaggtttgggattttagagcgtatgtggttttggttggtaactgaagagtgtgtggaggaagaagaaggaatcggcggtgttcaactgacgatcgcatctcaaagtttggtcacgatcgttgctttgcttgttcgacatttttttcccttttggtttttctgaggcattttcttagttgtatggttgtttgtgttgttttctcgctgctgaaattatatatgggctaagggggcacttttcatgggaggtgtggaagatgaagaaccatccatgaaacgaatgaaattatcctctaaaggattagttggcttgtctaacggttcttctaaagagcctgttggaggcttgtccagtgacttgatggctcggcccctaccatccaaaggggacgaacatgttggttccaaaggggttataaagaaagaagaatttgtcaggataattgcaaaggcattatactctcttggttacggaaagagtggggcacatctagaggaggagtctggaatacctttgcactctcctggggtaaatctgtttatgcagcaaatacttgatggaaattgggatgacagcgtagccacattgtataaaattggtctggcagatgaaagtatggtcaggtcagcctcattcttaatattggagcagaaattttttgagcttctaaatggtgaaaaggtcatggaagcgttgaagaccttgaggacagagattgctccactttgcattaatagtagtagaattcgagaactttcttcctgcttagtttcagcatcttctaggctagacattctaagggtgaggtctcgatcaaagcttctggaggaattgcagaaactgcttccccctacagtaatgatacctgaaaagaggttggagcatctagttgaacaagccctaatcttgcaacgagaggcatgcccatttcataattcattggataaggagatgtcattatattcagatcatcattgtggaaaagatcagataccttccagtacattacagatattagaagcacatgatgacgaagtctggtttgtacaattttcgcataatgggaaatatttagcttcagcatcaaaagatcaaactgcaataatttgggaggttggcataaatggaagactgtctgtaaagcatagattatctggtcaccagaagcctgtttcttctgtttcatggagtcctaatgaccaggagctcctcacatgtggagtggaggaggctattaggcgttgggatgtctctactggcaaatgcctccaaatttatgaaaaagccggtgctggtctagtctcctgttcatggtttccatgtgggaaatatatactttgtggcttaagtgacaagagcatttgcatgtgggaattagatgggaaagaagtggagtcttggaaaggacaaaaaacccttaagatatctgatttggaaataacagatgacggggaagagattctaagtatttgtaaagccaatgtggtactgttattcaatagagaaacaaaggatgagagatttattgaagagtatgaaacaataacctcgttttctttatcaaatgataacaaattcttgttggttaatcttttgaaccaagaaattcatctatggaacattgaaggtgatcctaagcttgttggcaagtacaaaggtcataaacgcgcccggtttattatcaggtcttgctttggtggcctgaagcaagcttttattgctagtggaagtgaggattcacaggtttacatatggcacagaagctcaggggagctaatagaagcattggctggtcattcaggatctgttaattgtgtgagctggaatccagcaaacccccacatgttagcctcagccagtgatgaccgaacaattagggtatggggcctaaattgtctgcacaacaagtaccaaaatgttcacagcaatggcatccattactgcaatgggggaacttagtatgacaaactcattccaattgatttctcttttttatcattgcaattgtgtaaataccgttactattatctcaagtggaccattcatgccaaacatgcatgtgacttttcatatatatatctcataataaatccgtgttccacg

SEQ ID NO: 20666 - DNA, 794 bp, Glycine max
  Clone ID: LIB3242-699-H3_FLI
gaggaaaaaaatttagatccgcccagtgacattcccgttttcggctctctccgaaatttcttagattgcttctgtgtcagagaaatcagtgcaacaaaaatggacgacaccgaaaccaaaggaagaatcgaagagactgtgcgtaggattttgcaagaatcggacatggacgaggttactgagtctaagattcgaaaacaggcctccgaacaccttggcctcgacctgtctcagccttatttcaaagcctttgtcaaacaggtcgtgaaggcttttctccaagaagaagaacaacgacagaaacaacaacaacaagatgaagatgaagaagaagaactaggaggagcttccaagggcaaggagtacgatgatgaaggcgatctcatcatctgcaggctttcagataagagaagggtgacgattcaggatttcagagggaaaacattggtctccattcgggagtattataaaaaggatggcaaggaacttcctacttccaaaggaataagtttgacagaagagcagtggtcagcctttaagaaaaatgtgcctgccatagaaaaagccattaagaaaatggagtcaagttgacacatggctttgcttgtttctttttgttgaatatatcctgcaccgcaccatggtgtctctttgatattggaccattttgttaaaggacttggagtcactgtttaagtgttttgcaacctgagtgcctaaagccatttcaggaagactaaactgaatgccagtaactttaaaaactcaatacatttaattctgttatttccttg

SEQ ID NO: 20667 - DNA, 995 bp, Glycine max
  Clone ID: LIB3242-700-F11_FLI
gactcatcgttctctctgttctttctctctcaaaggaaagaaaaggaaagaaaagaaaagaaaaagaagagagtgtaggtaaacagaagcacacactacacagttaccaaaatcaggttcaaacgcacagatctgggagaagagaagaagaagaagaagaagatgggacaggatcagaaccagagatcgctgatctacgcgttcgtgtctcgcggcacggtgattctcgccgagtacactgaattcagtggcaacttcaacacaatcgcgttccagtgcctccagaagctccctgcctccaacaacaagttcacctacaactgtgacggccacaccttcaactacctcgtcgacaacggattcacttattgtgttgttgcggatgaatcgattgggagacaggtgcctgtggcttttctggagcgtgtgaaggatgactttgtggccaaatacggcggcggaaaggcagcaaccgtggctgcgaacagcctgaacaaggaattcgggtctaagttgaaggagcacatgcagtactgtgttgagcatcctgaagagataagcaagcttgctaaggtgaaagctcaggtttctgaagttaaagatgtcatgatggagaacattgaaaaggttctggaccggggggaaaagatagagcttctggttgacaaaactgaaaatcttcatcaccaggcacaagacttcaggaattctgggaccaaaattcgtagaaaaatgtggctgcaaaacatgaagataaagctgattgtgttggcgattttgatagccctgatcctcataatagtcctttctgtctgccgtgggttcaattgtggaaaataaggcatcgttttccgacgaggagtcattttaccttgtgattattatatgaggaaaagatatcgaatgaatgcatgattttgtatgtagtaaaagtatcagatcgcttatactgttcattttaaaggtttcacagtatgatataagaatgcttttgg

SEQ ID NO: 20668 - DNA, 1178 bp, Glycine max
  Clone ID: LIB3242-705-G10_FLI
ggatttaaccatgtatattgcactttgcagcatagagtttgactgcgatgatgatttgtttgctactgctggagtttcccggcgcatcaaagtttttgacttttctgctgttgtgaatgaacctacagatgctcactgtcctgttgtggagatgtctacacgttcaaaacttaattgcttgagttggaataaatatgctaagaatcaaatagctagtagtgattatgaaggaattgtgactgtttgggatgtaaccactcgaaagagtttaatggaatatgaagagcatgaaaagcgtgcatggagtgttgatttttcaagaacagatccctctatgcttgtatctggtagcgatgactgtaaggtcaaaatttggtgtacaaatcaggaagctagtgttctaaatatagacatgaaagcaaacatatgctgtgtcaaatataatcctggatctggcaattatattgcagttggatcagcagaccatcacatccattattatgatttgagaaatatcagccgtccagtccatgttttcagtgggcacaggaaggctgtttcatatgtgaaatttctgtctaatgatgaacttgcttctgcatcaacagatagtacactgcgattatgggatgtgaaggaaaacttgccagttcgtactttcaaaggccatgcaaatgagaaaaactttgttggccttacagtaagcagtgaatacattgcgtgtggcagtgaaacaaatgaagtctttgtgtaccacaaggaaatctcgagacctttgacttgccacagatttgggtcccctgatatggatgacgctgaagatgaggctggatcgtacttcattagtgctgtatgctggaagagtgatcgccccactattctaactgcaaatagtcaaggcaccatcaaagtgctggtgcttgcagcttgaacacgagaaaaaagaatagaatgtggaattggtattatcttttcccatgctattatgattgtatcatttattaattgtacatagttttcaagtgtatatggcaggctttagggatcttaatgagatattagttgagtgcttaaacctttatcaacaaacctatttaagggactgaactttaatttttaccaattgaggacctcaaatttattaaattttgtattaataaatgctcaggagacaaaat

SEQ ID NO: 20669 - DNA, 1478 bp, Glycine max
  Clone ID: LIB3242-709-A2_FLI
gactccaaaacacaaacaaaaactcccgttttctctctctgtttttccatggccatctgatcaaacttttcttgattctctctctcagtttttgctattctgagtgatgggtatgccctgccgctgttcccacacctcccacatcactgaaatcatcatcaccagcttcttccgccacaagtcttaaattacaacaatttccctcaattattcatcaaccaaccaccttaatagccttttccaatggttccttaaagatccaacttggtcggagtaaacatggcggctagtggaagttccttttccaacatcactagcttccttcgcaaccaacaaccctcttcccaacctctcgattcttctctcttcctctctgctccttcaatttttgtttcaggttcgagatccatggtgagttttgaagcagaaggagggaaggggtgtaacggctccttcttccgcgcgtttgacatggacgacaatggggacgagtgcatggatgagtactttcataaacccgagaagaagcgtcgtctctccatgaaccaggttcagtttctggagaagagtttcgaggaggagaacaagcttgaaccggagagaaagaccaagcttgccaaagaccttggtttgcggccacggcaagttgctatttggttccagaaccgtcgagctcgctggaagaccaagacgctggagaaggattacgaggctctgcatgcaagttttgagaatcttaagtccaactatgacagcctcctcaaggagaaagacaacttaaaagctgaggtggcgagcctcaatgagaaggtgcttgcaagagggaaacaagaggggcacatgaagcagcaggctgaaagtgaagaagaaacaaaaagattattgcatttgcaggaacaggaaccaccccagaggcttttactggaatcagtttcggagggagaaggatccaaagtctcttctgttgtcgggggttgtaaacaggaagatatcagttcagccaggagtgatattttggattcagatagtccacattacaccgatggagttaactccgcactgctagagcatggtgattcttcttatgtgtttgagcatgatcaatcggatatgtcacaagatgaagaagataacctcagcaaaagtctctacccttcgtacctctttcccaaacttgaagaagatgtggattactccgacccgcctgaaagttcttgtaattttggattttctgaggaagatcacgccctttggacctgggcatactaagttttcttccatgttcatgtgtgtgtttgtgtcatatgtttttttagtaattagtatttagtatttgcactttttgtccaggcttcaaaaatggctatagctttagctttatcaggaaagaaatgtttgttttctttttgcctcattttgttagtacttgtaatcaaactgttggttccaatgtaattaaataatgtcttctcgttgag

SEQ ID NO: 20670 - DNA, 804 bp, Glycine max
  Clone ID: LIB3242-712-F1_FLI
gaccgaaaaccaaatccgaagagtgaaggttcgttgaatcccatggcgagagtgaagcacacgccagcttctcgcaaatccgctaaaaagcaagcgccacgcgcatccacttccacgcagccgccaccacaatcccaatcgcctgcaactagagagaggaggagagctcaacaagtggagccgcagcaggagcctgaggctcagggaaggaagaagaggcgcaataggtcgggaactgtggcgcttcgtgagattcggcattttcagaggagttgtgagcttctcatcccggctgctccctttatcagatgtgtcaaacagattacaaatcaattctctacggaggtgtctcgttggacacctgaagctgtggtagcacttcaggaggcagctgaggaatatctggttcacttatttgaagatggaatgctctgtgcaattcatgcaaggcgtattactcttatgaaaaaggacattgagttggcccggaggcttggaggaataggaaggccttggtgagtggacgatactagtagaagaccattggttcttttgtttgtaaaagttcacacagtagggggatttcaatgaagggaggcattggtgcttctgtactccgcactctaattgcagtgattatttgatattaaatgttaggaactagacactaactaatgtatgccaatggttatatctctgtaggtgaaacaaccattatagaatggttgctactataactttaaattgatgagtgaggtaatagtgtaacattgtagcaatgaagtattctaagattattgtcat

SEQ ID NO: 20671 - DNA, 1359 bp, Glycine max
  Clone ID: LIB3242-726-G11_FLI
ggagataagatttgagtttgggcatgtgtgagctgtggctttgcagggaagaggagtgtcagtagaaaataaatgtcctcttcccagggacactctctatttcacagatctatatctaagtgtcggtgatcccctttctccttccttctctgagagacaatgacaatgacgtgggcgcgattcgattcgtggaagcagcaatactacaccacaagcggcgtggtggtaggttacgcagtatgctccagcctcctggccatcatcaacaaatacgccatcaccaaattcaactacccaggcctcttaaccgcgctccagtacctcacctccgcactcggcgtctacgtctttgggaaattagggtttctccaccacgaccccttcaccctccccaccgccaaaaaattcttccccgccgccctcgtcttctacctcgccatcttcaccaacaccaatcttctccgccatgccaacgtcgacaccttcatcgtcttccgatccctcacccctctcctcgtcgccctcgccgacaccgtcttccgcagccagccctgcccctccaacctcaccttcctctccctcctcgtcatcctcgccggcgccttcggctacgtcgccaccgactccgccttcaccctcaccgcctactcctgggccttcgcctacctcatcaccatcaccaccgagatggtctacatcaagcacatggtcatgagcctcggcctcaacacatggggcttcgtcttctacaacaacctcctctctcttatgatggctccctttttctccttcgtcaccggcgagaacgtcgagattatcgccgcggttagatccggcggccttttcgaccccgccgccttctacgccgtctccctgtcttgcctcttcggcttgctcattagtttcttcgggttcgcggccaggagggccgtttccgccaccgcgttcaccgtcaccggcgtggtgaacaagtttctcactgtggcgatcaatgtacttatttgggataagcatgctagccccattggtttggtttgcttgttttttaccattgttggtgggattctttaccagcagtctgtgactgggcttgggagtgctccggcccagcccaaacagttggatactgaaagcaacaaaggtggtggcgaagatgatgacgatggtgatttggcaggtgagagtgatggcttgattaaagctacttctatataagcatttgtactatttattttcacgtttaagctgtaatgcctgtataattattgtcttatttcagcaacattaggaaagaaattatatgcaatgtgaggtgtattgttttcagaaggatatctatggaattttaattttgcttct

SEQ ID NO: 20672 - DNA, 1431 bp, Glycine max
  Clone ID: LIB3242-759-D11_FLI
ctgtagttcactgcttgaaaaattgatgagacacaagcatggttgggtgtttaattctcctgttgatgttgagactcttggtttgcatgattattttactatcatcactcatccaatggacttgggaactgtgaagacaaggctgaacaagaattggtacaaatcaccaaaggagtttgcggaggatgtgagactcacttttcgtaatgccatgacatataatccacagggacaagatgttcatattatggcagagcttttatcaaagatattcgaggacagatgggctataatcgagtcagattacaatcgggagatgagatatggctttgattatagggcagctccccctgcaccctcacctttgtctagaagggtttctgcatttacaccaccacctcttgatatgagaaggattttggatagatcagattcaatgacacagactccaagactcatgagcatcactccatccagtagaactccagctccaaaaaagccaaaggcaaaagatcctcataaaagagacatgacatttgaggaaaaacaaaaactaagcactaaccttcaaagtttgccttcagagaagcttgatgctattgtacaaatcattaagaagagaaattcagcacttaatcaacatgacgatgaaattgaagtggacattgatagtgtggatgctgagactctctgggagcttgatagatttgttaccaactataagaaaagtttgagcaaaaacaaaaggaaggctgaacttgctcgagctagagcagaagctttgcagcagaatgccatccagaagagtcaggcaccagctatggcagagattccaaaagaaacacaaacagatgaaaggagtcttccccaacccttgcctgtgcaagggagaaatcaagcggataatgggagtaggtcaagcagttccagtagctccagcagtgattctggttcttcttcaagtgattctgatagtgacagttcctcagcatctggatctgatgcagggtcgcaagggacctgactatgctctgtcagatctcagatttttagagtagatagtgtcttgatgccagcctattttggttttttgaagcttccagattatggattttagtgtaacagtcgggttataaaggaagcgttctgaaggccgtgggtgatcctcctgatgcagcctgggattttttcttcccatttgtttgaactgctactccaatgctaatcgtggccttgttggaattcttgacacaaattcttgtataatatttggtaggatgtgatgatagttaggtagctagatttccgtagcatatgtacattgctaactactgctgcgcattgagttccatttataacttattttttacttttgtgctagcagattcaagatcttggtatcatacgaagataatatgtaattcattcgtg

SEQ ID NO: 20673 - DNA, 1141 bp, Zea mays
  Clone ID: LIB3245-008-B10_FLI
gcgcgccatggttgtggaggccaactcagggagcacgctggcggccgtcggcgtggccggcaccggcagcagcatggccgtgcacagccaccagctttcgaccgtggtgccgagctcggtgaccggggaggaggtgaactacgagctcgcggacgccgacttgctccacaaggtgcactacgtacgcgcggtgcacgtgttccgcgcgccgaccgccgtcgcagcgccgccgctcaccatccgggagctgaaagagcccatgttcccgtggctggacatgtacttccccgtcagcggccggctccggcggcgtcaagcggccgagggcgaagaggccgccgcggcggcggtggggcggccctacgtgcggtgcaacgactgcggcgtgcgcatcgttgaggtcgactgcgacgccaccgtggagcagtggctggaggcggaggcggagcgcggcgggctgtgcaaggcgctggcctacgacaaggtgatcgggccggagctcttcttctcgccgctgctctacgtgcaggtcactagcttcaagtgtggggggatggccctcggcttcacgtgggcgcacctcatcggcgacatcccctccgccgttgccagcttcagaaagtgggcgcaggtcctcggcggcaacaaggccccggcgccaaccctgcgagacccactcgcggtgccgccgtcggccccacctaccagcgtgacggtcccgccgtcggtcaaggccaccgcggcccccgtcggcgatcactgggtggtcccgaccacccatgacatggtgtccttctccttccacgtcaccgagcagcagctgcagggactccagctcagcgcgatcaagggttaccatcggcgcgaggttgtgggcccgtttgagctggtctccgcgctgatgtggcgggcgctggccgcgatccgaggccccgaggaggaggaggcgacgcgcacggtgaccgtcgtgaagactggagcggcgccgacgtcggggggcagcccccgcccggcgctgaccaacgagcaccgcatcggccacgtcgtcttcgcgaccggcggctcctcgccagcgacggccgacgtcgccaagctggcagcgctgctggccggcgcacacctggaggaggccagcgcggtc

SEQ ID NO: 20674 - DNA, 1096 bp, Zea mays
  Clone ID: LIB3245-008-D1_FLI
acaaaccacaaccagctcactcaagaacaaagaacccaacccatggcttctcccaagccgctcctcctgctcgccacctcgttcctgagctgcggcctcctggtggccgccgactacgccccaatgaccctgaccgtggtgaacaactgcccctacccggtgtggccgggcatccaggccaactccgggcacgacgtcctggagggcggcggcttcttcctcccgccgctctcccacaagtccttcccggcgccggcccacccctggtccggccgcatctgggcgcgcacgggctgcgcgggcgccggcgcgcagctccactgcgccacgggcgactgcggtgggcggctccagtgcggcgggctcggcggcgcggcgcccgcgacgctggcgcaggtgaacctccaccacggcaacgaccagacctcgtacggcgtgagcgtggtggacggcttcaacgtgggcctgtccgtgaccccgcacgagggccgcggcaactgccccgtcctcgcctgccgcaagaacctcaccgagacctgccccggcgagctgcagctgcgctccccggccggcagcgtcctcgcgtgcaagagcggctgcgaggccttccgcaccgacgagctgtgctgccgcaacatgtacaacagcccgcacacctgccgcgcctccaagtactcggagttcttcaagcgagagtgcccgcaggccttcacctacgcgcacgacagcccctcgctcacccacgagtgcgccgcgccgcgcgagctcaaggtcatcttctgccactagagctcggagggctgggctgggctgggcgcgccgcgcccgcccgtgcgccgccgccgccaacaagtgtcgctagtagaggtagtaggatttgcggtgcgtgtgttgtctagtgtgtgctggaatagctgtgggcctgtgggctgtggctgtgttcccgtcgtgtctgtggcggtgtggcctgtgtaggctgtctgtactctgtagtatactgggttgttggatgcatgcgttctggccgcaagactgatgtcatgctgttgctgcttactacagtttgcagtctgaaataaaaacttgtttgatgagc

SEQ ID NO: 20675 - DNA, 802 bp, Zea mays
  Clone ID: LIB3245-008-G3_FLI
gagcggcgtgggcagcgtcatccatggtgcacgtgaacttctatcgcaactatggtaagactttcaagaagccaaggcggccttatgagaaggagcgccttgatgctgagttgaaattagtgggtgaatatggcctgaggtgcaagcgtgagctgtggcgtgtgcagtatgccctcagccgcatccgaaatgctgcaagggagctgctcacccttgatgagaagaacccccgtcgtatctttgagggcgaggcactcctgcgccgcatgaaccgctatggtcttctcggtgagggccagaacaagcttgactatgtgcttgcactcaccgttgagaactttctgcagcgccgccttcagactattgtcttcaagaatggcatggcgaagtccattcatcacgctcgtgtgctcatcaggcaacgccacattagagttgggaggcaacttgtcaacattccctcattcatggtgagagttgactcagagaagcacatcgacttctcgcttaccagcccacttggtggtggagaacctggaagggtgaagagaaagaaccaaaagaaggcttctggtggaggcggtgacgacgaagaggaagagtgatcatgtgatgctagctccttcgttttgttagggacctaattttgttacatgaaaacaaaaagttggctgccgagggttctgaaaaattgcaatttaaaattttgagaactgtaattgctaagactcttcattgccgaagttgtttatccgatgaacatgttaattcagtgagcttgcactgctgcctacatgagatc

SEQ ID NO: 20676 - DNA, 545 bp, Zea mays; identical to SEQ ID NO: 12546
  Clone ID: LIB3245-009-A11_FLI

SEQ ID NO: 20677 - DNA, 916 bp, Zea mays
  Clone ID: LIB3245-009-F9_FLI
cgctgtcgctttcgctttcgcttccactcgcactccatgggtgcgcgggcgacgatgggatgttcgcccttgctgcccttccaagcgctctggctcacagcggccgttgtcgcggcgctcgcgctcgcggccggcgcgcagccgtcgccgtcgctgtcgccggggttctacgacgcgacgtgcccggggctgcagcccatcgtgcgccgcggcgtggcgcgcgccgtccgggcggagccgcgcatgggggcgtccctcctccgcctcttcttccacgactgcttcgtcaatggctgcgacgcctccgtcttgctggacgacgtgcccggtaacttcaccggggagaagaacgcggggcccaacgccaactcgctgcgcgggtacgaggtcatcgacgccatcaaggcccaggtggaggcgtcctgcaaggccaccgtctcctgcgccgacatcctcgccctcgcagcgcgcgacgccgtcaacctgctgggcgggccgcggtgggcggtgccgctggggcggcgggacgcgcgggacgcgagcgcgggcgcggcgaacgccaacctgccgcctccggacgcgtcgctgccggcgctgctgtccgcgttcggcgccaagggcctggacgcgcgggacctgacggcgctgtcgggcgcgcacacggtggggcgcgcccgctgcgcggtgttccgcgcccacatctacaacgacaccgccaccaccgacgccagcttcgcggcgggcctccggggcgccgtctgcccctacacgggcggcgacgccaacctggcgccgctggagccgcaggcgcccgacgccttcgacaacggctacttccgggacctggtcgcgcgccgcgtgctgcttcgctcggaccaggcgctgtacggcagcggcggagacgggggcaacacca

SEQ ID NO: 20678 - DNA, 408 bp, Zea mays; identical to SEQ ID NO: 12515
  Clone ID: LIB3245-010-D6_FLI

SEQ ID NO: 20679 - DNA, 382 bp, Zea mays
  Clone ID: LIB3245-012-A4_FLI
gaggattgcagttgacactgaggtattcttgagggggaagaggcatgtggagacattcaacgagcttacacgtgattgcaaggatggcgtgaatacatgctcagcttcttcctgaacatttggtgggctaaggtgagctgatactatgaaatattatgcttcagaggatattttcgactgtgttattggtgtctcttatgccacgcctagtcttgttgtagctaagtagctggtatcactttttgttataccactgttttgtgtttccagattacattagtacattcagttcatgcattgggcttgtgctgtttagttgaacatgcattattgcagttgtcttctgtatctcttctatatagctcacttggattttgccccc

SEQ ID NO: 20680 - DNA, 794 bp, Zea mays
  Clone ID: LIB3245-012-E1_FLI
cggcgaggaggcatggagccagacaaggccggggaggcagcgaaggagccgacggaaacggaggctggagactccgtggatccccgcgaactagtgtccagcgacgacgagatcgactactccgtcgagcctgatttctacgaccccgacctagatgacgtcgatgagcggtgggtgagcagacagaggaaaggccgcacatctgacgccgtgcttagctgccccgcctgtttcactaccctgtgcttggattgccagaggcatgagaagtacgtaaaccagtaccgtgcgatgttcgttcgcaactgcaagatcaagactgaccaggtcctgcgagagggcaagagcaagaggaagaaacgcagaggaggaagtgctggtgatccagctgctgcatctgaaggcgaaagcaaggggcagtcctaccaccccgtctgctgcgaggtctgctcaaccgaggttggagtgttggacgaggacgaggtgtaccacttctttaacgtgatccctagcaactcctgaatgccgtctgtaggagtagtacgttcgtagtcgtagaccccaccaccgtatacgcaagcttctgcgctacgccgtccgtctcttatcgctgatcagcctgtacatcgggtatgtatctttacggatgttttgtttctgcagcatgatgcggtttcgaaagggggtctccgcgagctctagctgtgatggctctttgttggtggccagcctgatctttgtcctgattggacgtgttcatgcttgctctagcagcaatgaatgattgttggatg

SEQ ID NO: 20681 - DNA, 1014 bp, Zea mays
  Clone ID: LIB3245-013-C3_FLI
cgagaggagccggcaagcaaagcgccgacgactacgccgcaagtcccaacccaacccaccctatccagaatccaggtatatcagatgactcgacatgtcagttctcgatgtttcaaatgctacaatatgttaaataacaggcaaaaggttgagtggaacaataggggtttctctacagtccatgcattggtagctgctgccgtttctttctacctgatcatgatctctgacctcttcaacgaagatgcgcacaatagcataataattgacagaaaatcatggctatccgattgcatgtttggggtctcgatcggttactttttgacagacttgacgatgatcatgctgtattttccttctttaggtggaaatgagtatctcttgcatcacggactttctatgtatgcaattggtcttgctttattgagtggcaaagcacacatgtacatcctcatggtcctcttcaccgaaatcacgactccctttgtgaacctcagatggtatttggacgttgctggtcagaagacttgtaatctttacttatacaatggtgtggctctatttgttggatggctgatgtgatagctgggggtaatgattagtgatggcttcactatacaaaatggtatgggtatttgaattttccacaccgagaggtactaccagttagcccgggcatctgtggaaatccatttacttctgacaatgcgagatccatcttcagcttagggttctacagcttggtggcagtgccgtcggtggttgcggtgatgaacgtattttggttctggaagatactcaaggggatggtgaaaaccctttctaggaggaagcacagcgaaaatgggagaacagattagaaggaatgaaggaaggatgctactgaactgtacacatgttcatctcgacgcacttacggaagggtactcactcgcattcatttctcacacagatgtaattaccttgtcttgccgtcaaagattcaaagtcggagtcccgcaactcttaaattgc

SEQ ID NO: 20682 - DNA, 704 bp, Zea mays
  Clone ID: LIB3245-018-F3_FLI
acacagacgatattcacaattatcattaaaaagtgttcattgaaaaacagacgcataccaggtaaaagatgtctcgagtgacacaagtacctaagctagagcagcaggtaccacgtacgcagttgcctgcaagaagtggccaaagcgtgccacctcctagtcctggcccgacgtgcgcatggcggcacggcagccacgcccaccgcacgcagctgcccgccaccgccctctgtgcttatccccggccgttccgttccagagtcgacagaagcacaattcggcttcgtcaagtgagagtgagacccgcgttcttcttcctcggctcttccacgcattcagaacagggaggatcggatcggagctacgatggagcaggtcgtgaacacggtgatggacctggtgatgccgccggcgagcatggtgatgctggcgttcgcgtggccgacgctgtcgttcctgcgcggcgtcgagtgggcgctcaagaccctcacgaaggaggacatgctcggcaaggtcgtcgtcatcaccggcgcatcctccgcaatcggcgaggtacgtatcgtcgtgtcctggtgctggtggcgcggcgggagcagcggctgttcgcgatccgcgacaacgcgcggctgctgggcgccggccacgtcctcgtcatcgccgccgacgtcgtcaaggaggacgactgccggaggctcgtcgccgac

SEQ ID NO: 20683 - DNA, 469 bp, Zea mays
  Clone ID: LIB3245-020-D2_FLI
gcggagagagagagagaactagaagcatatatggcgatgccctttgcctccctgtctccggcagccgaccaccgcccctcctccctcctcccctactgccgcgccgcccctctctccgcggtgggagaggacgccgccgcgcaggcgcagcagcagcagcagcagcacgctatgagcggcaggtgggcagcgaggccgccggcgctcttcaccgcggcgcagtacgaggagctggagcaccaggcgctcatatacaagtacctcgtcgccggcgtgcccgtcccgccggacctcctcctccccctacgccgaggcttcgtctaccaccaacccgcccttgggtacgggccctacttcggcaagaaggtggacccggagcccgggcggtgccggcgtacggacggcaagaagtggcggtgctccaaggaggccgccccggactccaagtactgcgagcgccacatgcacc

SEQ ID NO: 20684 - DNA, 995 bp, Zea mays
  Clone ID: LIB3245-021-C9_FLI
gccagatgcagggcgtcactgtgcagtccccctcgcctgcttctcgcggaagaatccgcccgcgccacagagcggacacttcgcgctcctcttctctcccgttcgacgcgtctgcggaaggccgatttccggcgaggcggtggtgaatctaccgcgggaaggtcgcgtcggcgccggtccccgtcgggtctgtggaagacgaagccgaggtgctcatcaagcaggtccggtcgcgaccgaagacgaagaggccgcaaatacgagtccgccgaggttcgtcgcgactgcatccttcgtttcccgctccgagcatcgacgccttcctcggatccggacatcttcgcttcgattcctcttctttcggtcgaaatcttcggttcttcagcacacttgcgaacggcatcctcgaaagaagataccatgaagtctttgcttaaagtacttgtcgactgtgccgaggatgccacaaaatcccttggtggattagtagatcatgcattagaccacatgcatgatgaagagatattagctagaaccctctttgccatgaaagaaaaacttgatttgcttcaccaagatgccttagagactaaagtccaagcttttcctgaaattgctaagtacaacagggatgacataagtgttgaaccgacatctccgtcgacccctccaacagttactgaaccatctgtcgatgaagaggagttctactgccccgatgtgagtgatgagtggtacttcagtgactcagataggtcaactcgtaatagctactgtaatctttattagctccatgtattccagcaatagttgcaggatagccttttgaacatccaagtactcggggtgtccaacttgtcttgttaaagaactagtcctgtgatgtatgtctaagtctcaatgctacctcgtgaccttaagttattatgatgttaagatccttgtagtttgtgaactatgttgactcataaatgttctaatgctgttgttcctcc

SEQ ID NO: 20685 - DNA, 2073 bp, Zea mays
  Clone ID: LIB3245-021-G3_FLI
atcgactggtgccagttgatttttaatgatctatgtgaagctgccaagaagtggcacaaccggatcaccacaaatgtctccacgactatctatggatgctccattgttgtccttttgtactacttggatcacctgcatacagccgctgccccccataataagagtggcacacctcgcattaaattttttgataagaatagcataaaagctttgaccaaagctgacaagaggaaggttcgccatggggctgaatctttcggacactgtgaattccgaagctcgacggagacatgctatgcagttggacctaagatcgatcgccaatctgagccggagtgcaggaccaatatttttgatgcaccgcgccctggccccatgcctcggccaacttttaacatcaaacttccatctatcaaagagatgatgtcaagtaagatcaacgatctcccccatcgtcatcgatctaaattcacagatattcttgctgcatatgacttggaggttgacaagtcatgcgtagccataaaagacagcatcgacaaaattattgtcaagcaatatgacatagcagacaagtttatagaattgatagacgaggtactacgtgccgagtctgaaaatttggaaaacgagacggatgagccacagcaaccggggaattcggctgattcagcaggacacacagttgatgccacccagcccacacccgatatgccatcccaagcttcgcagcttgagacccaactgggtgctactcagtttgaagaaattcacgaaagacaacagcatatccgtacagtccttgagacctttcccgacgaatcggatgtggtttcagatcaacagagaggtgcaatggcaacagaggagatggaacaaaatgacagtgggccagtttttgaccagaccccaactcctcatgttgatacactcaaaggtactacaatctctggatctgatccaccacttacagagcaagagtgtatccgttctctgtgggatttaatttgttccaaggacattgaccaaagcagggtagttattgattacggtgattacagtgcaaactgtatggatatttatgaatctttcgcggagggtaaatgtcttgaggatgtcttcatgcagtgtttcatagagtgtgttcgtgatgattctaaaaatcatcgtcgaactctgacatctaacagattaatacttgatgtcaacgttggggctctgttaaattttgaagaacaggaacgtcacagcaagaatcctcagtcgtttgatcaaaatgtcctacagaattgcttgcacaacacattgcctgctttggtgaatccggataaatgcaagtcgataatggtacctatgcttagcaggggtcattggacactctatgtgatcaatctacaccaccgggttatccacattttagattcgaatccctatggtatacaacttggtggcaccgaatggaaggactatcattatgatccaatttatttaggtggcaggaaattcccatgggctagggtgataatgagtaggctgagcaaagcgttacaacacgtttgccccaacgcagaatttcctaagtttggtaattttccattggatatgccatctaactgcccaacaatgaggacagggtcaaatgactgtggattttttgttatgagttacatgaaatcttatgatcacaatgcaggtgtcatatcttctttcaatcaaccagacaattcccgagatctacgtgctcatgcccttcatcaactcacattccatcgcatcaacaaggcgttgccacttccattagatatccagagatttatgtttgcgcgcaattagtgaactatgtcagatctaagcaatgttgtgggcaatgtaccgtactgtggtattttggccattttgttcagttaacaattgtaggaagcttccttatatgtgctgttttcagaacaattgtcatgctacttttgtgttaggggtgttacccaggttctttctgtgaactttagttggctggatacttatggttatgtcgcgaatatgtgaacatcagatgttttcacttctgtgtgcttt

SEQ ID NO: 20686 - DNA, 1236 bp, Zea mays
  Clone ID: LIB3245-021-G6_FLI
gtcctaatatgagcgagctatcactgtgcttcacagaacatagtagtgattgtaccaatctgattactttgatggatggcctaggtcgtacatgtcctaacttggaaaaaatgcacatatcatcaaaacaattatctaatgaagctgtatgtgctctagagaatgctaatctcaggggactgttcatgctatccctgattctaggttcaaaaataactgatgcagctgttgcatctattgttcggtcatgtgcaagcttggagttacttgatttaagtggatctagcattagtgacaatggtgttgggatgatatgtaaagcataccctcgtactttatcaaggctgctccttgctctttgcccaaatgtgaccacacgtgggatccagctagccacagcacagttgccatgtcttcaactcatggactgtggaatgagcctatgtgctaatgtgaagaatgaaaaagagggtccatattttggtgaaatcaatggaggtattagaattattcgaaaactgtccatcttaaagaggcaacctattcaccaaaagcttattataaagcatgggaatttgaagaagctcagcctgtggggctgttctgcattagatgctctatatctaaattgtccagagttaaatgatctcaatcttaactcttgcacaaatctacatccagaacgtctgcttcttcagtgcccaaatttaaagaatgtctatgcatccggatgccaagatatgttgattggagcaatcagaaatcaggttctgaatgagttcgctgcagttgaaccatctcttccatgcaagcggctagcggatggctccaaacgggttcaactccctcagttcctaaagcagcagccgtcgaaggacaacaaattaattgaattgagccagacccagtgcactgtgcatcttggttcataataacaccaccagagccagttaacggagcattgtacacaccgaattatgtgaatcatgcaccacataacattatcaattcgttgtatacttctgtattgcatcagaacctgtagtgattgttgtataagctgctaattgctgcatggacatgtctgaatccatcatggatttcttgcgaccgttagtctgttctaggaaacattatataggaataattcgtaaccatgacccgtattctctagggaaaaaaaataatgatcctaggtcactcattttggttggtgttattctgttattcttccgc

SEQ ID NO: 20687 - DNA, 995 bp, Zea mays; identical to SEQ ID NO: 20684
  Clone ID: LIB3245-022-C9_FLI

SEQ ID NO: 20688 - DNA, 1634 bp, Zea mays
  Clone ID: LIB3245-022-E9_FLI
gaagccgccaccgctcctcctccgtggcctcgcgcagctctactcccgcggcgccgccaaccagcagctgccagaaaagctcgtcgctgacctccgccgccacttcgacgctctccccaacagctacgcacaggcaggatatgacatgaaagatgtcctcctgcatgcccgccttgcagagcaggcgacaggtgaggatcagcctgcagtgaacattgaggaagttcatggcagaggaagttgtgaagaaggcactgttttccagctaacatttgcttgcacagccccgctctcatggcagtcaatgtcaggatcactagacagcccttcgttctgttgcaagaagatccagatctttgagaagagagggctgacacttggcgtcgtcatgatacttgtgcagactgggaacgaggcgctcttcaagaaccaggttgagtccgcgctgaaatcggtagtaaagaagcaaagaaagaacagtggtggtgtgaagctaccatttgggctctgcggttgtcaagaagaaggatcaagaaacttcgatgaggagtcgatgtttgatccagatgatggtcgggtactcgacaatgagccggcgcacagaccacagcttcccactcccctaccacaggcatcagtcttcgtctcagtagatgaatggcaaaccattcgctccggtggcgaggagcttggtcgctggatgctgcgttccgaggagatcgagttcgttgattggtttggcgcgaatccattcaggggtgtctataagggaaagaaggtttgggtcaacaaactgaggggctgtgacatggggagtgcttacgatgtcgagattcgtcaggacttgctgcagttgatgagctgtggccaaaggaacatcctacagctccatggcgtttgtttcagtgagaaccatgggctatgcatagtaacgaggatgatggaaggaggatcggttcatgatattcttgtgcagagaaacaagaggctgtccctccgagacacggttaggatcgctctcgatgtcgctgacgcaatggccttcatgaacggctatggcatcgcgtaccgtgatctcaatgctcggaagatcctgctggacaggcaagggaatgcttgccttggggatatgggcattgttaccccttgtagtaatgttggtgaggtcaccgagtacgagacatctgggtaccgatggctggctccagagatcattgctggagatcctgaaaccgtctccgagacctggatgagcaacgtctacagctacggaatggtgctctgggagatgatcaccggagaggaggcctactccacctactcgccagtgcaagcagctgtcgggatcgctgcctgcgggctgaggccggagatccccagagactgtcctcctttcctgaggtcactaatgaacaggtgctgggacagttcccctttgaagcgccctcagttctctgagatcacatccatcctacagaggcagaatgttagatagttcttttttgcccccctccctctcttccttttccttctatatcatatgctatatatcagtttggcttgggtgtctgcctaatcatgcaggaaactgcatctgagaaagtataatatatatgcgcagaggcttgttattt

SEQ ID NO: 20689 - DNA, 2073 bp, Zea mays; identical to SEQ ID NO: 20685
  Clone ID: LIB3245-022-G3_FLI

SEQ ID NO: 20690 - DNA, 1625 bp, Zea mays
  Clone ID: LIB3245-023-A12_FLI
gacggggggtcacacatcatacttcttttgccattgcaatggaaaacaactacgcatgcccaccacccagcaagggaaacctgatcacagtcttgagcatcgatggtggtggggtcaagggcgtcatccctgctaccttccttgcattccttgagtctaaactccaggagcttgatgggagcagcgcgcgcatagctaactactttgatgtcatcgctggcacaagcacaggtggtcttattgctgcaatgctggcagctccgtcgctgagcaatgccaagcaaccatgctatgaggccaaggacatcgtgccattctacctcgagcacagtcctcgcatcttcccatgcagaactgggattttgggctggttcttcaagatcctacaaacagttaaggtgatgatcaggccaaaatatgacgggaagtacctgcacaaagtgaccagtgatctgctgggtggtaccagagtggaagagacgctgacaaatgtcgtcattcctactttcgatgtcaagtgcgtaaagccaacaatattcagcacattcaaggcaagatctagtgccttgatgaatgctcgtcttgctgatgtgtgcattggcacgtccgcagcaccgacggtcctccctgcgcactactttgaaaccgtggatcaccgcactggcgcatcgcgtagcttcaacgttatcgacgggggcctcgccgcaaacaatccgactctggtggcgatgggtgagataacagaacagatgaggcagaagagcaaggagttccccgagaccaagcccctggactaccacaggtatctggtagtgtcactaggcacaggccttccagagcaggacatcaagttcgacgcgtgccgtgtcgccaagtggggcatcttcggatggctcggccgccgggagaacaccgtgcccttgctgcagatgttcatgcacgcgagctcagacatgacggacagctacgtcgccgaccttttcaaagcgatcgggtgctcggaccaactgctgctgcgtgttcaggaccgcaacatacccatagcggctgtggcagctgacctctcgacggagaagaatctgcgagggctggttaagattgcagagaaccttctgcataagccactaggcgaggacgattataagaccgacgaccgcgtcgagacgacgccgagagatggccgtgccatactaacctatgctggtatgctcgcacggtttgcaaagctcctttctgatgagaggaagcttaggcttcagaacatgggacactgtatgccggtcatagcaaatcgtgaagcttgagaggtcttccgaaacacatattgatacatccatcttataggagttagagagttcgttcgtgtaggctatctgcaagctgttgtgtgtgtattgcaagttgtgacgacgacgtgagtgtgtacgtaaatggataaggcgatatggtttgctttggagccctgtacgtaaatggagaaaatgtgatgccctggcgtctggttgtctagcattctaccagctggctctccgatcctagtcacatccatccagctcctccttttcagaacgccctgtacttctcaatgatgcagcactcctagtactaaacctttaatatatcat

SEQ ID NO: 20691 - DNA, 1307 bp, Zea mays
  Clone ID: LIB3245-025-C11_FLI
gcttcccccgctcgggaagccgttcctccgctccgcctcctacctcaaggaggccctcctcgcgctcgccgaaggccatcacggcggctgccacctcaaatcaccgctcgacgttgccctcaagctcgcggcgtacaagactttctctgaccactcgcccgtgctccagttcaccaacttcaccgcaacgcaggcacttcttgacgaaattggtggcagcacgtcgtcctgtatccatgtcatcgattttgatcttggcgttggaggccagtgggcttctttcttgcaggaacttgcacactgccgtggcgcaggtggcgcagctctgccgttcgttaagctcactgcctttgtatcagctgcttcccaccatccactggagctgtgtcttgcgcgtgacaacattgcacagtttgctgctgaccttggaattccctttgagttcagtgctatcagtgctgatatgatcaaccctgcagaattcatttctgccactgatgatgaagatgtagttgttgtcctcccgactggttgctctgctcgtgcaccaccactgccagcgatccttgggttggtgaaacagctagctcctaagattgtgatagccatagaccatggcgctgatcgcgctgatcttcccttctcacagtacttcttaaactgctttcagtcttgcatgttcctccttgattcgcttgatgctgctggcattgatgctgattctgcctgcaagattgagaagttcctgattcagccaagaattgaggattcggtgcttgggcggggcaagctggacaatccaattgcatggagaagtgcatttgcagctgctaggttcgtgcctgttccacccagcaattgggcagaggcagaggccgattgcctcctgaaacgggtgcaggtccacggtttccatgtggagaaatgtggggtcgggctcacactatactggcagcatggcgagcttgtcactgtatcagcatggcggtgctgatcagcaatccacgcctgtgggcaccaatatttcaccaccatttgctagcagcttcaactccagtaacgtgtatttcgtcttgcaatttagtgttgcaaaggtaacaaatatattggtgttgaacccttcatgttgattatctttgcaacttattagctagaagtagaactagcggatttttagcaatgttggtgtcaatgtctctagtgtaatgatgttgctctaggtttttaccctgcttgctctcgggtcactagacattctaatgtgacttgaaacactgcttgtgaggagagggtataattaacctatc

SEQ ID NO: 20692 - DNA, 1598 bp, Zea mays
  Clone ID: LIB3245-027-C4_FLI
gtggcctcgtcgctgcattcaactcaatacagaaaccctggtctgaaagccctcactccaaatctcgcgcactgtcagctgacgccaccgcctgcgccagccctcgccaagccggtgaaaacctcgtgccctccgccgcctccgcccgcctcttccagagtaccgcggtctcatctcctcccgggacgggcatgcagagcacggctgccatcggtctcgttcggccatgcgccgcgcggccactccccacctaccctagcccacggcgcggcgccggcgcgtgcagcggcgccgcacagccgatcctcgcgccccgcggcctctgcctctccgcccgcgccagcctactgccggactcgccgctggaggaggagtaccggagatgcagggccggccggcacgtggccgcggccgggaaggtggcggcggctgatggggccgtagaggaagcggggggagggctcgtcaagacgctgcagctggggtcgctcttcgggctctggtacctcttcaacatctacttcaacatctacaacaagcaggttctgaaggttctgccataccctataaacatcaccacagtgcagtttgccgttggaagtgccattgctttgtttatgtggatcaccggtatccttaaaaggccaaagatttctggtgcccagctttttgctatccttcctctagctatcgttcataccatgggcaatcttttcacaaacatgagccttggaaaggttgcggtgtcatttacacatactatcaaggccatggaacctttcttctcagttctcctttcagcaattttccttggtgagttgcctacgccttgggttgtgttgtctcttcttccgatcgttggtggtgtggcattggcatcccttactgaggcctcctttaactgggctggattttggagtgcaatggcttcaaatgtaaccttccagtcaaggaatgtgctaagcaagaaacttatggtgaagaaagaggaatctctcgacaacattaatctattttcgataattacagtcatgtcattcttcctgttggccccggtaaccttacttacagaaggtgttaaagttagtccagcagttttgcagtctgctggtttgaacttgaaacagatatacacaaggtcattgattgctgcatgctgcttccatgcataccaacaggtgtcatacatgatcctcgccagggtatccccagtcacacattcagtgggcaattgcgtcaagcgtgtggtggtcattgtgacctcggttctgttcttcaggacccctgtttctcccatcaactcactcggtaccgggatcgctcttgctggagttttcctatactcgcaattgaagaggcttaagcccaagcccaaggctgcttgatcatagacctttgcaggtccatccaatagaacttttgaagttatgctatgccattggaatgattagtgagtgccgtagttagaatgatgtttaaagaagagctaccacttcagcagataatttgtgacttgcttgcattttttggacggatttgttcgtgtattaataattttgcagtgacgatacttctgttgtgctgtttataatcttctg

SEQ ID NO: 20693 - DNA, 1410 bp, Zea mays
  Clone ID: LIB3245-027-C6_FLI
ggaaactgctggagagggtgagagcaaggggagcagcggtcgggcagccatggggcaccactgctgcagcaagcagaaggtgaagcgtgggctgtggtcgccggaggaggacgagaagcttgtcaagtacatcaccgcccacggccacagctgctggagcgccgttcccaagcatgccgggctgcagcgctgcggcaagagctgccgcctccggtggatcaactacctccggccggacctgaagcgcggaaccttctccgaccacgaggagcgcaccatcatcgacgtccaccgcatcctcgggaaccgatgggcgcagatcgccaagcacctgcccgggcgcacggataacgaggtcaagaacttctggaactcgtgcatcaagaagaagctcatcgcgcagggcctcgaccccaagacccacaacctcctgccggcctccaggactctcctccacggcaacggggcaaaccctagcagcaacaatcctgcccacttcaactcaaacggctgcgctgctgtcgtctccgtcgccacgacgcccttcaccatcagctccccgaccaaggccgccgcctacggcaccgtcacggccacgccgccgccggagacgatggcgccggcaacgtacgacgtccctaataattaccctgacggcatgctcatgaggcatgatcaggcagccacggcggctgcgattccgggatacccgtaccaccccggaaacggcggcggcgtgctgatgagcttcagggaccagaatgctggtctccagacatctgtggacttcgtgaacggctcctcgtcctcctcctccatggatcacgccgccggcatgcctaacggcaacggctttagccaacaaggcatgggcgcggccttcatggacgtgacggcgggaatgtggagcaccgcagccgtggattctggcatgtgtgcagggatggaagtggctcagccaccgccgccgccgccgcagcagccgctgccaccacaagggctggtgcagggggaggtgctcgtcggccgacaaactgtgatgaacggtggcggtgcagttgctgacaagggcatggacatgatggacgtctcttcagtgtatggcggcgccggtgcaatggcgttcgatctggagctgatggagtcatgcgcgttgttttgcggcagcaccggcaacaccatggagcagctgcaatgggactgctaagctcactatcgtccttacccctaattagtttgttgtcttccatgcttcatccatgtctttatttttcctcttaattttgatgttcgatttactgggttcttgattcagatcgtccttttaaagcaagaaatccatgctgagcttagtgacgaactcgatctaattcagatttcaataaagttatctcaaattttattgattgc

SEQ ID NO: 20694 - DNA, 474 bp, Zea mays
  Clone ID: LIB3245-034-E3_FLI
cgtctccggtcccgtccgtaataacactgatccgatccacgccggccggcgatggagctcatcaagtccagggcgaccgtgtgcgcgctcctcctggcgctgctcctgctctcacactacgacggcgggacgacgacgacgatggtggcggaggcccgggtgtgcatgggcaagagccagcaccactcgttcccctgcatctccgaccgcctctgcagcaacgagtgcgtcaaggaggacggcgggtggaccgccggctactgccacctccgctactgcaggtgccagaaggcgtgctaagcaaagctcttcaaacacccttggcttgccagaactgaactctagtagtactaagtaacacccttggctagctgtgcacaacctacgtaccgtgcatgcatgtaatgtggtgtcatgtaacgtgacagcaataaatagtattaataataataacacggcatgtagccaagcaac

SEQ ID NO: 20695 - DNA, 1827 bp, Zea mays
  Clone ID: LIB3245-034-G4_FLI
tcctcccctccctccgttcctcacggctctccggactcgccccgcggctggccgtgctgagtttcgttctctggccggcaaagaagcgatttttttgtgctttctggacggatcccggccggagaagggaccgaatttccacgacctcgaccgccggctgctcctctgctgggctctccgtgcgcaagaagagcctaccaaggtgaatccggagatttgagctccgggcccgcctcatggagtccatggcgcaggaaagggacgcgttggattcacctgccttgtcgattgacaaaaggctgcggtcggatgctgtcgaatcacccctggtggatgatgcaacgcaacccaaggagggggcggacggttaccctgtcaaggttcggaagccttacacgatcacgaagcagcgagagaagtggacagaggaagagcatgggaagttcctggaggcactgaagctctatggtcggtcttggcgccagatacaagaacacattggcacaaagactgctgtccagattcggagccatgctcagaagtttttctccaaggtcgtgcgtgaacctggggccagtaattcaattgagatcccaccccctaggccaaagagaaaaccactgcacccataccctcgcaagtgtgccgactccaccgtgacaaatgctccaatgggcgaaccgaagaatgctcctgtttcatcaccatctggttctgaccaagagaatggttcgcctgtctcggtgttatctgcaatgcagtcggatgcttttggttcatcaatatcaaacccatcaactgggggcacgtctcctgcgtcatcagatgatgggaataatgtccctgagatagtgaatggggaggaaaatttgctcactcagcaaatagaagaccgatcccatcaggaatcaaagcaggacaacagtgatggtgagctgtctgaagaagattcatcacgagtccaagaaaccagtttgaagctttttgggaagacagttatcatcccagacccaaagaaagtctgttcctcggatgggggagctggagatgatacacaagaagtgatgcaaacatcctgggttggaggaggggtggcagcataccctgcccataacggatggtttcttccgttccattctttccctgctcatatgtatgagtcaggggatgctaggatttcccctcttcatatgtggtggccttactacggttttccggccggccatccaagagggtttggcacagggctgcttaacgaaggcgccattgagagtgatgccgacaatagcccatcggttgaaactaattctgatcgcacgggcaatgttcatgttcagacgacgacccctaccattcacaacaatgctgtcaaggagtcagttgggccagttgagatgccagagtcgggtccgagcattgagctgaaacccagcgcgaactcggcctttgtaagagtgaagccgagcagcagcgtcagcggagaccaatcactggtaagggggttcgtgccatacaaaagatgtaaggtcgaataacccaacccaacgacatacctgtctgctgctaatcttactggagattgattgatcctgaacagtgtagggactcgagtggcacacatcccttgttccagtgtgcctgccattttttgcctgcaaaattggctgctggtgtatgtgtaatattgtcgttttactgcctgcagcggaatgtaagatgccgcaggcttgttgctgtcacctaggcgtagactgaacagatgttgtgcagggatcgccgatctctgcacccttatgtttgttgtacgaggaaaaccggattctgttg

SEQ ID NO: 20696 - DNA, 2393 bp, Zea mays
  Clone ID: LIB3245-037-C4_FLI
ctctgcctgcctgccttgcctgtagtgagccacgcggaggacatcgagatatcgctgtgtgacggcaactcggaggacgagcggcggcggcgtaagatcggctcgctgcggcggaaggccatccacgcgctcaagaagcgagggaggcgccgcgtcgacttccgcttcccgccggccgccatctccatcgaggacgtccgcgatgccgaggaggagcgcgccgtcgcctccttccgggaccgcctcgccgcgcacggcctcctccccgacaagcacgatgactaccacatgattctcaggttcctcaaggccaggaagttcgaagccgataaggcaatgcagatgtggtcggagatgctgaaatggaggaaggagttcggaactgacaccatcctcgaggattttgatttcgcagaactggatgatgtgctgcgctactaccctcagggctaccatggtgtggaccgcgaaggccggcccgtgtacattgagaggctagggaaggtggatcccaacaaactcatgcagatcacgtctgtggatcgctacatcaagtaccatgtccaggagtttgagagagccttcagggagaggttccctgcctgcacattggctgccaagaggcacattgactcgaccactaccatcttggacgtccagggtgtggggtttaagaatttctccaagactgccagagaacttgtgcaccggatgcagaagattgatagcgactattatcctgagacactccaccaaatgtttgttgtgaacgctgggagtggatttaagtggatctggaacagcgtgaagggcttccttgacccaaagacttcatccaagattcatgtgcttggttcgaactaccagagcaggcttcttgaagtaatggattcgagtgagctgccagaattccttggcggttcatgcacatgtagtgacaagggtggttgtcttggatcgaacaaagggccgtggaatgatccttatatattgaagctgatccacaatttggaagctggatgcgtgagggaaatcaaacctgtttctgagggggaagaaagaaacagctcatcctttcggttggaacagatgaaatggcagggcttgctaagtgatacatcaaatgctgaatctggatctgatgttgatgattttggtgcatcatttgttcataaagtttctgactatggttgcttgactccagttcatgaggaagtaaagggcacagatcgtgtgacatacttcagctatgatgatcaaagccacccggatatggctcctgaatcttaccatggagcgcgacgagctactggaatggagcaccacaaaccaatggctgatttcagccaatattctgccaatagaaggcctgggaacagtgctcttaatgtcaatggtacggccgctcaaagtggttgggaaaacgtggtgaagctagtggttacaactttggtcaagctcttctacttcatccggcttttcctctccacagccgagaggaggctcgagagcatccatcgccctgctccaccagcggccccagcagcggcagaggagccaagacctcgcgccatcagtgatgaagaggtgtgcgcctgcctgcagcgccttgacaatcttgagtcgatgtgcagtcacctcgccgccaaaccgccgcagatcccagaggacaaggaactcattctgttgagctcgttcgagcggatcagatccgttgaggctgacctcgagaggaccaaaagagtattgaatgcgaccgtggtgaagcagaaggcactggtggagactctggaatccgtacaggagtcgtcgtctagagtcaagaagaggatgttctgttcataggacattgagccgagctgagcaccagcagatcccaggaaccatgccatctgcgtcgtcattaaccaacaaactgtgaagctgacgtgcgaagctgccagcagccggagcggagccgccattttgacctggccgcgaccacccacttcgtcagccctccgaggaggatgaaccagcctacaccaaaatggaagagaagaccgtagcacccatgtcgcttcctttcattcccacccgtttttgtagcctccgtacggttgtagttgtaccctgccttccggcgatcccgttttttgattggtgaattctctgctccggccggccgccgagcgccatgccaagtgctgtgttacatcttcttttccttggtgccgtccgaatggctggagtcgttcttctgtatactgatgagtacagagtagtgacccccgcggcaggagctgggctggggagaagcacggtggcgagcttggtctggctgcagctcctgtgctgtcgtctgtacatggcacagactgcttctggtggccctgctaatacagattgctatg

SEQ ID NO: 20697 - DNA, 1603 bp, Zea mays
  Clone ID: LIB3245-038-E12_FLI
gagcaagctactagctgctggctgcttccttctgtcagtgtacagtagccggcttgcgagctgtgggccggccggtggcggtgctctcccgtctctatcctatccatcatagaatagaatagatagatagataggctactcagtgccactcgatcagtagtggtagcagctggcggctggcctgggacgacgatgagcgccaagaccagagctggggccgcccatgtacgccggcagctcgtcgcggccgtggcggtgacggtggcatgcttctactcctcggaggcgacgcagctgcaggtggggtactacaacggcagctgcccggccgccgagagcctcatcgagaccatcgtccacgccgccgtccgcaaggacgccggcaacgggccgggcctgatccggctcttcttccacgactgcttcgtcagggtacgtaggattattcgatgcccagccccagcccaatcggacaatgcaataatgcaactgagctccttgacagggatgcgacgcgtcggtgctgctggacgacccgacgggcagcccggggaacaggacggtggagaagacgtccccgcccaacttccctagcctgcgcgggttcagcgtgatcagccgcgcgaagcgcgtggtggagcggcggtgccccgggacggtgtcgtgcgcggacatcgtggcgttcgcggcgcgcgacgcggcgcgcatcatgggcggcatccggttcgcgatgccgtcggggcggctggacgggcgcgtgtcgaacgcgtcggaggccacggccaacctgccgccggcgtccttcaacctgacgcagctcctgggccgcttcgcgtccaagaacctgagcgccgacgacctggtgacgctgtcgggggcgcactccatcgggcgctcccactgctcgtccttcgcgcccgccaggctgtacccgcagctggacccggcgatgaacgccacgctgggggcgcggctcagggcgcggtgccccgccggcggcggcgggcggcgcgaccgcgtcgtcgacctcgacttcgccacgccgctgcagctggacaaccagtactaccgcaacgtggtgacgcacgaggccgtgttctcgtcggaccaggcgctcgcggggcgcaacgacacggccgcgctcgtggcgctgtacgccgccaaccgcacgctctggtcgcagcgattcgccgccgccatggtgaagatgggcagcatcgaggtgctcaccgggccgcccggggaggtcaggctcaagtgcaacaaggtcaactgatcggggggattggagttaggtgagggtcagctgcctgtactactaagctagctagtagcagcagcgggaatcgcgtcaagtcaagccggcccagagccagagattatttcaccatcactctcgacgatatgcacttcatctgcatgattcattcatgtgtgtacttaattgtacatgggatcacgtactacctgcacttttttttgcctagcttgtatactattattattgttgtttcttgaaaagaaaaaagtaacatatataccaattgcgcgcatgactgtaagtatgtatgaggcatacaattaagagatgatgattactgag

SEQ ID NO: 20698 - DNA, 1367 bp, Zea mays
  Clone ID: LIB3245-047-B6_FLI
gccagtcttgctctccacactcgctctgctactagctactagcagtagagcagtagaggagagagcatctacctagcgccgtcggacggatcggagctacctcaccgccgaccgcgcgcgaagagatcgatggctcatgctgctacgctcgctgctgcagccgcggtcgtcgtcctcatcgtcgtctgctgctgctcctcttcggaggccgccagccacagcgccaacgcgaggcagccgccgctggcgcccggcctgtccttggacttctacaagcggagctgccccagggcggagtccgtcgtgcggaggttcgtgcaggacgccgtgcgcagggacgccggcctcgccgccggcctcctccgcctccacttccacgactgcttcgtccagggctgcgacgcgtccgtgctcctggacggctcagccaccggcccgggcgagcagcaggcgccgcccaacctcacgctgcgccccaccgcgttcaaggccatcaacgacatccacgaccgcctccagaaggagtgcggtggcgcagtcgtgtcctgctccgacgtcctcgcgctcgccgccagggactcagtcgtcgtgtccggaggtcccagctacaaggtgccgctgggtcggcgcgacagcgcgagcttcgcgacgcgagaggacgtcctgagcgggctcccgccgccgacggccgccgtgccggcgcttctcgccgtgctgtccaagatcaacctggacgcgacggacctggtggcgctgtcgggcggccacaccatcgggctgggccactgcgcgtccttcgagagccgcctgttcccgcgccaggacccgacgctgaacgccaccttcgccggccacctgcgccggacctgcccggccaagggcaccgaccgccggacgccgctggacgtgcgcacgcccgacgcgttcgacaacaagtactacgtcaacctggtgaaccgtgaggggctcttcacctccgaccaggacctcttcagcaaccccggcaccaggcccctcgtcgagaagttcgcgcgcagccagagagacttcttcgaccagttcgccttctccgtggtgaagatggggcagatcaaggtgctcacgggcgcgcaggggcagatccgcaggaactgctccgcccgcaacgcaggcatgacgtggtccgtcgtcgacgaggctgcacagcagagcttcgtgttctagactttgtacgtactggctgccgtgtgggaggcggtgtcctgtcaacagaacagatagctagcactagcagtagcactggacggcatgcagcgcccccatgcatctagcttggacaaataaaagtggccatgcataaataaatctaccgcaaccgatcttcaaat

SEQ ID NO: 20699 - DNA, 1175 bp, Zea mays
  Clone ID: LIB3245-047-H2_FLI
gctgattgttctggcaactgtttgtcatccttagttccatgtggctgtgcaagagtgacggggggcgaattcccctatacaccagagggcctgcttaagacagaattccttgatgaatgcacctcagttaatcatttcccacaagagcatcataggttctactgtacagtttgccctcttgaaagatctaagaataaagcctcacctggtccgtgtaaaggccatcttatgagaaaattcattaaagaatgctggagtaaatgtggatgtggcatgcagtgtggaaatcgtgtgattcagcgtggtataacatgcaaattgcaggtgttctttacacgcgagggcaaaggctggggagtacgcacagtagaggatctcccaaaaggttcctttgtctgtgaatatgttggagaggtactaacaagttctgaattgcacgaaagagcaattgaaaatgcaagaaatggtaaacataagcatcaagtactcctggatgctggttggggttcaggtgtattgagggatgaagatgcccttagccttgatggttcattttatgggaacgttgggcgatttatcaaccacagatgctatgatgcgaatttagttcagatccctgttgaagttgagacgcctgatcatcattattaccatctggcatttttcacgaacaagaaagtagaggcatttgaagagctaacatgggattatggcattggttttgatgatacggaagggcccagtaaaccattcagatgcatgtgtggaagtagatattgccgcgatccgaataatctgaggaggatggctagagcagctgcaaagcggaagtaggcggggaagctgaacttggttggagattagcacatcaacttttgctgtggtatttggttccgtatttgatgtgcagcagcatcacatcagttagtacttagtattagtgtagatagatggagatgagggcggatgttttggacccttgcccgtggctgagcaacacgattgcgaccttaacctacggcatattggcatgtaaattagcctgggattgagtaggcgtagaaagaacgcgtaatagtacttagttatgtcatgtcatcttggtagagggcaagttaaattacatgccatgtcgttgcatcatctatgccatgctgggttggatgcttgtgctg

SEQ ID NO: 20700 - DNA, 671 bp, Zea mays
  Clone ID: LIB3245-062-C9_FLI
gcggacggtggcggatgacagcccgagaacgcgggttttgaacacaatcagaaagctgaatccccatctgttcgttcatgggatcgtcaatggtacttacaatgcacccttcttcgtgacgcggtttaaggaggctatgttcttcttctcttcgatctttgatatgctcgaagcgaatgccttacggatggatgagcataggctgctgatagagagagagttctttggccgggaagctgtcaatgtgattgcctgtgagggcacagagaggattgaaaggccagagacctacaaacaatggcagatgagaaacctcagggcaggcttccggcagttagctctggacagggagataatgaagagagcaaggtacaaggtaagcaagagctatcagggggatttcctcgtggacgaagataacaagtggatgctacaaggttggaagggtcgtatcatatatgcactttcagcatggactagctagacttgtaaatattagtgagctactgagctgcttagctgacctcttccattaatttcttgattaatcaccatttcattttgctgtattatgtttacgttgttgaatctagccctcttttagaaaccaaagttttgtatgtttgaattggctgcaataatagaatcttgtccgtgtctgcctgaaaaac

SEQ ID NO: 20701 - DNA, 738 bp, Zea mays
  Clone ID: LIB3245-066-B12_FLI
aataaaatatttgtcacgctttttattattgctctccggtttattacaggcgtcagccggaaaagcttccgctcccaactgccctcggaccctccttccccccactaccagaactcctcacctcacttcagcctcaacgcctaccaaacttacgcagcctctccataactgcgagctgttgctcctcctcccgagctaccattctccgtcgatctcctccaggctgtagcgcgctgccacgcccgcccatggcctcggactcgaaaccggacagcatggacaccgaccctcttggcggcggcctctccatcgccgtcgagcgcaacccgccggagtcgcgcctgcagcagctcggcgtcaggtcttggcccaagtgagcaccgctgccgccgatcactgcccgctagtttacttcttggtttctcgtccccagctcctgatcgccgtggcgtatgtaactgctgccgtgcgtgtgcaggtggggttgcccgccggggaagttcccggtgaagttcgacgcgcggcagacgtgctacctgctcaagggcaaggtgcgggcgcacatcaaggggtcgtcggagtgcgtggagttcggcgccggcgacctcgtcgtcttccccaaggggctcagctgcacctgggacgtcgccgccgccgtcgacaagtactacaagttcgactcgtcctgacggctgacgcacatcgctcccggcccggctccgctgatttggtcccgat

SEQ ID NO: 20702 - DNA, 884 bp, Zea mays
  Clone ID: LIB3245-067-F8_FLI
gcgacgtccggctgctgccgggcggcggcgacgccgctgcggcgcccaagtggcgcatgtcgctgctggagaacacgttcagcgggttcctgcagggcgccggcgccgacaccgcggcgagggccgtgttcgcggaggggtccctgttctgcccgttcctgttcggcaacttcttcgacccggccgacccgttcccgctgtgggagttcgagtccgacgtgctgctcgccgcgctccgccgcggcaacgccaggaccaccgtcgactgggccgagaccgactgcgagtactacctcagagccgacgtgccaggtggaaggagatgcgacgtggaggtgagcggggacgcgatgaaggtgatcgacatcagcgggctgtggcgggcgccggcggcggacggccgggactggcgctgcggccggtggtgggagcacggcttcgtccggcgggtggagctgccggaggacgcggagtggaggaaagtggaggcgcacttcgacgacggcgagggggccctggagataaaggtccccaagaccgccgacgacgacgatgcccaccacgccacggcctgagcctgacgccgagaatcggaacctcgccgccccatttgaggacggcattattcttcgaacggacggcagaaacggaaaacgacggcataatcttggtgataagaatttgcaagatacggaggaaacgcaggaggaggagcgagctaattaaactgatcgtcaaagcatgttgcatgtgcatgaatgcacgcgcatgtccctgaaaaaaaaacgatgtatgtaatagtaatgttcttcagtgccaggtgttaattggcagtgagtgtcactgtcgcctctggtcatccttcaatcaaatccggcgtcgag

SEQ ID NO: 20703 - DNA, 1254 bp, Zea mays
  Clone ID: LIB3245-068-B3_FLI
catctgctgcaggtcgcggccgtgctcgcggcggcggtggtgctcatggcaacggcgtcggagggcttcatctccaagaagacgtggagcgccatccggcgggcggaccgcgacgggcccttcgtggggctggtggtgcccaacgcctacgagatggtccccgtcctcaactcgccggacttcaaacccagcagcaacatacccatcctagacgtccaagggcgacgattccgcttcggaactattggaagccaaaacgttgtcatggtcatgaccgggctcagcatgctgaacgccgggctcacgacccagctgctgctgagcctgttcagagtgaaaggcatcgtgcactggggcatcgctggcaacgccaacgaggacctccagatcggcgacgtgaccatccctgagtcctgggcccacctgtccctgtggaactggcagaggcacggcgacgggcctgagaacgagctgccgctagagaacgccggcgactacacgagggagtacggcttcctcaacttctccgactacacggtggggcaggacgccggcaacccggagctggcggcgaacacgctcaacagcgtgtggtaccagccggaggagatcttccccatctccggcacgccggaggagcggcagcacgcgttctggtgcccgtgaacaagcgctactacgcgctcgccgggaagctggaggggctggagctgccggcgtgcgtgaacgcgacgacgtgcctgccccgcgcgccccgggtgacgcgggtgcccaggggctgcagcgccaacatctacaccgacaacgccagctaccgccagttcatccgctcccacttcgggtgcacccccgtggagatggagagcgccgccgtggccctcgtcgcgcaccagcacggcgtccccttcatcaccatccgctccctctccgacctcgccggcggcggctcctccatcagcaacgaggcagccacgttcctcgacatcgcggcgcagaacgccgtggacgtcatgctcaagttcgtgcccctcatcgcgcgccgcggtggcgaacaggagcacgccgccgacatgtaatgtaaggcgggatcggagacagatccacgacgctgagacgttgcgtgccacagacacaacacaatgcgtgttttcgtcctccaagtttttacttacttaattttccacgcgcccacgatgtatcgatatactatcttgggtggaataaatgaaattggtcgtggtggccaagttatat

SEQ ID NO: 20704 - DNA, 1069 bp, Zea mays
  Clone ID: LIB3245-068-D8_FLI
ttcaaacacactccaaactccaagcctcaataatctcgacctctgtaatgaccaagaagctcatctccatctccaccatggccgggaagcaaggttgcaaggagcagtccaatgatcggaggatccaggcttcgatccaaggagacgccaagagcgtggtggtggggttcggcggcaggctggtcacccgtgagcaggagcaggaggacgccatcatcgtcgcggcgctgcggcacgtggtgtccgggtacagcacgccgccgccggaggtcgtcgtcacggtggcgggcggggaggcgtgcgggacctgcggcatcgacgggtgcctcggctgcgacttcttcggggcgccggagctggcgcaggaggcagtgtcctgcggcacagggcaggtggcgacgacggcgtcggtcgggggcggggcagcggcggcggcgctgaggccccggcggcgtaggaacaggaacatgtaccgcggcgtgcggcagcggccgtggggcaagtgggcggcggagatccgcgacccgcggcgcgcggcgcgcgtgtggctgggcacgttcgacaccgcggaggaggccgccagggcctacgactgcgccgcggtcgagttccgcggcccgcgcgcgaagctcaacttcccgggccacgaggcgctgttccagggccacggcgacaccgcggcggcggcggacaccgagacactgacgccgtcgccgggagagtggcagctgggcggcggagcaggagacgagctgtgggaaggtctacaggacctcatgaagcaggacgaggtggaccgctggctcgcgccggttttcggcgccgcgtctagtttttgagctgttgtactgtgcacacacaagcgtggttactgacaggatcacagctagactgaccaccattcttttgctgtctattgaactagttggttcttttgtagcgtatttttttagggaaacatgattcttttttttttttttgccgtgtgttgattgggatatagagagtttttttcctctcttgatggaagtacttgggaagctatgttgatagactgaacatttttttg

SEQ ID NO: 20705 - DNA, 1268 bp, Zea mays
  Clone ID: LIB3245-068-G10_FLI
catcgatgagcggagcgtgcacggcggcgccgcgctggtcctgcggctgctggtctgcgtcgtcgcggcgcgggctgtctcggccgtcgccgatggtcctctgctgaacggcaacttcgaggacccgccgaaccagtcccagatgagcgggtcggtggtgaccggggagcacgcggtctcctactggaagacgtccggccacatcgagttcatatgctccggccagaagcagggggacatggtcctgacggtgccggacggcgcgcacgcgctgcggctgggcagcggcgcctccatccagcagcagatcagcctcacgcggggcctgtactactccctcacgttcagcgcgtcgcgcacctgctcccaggacgagatgctcaacgtgacggccgcccccgtgtccggctcccctgcccagaccggcgagctccccacccagacggtgtacaccagcagcggctgggactcctactcctgggccttcagggcggatgccggtctcatgtccatcacagtcacccacaactgcggagaagaggaagatcccgcgtgcggccccatcgtcgacgcctttgccatcaagacgctcagccagcctgaggccagccagaataacatgctgaggaacggggacttcgaggagggcccgtacatcccgccggactcgcagtggggagtgctggtgccgccggtggacgaggacgacgtctccccgctgcccgggtggaagatcatggcgtacaagaagtcggtcaagtacatagactcggcgcacttcgcggtgccgagcggcgcgcgcgccgtggagctggtgtccggcgtggagaccgcgctcatgcaggaggtgtacaccaccgtggaagggagctggtacaggctggagttctcggccggggacgccgacgggtgcgcgtcgtcgtatgatgacggctcctcgtccgggatgaaggtgaaggcgtacgcggggacggccgaaacgaccgtggacgtcgatttccgcgacgccggcggttccaagcgcgggaagatcgagttcagggccaccgccagccccaccagggtggtgttcgttagcttgggctaccacaccaagtccgacaacagcggcacgctctgcggtcccgtcgtagacgacgtctcgcttgtccccataccgcagccgtatgctcgccgcctgcttctataaggcctaactcatgctgcgtctgttttttctttttattttttgtagaagtacccatgttgcttgggtaatggagagtgtc

SEQ ID NO: 20706 - DNA, 900 bp, Zea mays
  Clone ID: LIB3245-068-H12_FLI
ggcaagctcctctctcaagtctcggcacctccaactacgcagcaaccaaccatgagcaccagcgatgccgccgcgaccgtgatccccatcgacgacgtgccccgccagcacggcaaggccccggccgtggacacggtcacggcggcgcctcctcctctcgctgcagcagcaccccccgctgcgacgacggcgcctcggaagacgcgggtcccgttcttccggcgcgccgaccgcggcagccggtgcgtggcgctccttgacttggtgctgagggtggcggccttcgggcccgccctcgccgccgccatcgccacgggcacctccgacgagacgctctccgtcttcacccagttcttccagttccacgcccgattcgacgacttcccggcgctcctgttcttcatggtggccaacgcgatcgcggcggggtacctggtgctgtccctccccttctccgccgtcgtcgtcctccgcccccaggccatcggcttgcgccacctcctgctcatctgcgacctgatcatagcggcgctgctgacggccgcggcggcggcggcggcggcgatcgtggacctggcgcactcggggaaccagcgcgctaactgggtgcccatctgcatgcagttccacggcttctgccagcgcaccagcggcgccgtcgtggcatccttcctcgccgtgctcgtcctcctgtttctcgtcatcttggccgccttcaccatcaggaaacgctgctgaactggatagtatgtgatgttgctgtttttgcgtcgtgcaattaataatgcaatgtggtttcagtttgtggttactcgtgtgtaattgtaaagcgtggagtggaattgcctttgtattattcgtggacacctgcttgcggaattttaaattgggcttaacttc

SEQ ID NO: 20707 - DNA, 1197 bp, Zea mays
  Clone ID: LIB3245-069-C9_FLI
tctagtcccagcactactcactcacttccagtctctagagccatcgagatcgtagctgagcgagttagtattcatggcaggaggcacgctgcaggacagatcggaggccgaggacgtgcgcgtgggcgtggaccgtttcccggagcggcagcccatcggcacggcggcggacgacctgggccgcgactacagcgagcccccggcggcgccgctgttcgaggcgtcggagctctcctcgtggtccttctaccgcgccggcatcgccgagttcgtggccacgttcctcttcctctacgtgaccgtgctgacggtgatgggcgtgagcaagtccccctccaagtgcggcaccgtgggcatccagggcatcgcgtgggcgttcggcggcatgatcttcgcgctcgtgtactgcaccgcgggcgtgtcgggcggccacatcaacccggccgtcacgttcggcctcctcctcgcccggaagctgtcgctgacgcgggcggtctactacgtggtgatgcagtgcctgggcgccgtctgcggcgccggcgtcgtgaaggcgttcggcagcgcgctgtacgagtccgcgggcggcggcgccaacgccgtcagccccgggtacaccaagggcgacggcctcggcgccgaggtcgtgggcacgttcgtgctcgtgtacaccgtcttctccgccaccgacgccaagcgcaccgccagggactcccacgtccccgcgctggccccgctgcccatcggcttcgccgtattcctggtgcacctcgccaccatccccatcaccggcaccggcatcaaccccgccaggagcctcggcgccgccatcatctacgacaacccgcacgggtggcacggccactggatcttctgggtgggcccgttcgccggagcggcgcttgcggcggtgtaccaccaggtcgtcctcagggccatccccttcaagtccagcgctcactactagtgttgcttgccttgccgtcatacacggagttctgctgccacatcggccgctcaatggaccatcactccgcgaatgtatgatgtgtgtaactcgaatgtgtggttaattttcgttttcttacgtgtttgcatccacggaatgtgtcatcagtgtacaaatcaactgtatgtggctgtacgtgtcccaattatgataatgctaataaggccataatataccaaggcccatttact

SEQ ID NO: 20708 - DNA, 1083 bp, Zea mays
  Clone ID: LIB3245-069-F10_FLI
gtcgaaaggggaaaaatgagttaaacccaaatcgacaccaaacccactccaggaacacccgcctccgccgccgccgccgccatcgccggcggccactacaagcgcggcgtccggagacagtactgcgctaccaacccctagagcctggattctgatgagccctccatggcctgtcatatctgtcccctcttcaatctccgactcttgctgctgctcggcgcggttctcgggaacggcggcctcggccggggcggcggagcggaggcttcagatcgggcggacccggacccgtactcgatcctgatgtggcacgactactcgccgccgtcgcccccgctcccgcccccggacccgccgtcgccgacggcgacatgtgagggggacctccacgggaagggtgacttccacacgcgctgcgaggtctccgaggaagtggagctggacggcgacgtctacatcacggggaacggcagcctcgtgctcctctctggcgcctccctgacctgcgagaagtacgggtgcgttatatccgccaatttctcaggcgaggtgcgcctcagccgcggcgtccgcgtcacagccggcagggtctcgctggttgccaccaacatcacggtcgccgacacggtcgtcgtgaataccaccgcgctcgctggtgatccgccagaccggaccagtggcgttcccacggggacgcacggcgacggtggcgggcacggtggtcgtggcgccagctgcttcgtcaaggaagggcagacgcaggaggattcatggggcggcgatgcctatgcatggtctgacctcgaacacccctggagctacgggagcaaagggggctcgaccagcgttgagaaggactatggtggtgacggtggtggcatcgtgtggctgtttgctgaggacctggtcatgaatggcacagttctcgccaacggtggggatagcaatgagaagggtggtggtggttctggagggagcatctttataagggctgcatcgatgtgagtgtttgtggaatgattttttgttcttctttctttatgctaagtgaattgagatatgggaatgcaagcttagttaatc

SEQ ID NO: 20709 - DNA, 1726 bp, Zea mays
  Clone ID: LIB3245-069-H5_FLI
ggtcacagagacgaccagctgaagcgaacacagagctgctcgccgtgtaacgcagcaggcagcagcacccagaggcggcaggtcatacacacagcacacgcagatcttcgatcaccaccatgggttctctcggcagcgccgcgcagcagcagcagcaaccgcacgccgtgtgcctgccgtacccagcgcagggccacatcaccccgatgctcaacgtggcgaagctgctgcacgcccggggcttccacgtcaccttcgtcaacaccgagtacaaccaggcgcgcctcgtccggacccgcggggcggcggccgtggccggcctcccgggcttccgcttcgccaccatccccgacggcctgccgccgtcggaggacgacgacgtcacgcaggacatcccctcgctgtgcaagtccaccacggagacctgcctcggtcccttccgccgcctgctcgcggacctcagcgacccgcccgtcacctgcgtcgtctccgacgtcgtcatgggcttctccatcgacgccaccaaggagctcggccttccctacgtccagctctggaccgccagcaccatcagcttcctcggctaccgccactaccacctcctcaagagccgtggcctcgctccgctcaaaagtgtggagcagctgacgaacggattccttgacacggcggtggaggacgtgccggggctgcggaacatgaggttccgggacttcccgagcttcatccgctccacggatccggacgagtacatggtgggctacgtcctacaggagacggggcgctcggcgggcgcgtcggccgtgatcctcaacaccttcgacgagctggagggcgaggcggtggcggccatgcgctcgctcggcctggcgcgcaaggtgtacacgctgggcccgctcccgctgctggcgcgcgaggacccgcccaccccgcgctccgccatcagcctcagcctgtggaaggaggaggaggagtgcctgcggtggctcgacggcagggaccccggctccgtcgtctacgtcaacttcggcagcatcaccgtgatgaccagcgaccagctggtggagttcgcgtgggggctggccaacagcggcaggccgttcctgtggatcatccggcgcgacctcgtcaggggcgacactgccgtgctgccgccggagttcctgtccgagacggccggccgcgggctcatggccacctggtgcccgcagcaggcggtgctggaccacccggccgtggccgcgttcctcacgcacagcggatggaactccacgctggaggccatgtgcggcggcgtcccggtcatcagctggcccttcttcgccgaccagcagaccaactgccgctaccagtgcaacgagtggggcgtcgggatggagatcgacagcaacgtccggcgcgacgccgtggcgagcctcatcgctgagctcatggagggggagcaggggaaggagatgaggagaagggcactggaatggagggacaaggccatcgaggtggccaagcccggaggcacgtctcaccggaatttcgatgacctggttcgcaatgtgctcctgccaaagaactaggcaacttagctctatatttgcagtttgcacggtgcttctgccagtgccgtgtgattttgttcctttgttttggagggagatggacaggtcagtgtcgttgtgtaaacaataaaaatacatgcatacgagcgtccaattgatgatgggcaagtctg

SEQ ID NO: 20710 - DNA, 754 bp, Zea mays
  Clone ID: LIB3245-069-H8_FLI
gcttgctcatcatcatcatggaagctcctccaaacaacccaccgagccacagaacagcgaagctagcaggaaggagaagcctgcctgcaagaagaaccctctcgtaaaaatcaacatggacgggatccccatcggaaggaaagtagaccttgcagcctacgacagctacgagaggctatcactgggcgtcaaagagcttttccacggttttcttcaagctcaaaaggatatgtctccaactgctggaaagatattctctcaattgttggatggatctggcgaatataccctggtctacgaagacaacgaaggagacaggatgctggtaggggacgtgccgtggaatgtgtttgtgtcaactgctaaaaggctgagggttttgaggagctcggagcttgccaaaggtttggtaggcacaaggccacctcagattgcggtagctccgagaagaggaccaccagattgctgaaagcctgaaacagcgacaaaattctgatcatttggaatgtgagcaagcaaactgaacccggaccttttgtgatgtgacggtacttttttctttttgcctgtagaaactaatctagtgagatgaactgccatttcagatgcatgccgaggtcctggatattttgtaaattaggctaccaataccatgcgactcgttgctgtagagtaataatgtcctgatgtaattcaacatgggcattaattggacttataagagaaatttcgcagatgcaagatctaccaatgt

SEQ ID NO: 20711 - DNA, 933 bp, Zea mays; identical to SEQ ID NO: 3238
  Clone ID: LIB3245-070-A2_FLI

SEQ ID NO: 20712 - DNA, 921 bp, Zea mays
  Clone ID: LIB3245-070-F9_FLI
gatcgcggtcgatcgagcgcacaagctgtcaaaaaaaatctgaacacaagcagggccgggttcgcaggcgcgcgtcgccgttgacagcaactagcatatatagctagagctagctcgatcgatctgctgtgcttacaccaccagtccaccgcttctcttgctttgccggtgtcgtcggccagcgcgcgcgctagcgctatccgatccgatccggccggccggcgacctaccgatggggttcatggacgccgaggagctggtggtgacgctggcgccggtggccgtgtactgggcgtacgcgggcatgtacgaggcgctgctggcgcgcaccacggcgctggacaagtacaggctgcactcgaggcgggacgaggagaccaagaacatcgcctcccggaaggacgtcgtcagaggggtgctcctgcagcagtgtatccaggtcgccatctccgtcgccgtcctcaagctggaaggacacggacacggacacggacacggacacggtgccgctgccgacggtctcgccgcggcgccggcggaggcggagccgttcctggtgtcggcggcgcggttcggcgtggcgatgctggtgctggacgcgtggcagtacttcatgcacaggctcatgcactccgtcccgtacatgtaccggcggttccactcgtggcaccaccgcgtggcggcgccctacgcgtacgcggcgcagtacggccaccccgtggacgccgtgctcacggagacgctgtcgggcgccgcggcctacctggcctccggcatgtccccgcgcgtcgccgcggccttcttcgtcttcgccaccgtcaagggcgtcgacgaccactgcggcgtcgccgcgccgtggaacccgttccacgccgcgttccgcaacaacaccgcctaccacgacgtgcaccaccagcgcgg

SEQ ID NO: 20713 - DNA, 1075 bp, Zea mays
  Clone ID: LIB3245-071-A9_FLI
cccacgcgcgcgcatacgtgtcgttgtctcgagcttcttcgtcaaggtgctccagctgccatggcgctgggggatgaagtacttctgggacaccttgctggatgctgaccttgagagcgacgcactaggctggcagtacatttctgggtctctccctgatggccgtgagcttgaccgcatcgacaaccctcagtttgaagggtacaagtttgatccgcacggggagtacgtccggcgatggctaccggagctggcaaggctgccaacggaatggatacaccatccctgggatgcacctgagtctgtgcttcaggctgcaggggttgagctaggatctaactacccacgccccattgtcgagttagatgcagccaattccaggttgcaggatgccctgtcagagatgtgggagcttgaggcagcctctcgtgctgccatggagaatggaatggaagaaggcctcggcgactccacggatgagcggccaatcgacttccctcaagaactacggatggaagtggaccgacagccggttcaacctgctatccacgcacagggagtgactggtcggagacgagaggatcagatggtgcctagcatgacttcctcgttcattagagctgagaccgaactcactgcagattttggccacaccagtgaggacagtaggccagaagtgccatcaaacatccaccatttgcaggctcgcccggagagggaagagacagttgacggtggcactggcaatgctgtcagggtgcatggcaaccatcaccagcagaaccttcagaacaacatccaccgcgtgctaggtatcgctccatcgatttcagaggcatcaagcagttggacgggcagggatggtggagtggtaccagtctggtcgcctccggcagcgtcgggaaactctgatccttatgctgccgatgaggctgacatttccagtaggggttatctggacaggcatccacagtcacatacgatgatgaactggagccagctctctcagtcattgtgagttcagttgcacggtaacttgttttttttcacagagaaatgcattgtcataaattgg

SEQ ID NO: 20714 - DNA, 2393 bp, Zea mays
  Clone ID: LIB3245-071-H9_FLI
cttctcttgatcgaggcagggatcaagcgaccgagacccgccatggaccttgcacggagcggcggtgccgctgccgcggacgacgggggggagatcgagaggcacgagccggcgcccgaggacatggagtccgaccccgcggcggcgcgcgagaaggagctggagctggagcgggtgcagccgtggcgggagcaggtgaccctgcgcggcgtggtggcggcgctgctgatcggcttcatgtacagcgtgatcgtgatgaagatcgcgctgaccacggggctggtgcccacgctgaacgtctccgcggcgctgatggcgttcctggcgctccgcgggtggacgcgcgtgctggagcgcctcggcgtggcgcaccgccccttcacgcgccaggagaactgcgtcatcgagacctgcgccgtcgcgtgctacaccatcgcgttcggtggtgggttcggctccacgctgctgggcctggacaagaagacgtacgagctggccggggcctcgccggccaacgtcccgggcagctacaaggaccctgggttcggctggatggccgggttcgtcgcggcgatcagcttcgccggcctcctaagcctgatccccctcagaaaggttctggtcattgactacaagctaacttacccaagcgggactgcgaccgctgttcttataaacgggttccacaccaagcaaggagacaagaacgcaaggatgcaagtccgagggttcctcaagtactttgggctcagcttcgtgtggagctttttccagtggttctacacaggcggtgaagtttgcggctttgttcagtttcctacgttcggtctgaaggcctggaagcagacgttcttctttgattttagcctcacgtacgttggtgcggggatgatctgttcgcacctcgtgaacatctccaccctccttggtgccatcctgtcgtgggggatactgtggccactcatcagcaagcagaaaggggagtggtaccctgcgaacatacctgagagtagcatgaaaagcttatacggttacaaggcattcctctgcatagctctgatcatgggagacggtacataccacttctttaaagtcttcggtgtcactgttaagagtctgcatcaacggctgagccgcaaacgtgctaccaacagagtggcaaacggtggagacgaaatggccgcgcttgacgacctacagcgtgacgagatcttcagcgacgggtctttccccgcctgggcagcttacgccgggtacgccgcgctgaccgtcgtctcagcggtcatcatcccgcacatgttccggcaggtcaagtggtactacgtgatcgtggcctacgtcctcgcccctctcctcggcttcgccaactcctacggcacggggctcaccgacatcaacatggcctacaactacggcaagatcgcgctcttcatcttcgcggcctgggccggcagggacaacggcgtcatcgcgggcctcgccggcggcaccctggtgaagcagctggtgatggcgtccgcggacctgatgcacgacttcaagacgggccacctgaccatgacgtcgcccaggtccctgctcgtggcgcagttcatcgggacggccatgggctgcgtcgtcgcgcccctcacgttcctgctcttctacaacgcgttcgacatcgggaaccccaccgggtactggaaggcgccgtacggcctcatctaccgcaacatggcgatcctcggcgtggagggcttctccgtgctgcccaggcactgcctcgcgctctccgctgggttcttcgcgttcgccttcgtcttcagcgtcgcccgggacgtcctgccgcggaagtacgccaggttcgtgcccctgcccatggccatggccgtgccgttcctcgtgggcgggagcttcgcgatcgatatgtgcgtcgggagcctggccgtctttgtctgggagaaggtgaacaggaaggaggccgtgttcatggtgcctgcggttgcgtccggtttgatctgtggagacggcatatggaccttcccgtcttccattctcgctctggccaagatcaagccaccgatttgcatgaagttcactcctggaagctagaaacagtattgacagttcacagaaatggagaatgcgagatacactgaaggcatcaactgtggttggttgaagtgttgaagagcaagtcctctggtcgtcgacatgaagcggagccatatgtcccctgtattatccttgttgtgcatgtgtgggttctccaagggctacagcactcgagattttctatagagttgatcatatgttttgttgtcatgttgggttcaacctatgtttatgttttgggtggaaaaaagatacaactgtacatttttaacagaaattaatgctcattttggttgtgt

SEQ ID NO: 20715 - DNA, 1432 bp, Zea mays
  Clone ID: LIB3245-072-F6_FLI
caggcctgccagccagccgcctttcgaaaccgagcaccagggagcagacgcggtctctggaacccaggttccagcgagcaaaccatctaaccaggcgctgagaattctgtgcggaggaggcggatggcaatggtggcggcggcggaggggagcgggcgcagggacgccgaggcggagctcaacctgccgccagggttccggttccacccaacggatgaggagctcgtggtgtactatctctgcaggaaggtagcgcggcagcaggtgcccgtgcccatcatcgcggaagtggatctttacaagttcgatccgtgggatctgcccgagaaggcgttgtttggtcgcaaggagtggtacttctttacgccgcgggaccgcaagtacccaaacggctcgcgccccaaccgcactgccggaaaggggtactggaaggcgactggggccgacaagtcgatcgtgcccatgggcagcaccagggcggcggggatcaagaaggcgctggtgttctactctggcaaggcgcccaggggcgtcaagacggactggattatgcatgagtaccgcgtcgctcaagcggaccacaccctggggaagaagggctcacagaagctggacgagtgggtgttgtgccggctgtataacaagagaaacaattgggacaaggtgaaggtcgaggagcaggagttggaggcggcgccgcgccgacagcatcacttgcagagcgcggaggattccatgtctaacagtttccagacgcacgactcggacatcgacaacgtcttcgagctacaaaattgctacggtaacaacatggtgcaagggcaggccatgacccccaggaacgacattggcgtcgtgacggtgaaggaggacaacgactggttcaccgacatgaatctggatgatttgcaggcatcctacaacatggcccatacggtgaatccgaacccggcccaaaccgcgaacctggtggcagggcaaggccatggctacttgcaaggctatggctacttgcagtacatgaactcaccgtcgatgaagatgtggcagacaatcttgcctccgttctgagtgtccacgatgaagatgagtgtccacgatgaagagatgctcttgtacataaggggacataggagtgactagactggaatagaaacaacagggtatgattctgtatctataggcttgtaacgtttattcattcgttagataatacgtatgtggttggtaataccaaaaaaatgcatctccctttgcactacttgaagaaagcacaaagttgtagttctcgtatctcatatggtcggtctaaatcgattctgatcttcatgtgatgtgatatatattatatgttcgcacatttatttaaagatgatgaaatggtaggggtaacattcagtggacggatataaataaaaccatgtgattctac

SEQ ID NO: 20716 - DNA, 2095 bp, Zea mays
  Clone ID: LIB3245-074-A11_FLI
ccctaaccggctaaacctgagacaggcatcccgagtgcaccgtcggccgcaccagcaggcagcatcccgccgccgccgttccccagcaggcagcagcaggtcgccgccgttccccagcaggcagcaacaggttgccagctcgcccccgcgttttgcttccggtcagctgatgtcgcatgcttttcggcagcgctagtcctcgacggacggcgaccagcatcagccgccgccccagtcgaccaacatccacggcggcacgagcccacgaccagcagatcaacgcggtggcagatcaacgagcccacgaccagtcagaaaatttttacagcagcatatccagcggatacccgatacccgacgggtacccggtgggcacgggttatactcaaactgcacacagtaaattttgctaggagtacactgggtcaaaatctggttgtctctagagcgagcgacaccaatctttggtgttggccctttcgtcagtgagtagcatccttctggtacagtaacaaaggatttggaacccagccctctgttctccaccaccgcttcgaagatgccgcaggtaatggtggtggcacggaacttcatggatatggtggctgctcttcctgcgggcaagcttgatatgctctatgactcagcctttatctgtgaggcagtactcaggtcacttcccccactggcaaagaagtatgcactgcagatgttgtatgtgctggcaccagtgaccgctgcagcaatggaagagtgggtgcttgatgaatatgctgccaagcataaggttgccattgataagcttctacagctcagggtctttgttgaagtgcgcgacagacgacgggacgtgagctacaagatgaatcagaagttccagggaaacatgcagaagtatttggttgatggtggaagtttaccaagggaacctttaccattaagtgtcactggtcgattgcccacaccagcagatctggaagcctatgctcttgatcaatgggagtgcttcttgttgcaattgatcaattcatctcaagtcgaaaaagggtcaagttttagctcctccatgatgaagacgtttcagcgtggtcttctgagttcaagggatggtgaagcttcaaagttgactgaaaatggcttccaatttcttctgatggaaacaaatgcacaactttggtacataatgagagaatacatttcatctgctgaggaacgtggagtggaccctacggagctgatatcatttctcttggaacttagctttcataaattgggagcggcttatagcgtgaacactctgactgatgtccagaggattgccatcagggatcttgcagaattaggactagtcaaacagcagcagggtcgaaaggatagctggttcattcctacccaattggctactaatctctcagcaagcttgtcagattcgtcatctaacaaagagggatttgtggttgtggagacaaactttcgaatgtatgcatactctacttccaagttgcactgtgaaattctacgcctttttgcaagggtggagtatcaacttccaaacctcatcgtaggagctgttacaaaagaaagtatctatggtgcttttgaaaatggaataactgctgagcagataatttcatttcttaggcaaaatgctcaccctcgtgttgctgacaagatacccgctgtcccggagaatgtcacagatcagattaggttgtgggaaactgacctcaacagggttgagatgattccatcgcatttgtacgaagattttcctagcaaggaatggtttgaacaatgctgtgattatgcaagggataatgggtacttgctgtgggaggaccccaagagaatgagactaattgtacgaggggagttccaccctgaaatgagggagttccttcgcaggcaaagatgaggaacgaccttgtacttgacggaccatgctatgcttctttgtagtgcatagaaacactgtatcgggtaatagttctcctttaaatatcaggaaagggtctagaaaagggctcagtttttgaattattttggtgacctgtgagctgtgaaagcatatgaataatgtggtgttcaatggagc

SEQ ID NO: 20717 - DNA, 1242 bp, Zea mays
  Clone ID: LIB3245-075-A3_FLI
gacaatagaagtagatggaggcaaaatatcagtcaaattttctctgctaccaccaccacggcaccgcaccaccggcggctgtagactgtagcacgagagagaaatctgtagcccagcagctcgtcaggcatggcagccgtcgtggcgctgactccggcctatccagcgttcctccatgtccccttccgcgtccgccgcgacggccgggtgcgcctctcgccccgccgcccccgctactccgcggggcgctgcagagccatggcccagaccttccaggggggcgccgctgccagctacgcccgcgagatggagcgcctctccgccaaggagtccctgctcctcgcctttaaagatgctgggggtttcgatgccttagtcagcgggaagaccactgagatgcagaggatcgatgtcaatgagcgaattgttggacttgagcgcttgaatccgacaccacgccccacaacatcgccgtttctggagggccgatggaattttgaatggtttggtgatagcagtccgggagcatttgcggcccgccttttgtttgagaggtcgcctacatcggttgcacactttatgggacttgatgtgttgatcaaggatggatactccaagctctcatctaacctcaagtttctaaacatgatacaaagcaaattcctactgactactcaattgtccgttgagggccccatcaggatgaaagaggaatatgttgagggccttatagcgattcccagaatcaatgaagaatcattgcctgaacagttgaagggcttgcttggccaaactgcaggagctctacaacaacttcctagccctataagggaagctgtttcggaggggcttaaattgccactcggtggggcatttcaacgattattcatgatctcttacttggatgaagaaatattgattatcagggacgctgctggagcaccagatgtcttaaccagactagaggggccacaaccgagtccaggtgatggcacagcagatgcagtgatatcagaatatgaaagctaatggctgattactaactgtaactccacacctagttcctgtttacggctcctttcttctctttggtcgtttttcttaggcctgcgcatgtataaaggctgtagtgttgtcaacgataacgaccacttgaatcatccctttcggcggctattctgattttctgaatgctagcaataatatcagatgaccatcatcattctttatatgaatcaatgt

SEQ ID NO: 20718 - DNA, 322 bp, Zea mays
  Clone ID: LIB3245-075-G6_FLI
gccgccagcaacccccctcccgctccccgcaaaaccctagcgctctctacctctgtctccctctgttcgtcggcgatggcggcggcggggggcgaggaggaggccggcgagagccggaagcttttcgtgggcgggatcccggccggggcgcaggagcccgagctgcgagcccacttttcgcgctttggggaggtgcgctctgtcatcgtgatgcgcgaccgagagacgggccacggccgggggttcggtttcgtcgagtttgaggacgaggctgccgctggcaccgcgctcggcgacggggagaagctcaagcacttcctct

SEQ ID NO: 20719 - DNA, 159 bp, Zea mays
  Clone ID: LIB3245-075-G8_FLI
caaaaaaaaaatttgtagggtgtgttattacaatctggtcgttgtccatcataccacgaaaggaagtattcctagggttgttgttgtaaacaggaggatttgggaaagatgatctgtgttgtctcccatttgcttgaagataagaggctagttcttttt

SEQ ID NO: 20720 - DNA, 950 bp, Zea mays
  Clone ID: LIB3245-079-B2_FLI
cttctacctcaagatgaagggtgactaccacaggtaccttgctgagttcaagtcaggtgcagagaggaaggatgctgcggagagcaccatgaatgcctacaaagctgctcaggtttgaccattgtgttcatactgataggatgacagtgcatatattgttaattgtggttctttcttgttggcttttggtttgtaggatattgctcttgctgatctggctccaacccaccccatcaggctcgggcttgctctcaacttctcagtgttctactacgagatcctcaactcccctgaccgtgcttgcaaccttgcaaagcaggcctttgatgaggcaatctccgagctagacagcctgggagaggagtcctacaaggacagcactctgatcatgcagctcctgcgtgacaacttgaccttatggacttccgacaccaacgaggacggcggggatgagatcaaggaagcagctgctgcccccaaagaatccgcccccgagggccagtaagacggatccgatctcccgacctgatgcgtgtctgctgatgtcggggagtttaccaggactgtgccgttcttgatttctgatagcttatcttctagtacacctcgtgttgttctcttcgtcacggcgccggtgcgcgtgcgctgaagctgcctgccattgccattgcctttgccgctgtttttaattaagcacacactctagatgttatgcccgcatgctatgtttcgattctcaagttgataaatgatggctggatgctggttttcgtgctccaagcctgctgcttcttccagggaaaaaaagacctgcccttgttgcagcgttgttgtttagaatgacctatatttgactggtattctgttacggtggctttgcaaagctgtttgtttggtttaatgtctcggaataatatgaattggctgcattggacgtgtgtgtttctttt

SEQ ID NO: 20721 - DNA, 1001 bp, Zea mays; identical to SEQ ID NO: 1272
  Clone ID: LIB3245-080-A10_FLI

SEQ ID NO: 20722 - DNA, 1437 bp, Zea mays
  Clone ID: LIB3245-080-A5_FLI
caccggcacacggctcctccaggatcgagagctgtagctgcaacctgcagcagacgcatatgtccgtcgccgccgccgccgccttgggccgcgccgatgagctccgcgcgctggacgacaccctcgccggcgtccgcggccttgtacgtctggtgcgaagcaagttcctcacatctttcgcgtcccctacccggaggagctactccaacatgaacaaccgccagcggcggcgaccgtcccggtgatcgatctcagcggcgaccgcgcagccgtgatcgacgccgtccgtggggcggcggcggggtgggggttcttccaggtcacgggccacgcggtgcccgagcaggtgatgtcagcagccgtggcggcgatgcgggcgttccacgaagccgacggcggggagggcagcgacaaggcgcggctctactcgcgagagcccgggagggcggtcaagtaccactgcaacttcgacctgtaccagtctcccgtggccaactggcgcgacacggtctacctgcggatggcacctgaccctcccgccgccgacgagctgccggagatctgccgcttaacaaacaaggtcgcgtcatctacatacatcgagatccttatagtgggcgagcgactcccaatttgctcgagatgcactgtttgaatacgccaaacaagtgaaagatttggggcacaggttgtttgggctgctctccgaatccctcgggctcaacccgagctacttgacagatattgagtgcgaccagggacagattatacttgggcactactaccctccatgcccccagcctgaactcgccattgggacaagccggcattcagactccggcttcctgaccatactactgcaggacaaagttggcggcctccagatcctccatgatggtcagtgggtcgacgttgcaccgacgcctggagcattcatcgtcaacataggggatctcttgcagctggtctctaacgacaagttcagcagcgtcgagcacagggtggtagccaagaatgctgaagcaagagtttcgatcgcgtgctttttcagcacccatttccatcccgcttcgacaagaatgtatggcccaatcaaggagctgctgtccgaggagaaccctcctttgtatagggaaacactcgtgagagagtatgttgcacgttactactctgttggcttggatggaaaacagaagactgctctagctgatttcaggttgtgaattctgaacgacatcttatttaacagcaagatgcaaatgttggggcggtatgtatcgtgtgataataccaaggggaagattagctgcttgtaacattccctaattaatgtaaatttatgatcgatcgccacaacagaagtacacatgtttgtataagcctgaatttgaattgagtttggagtttggactctggacgtatattactgaaacacat

SEQ ID NO: 20723 - DNA, 1332 bp, Zea mays
  Clone ID: LIB3245-080-B2_FLI
cagtgagcgccacctatgtgaccgcgttttcgacggcctcgcccccttcggcgatctcgccttcatcgccgccgtgcgtacccaggctctgcagctcatatcgttcggtgacgctatctcttcctcaagccgctcgccggagcgcctcttccgcgtcgttgacatgtacgaggctgtgcgtgacattctccctgaccttgatcctgtgttctctgacccatactctgctgcactccatgcggaggtctccgccatgtgcaacacactggggtcctctatcaaaggtatatttatggagttggaaaatctcatccgccgtgaccctgcccgagttgctgcccaaggtggtgccatacatcctatcactcggtatgttatgaactatctccgtgctgcgtgtgggtcgcggcagacattggaagaggtgatggaaggtgactttggtgttaatagaggtgcgcctgtggctgttgaccctgatcgccccacatcatcccttgctgtgcacatcgcatggatcatggatgttcttcaaaagaatttggatacaaagtctaggatataccgtgatccatctcttgcttctatcttcttgatgaataatggcaagtacatcatacagaaggtgaatgacagtgagttgggtgtttttctcggtaatgagtggatcaagcagatgacaactaaagttcgccgatggagcatggattatcagcggacaacatggggcaaggttacaactgtgctgcagactggtagtccaggcattggtggactcccagctaaggcaatgctgcagaaaatgcgaatgtttaatacgtactttgaggagatctacgcagcgcagtcagaatgggtgatagcagatgaccagctaagggtggacattagggcagcagtggaggagacagtgatgccagtttacgcctctttaattgccaagttgaagtcttctcctgaaactgggcgggatttgtacatcaaatatactccagaggatgttgtagcccatatccagcacttgtttgaaggagctgcaaagtgataaaggatatgtagccttgtagcctgctatactgcagcttctgctcttctgaacttgtgaagatgctgtcatggattctccattcgtggttaatttcttgtattcacgtaaggtgatgctgttgtctcaatttacaactgtgcattgctgtttttgtcatccatgaggaagttatgcagttcggcaaatgttgtatatgtgtgtaggtgtatctgtatcaatgaatagcatgattattttgtaacagtattaggattccatctctgtttcaagcactactttaattt

SEQ ID NO: 20724 - DNA, 1230 bp, Zea mays
  Clone ID: LIB3245-084-E10_FLI
cgccgaataaatctcaccggtcgcgcttcttggcgtgttcctccgctcgcctgggcttcgatctccagccctcgcgtgagcgcgggtgccgccgcggcgccgtggtcatggcgacggaggagtgggagctgcgggaggaggacgcctacgcctacgagttcgagttcgaccttgagaaccccttcaccagccccgccgacgagccgatcgccagtctcctcgacgccgagggccaccacgcgccctctatctccgccgcggcctcggccacccgccgcgccgccgccgccttcatctccaaggtgcgtttcggcggcgagctcgccgtgcacccgcgcgtcgcctacctcgcgctcaactacgtggatcgcttcctctccaagaggcaattggcgtgcgagcagcagccgtgggcgccgcgcctgcttgccatcagctgcctctccctcgccgccaagatgcagcgcgtcgcaacattctccaccgccgacatccagagggacgaagacttcatgttcgacgcggtgaccatccgtcggatggagcgcgtggtgcttggcgcgcttgagtggcgcgcgcgctccgtcacgccgctcgccttcctcggcttcttcctctccgcgtgctatccgccgccgcagcaccccccacaggtagccgctgtcaaggcgcgcgccgtcgacctccttctccacgctcagcctgaggtgaagatggcggagttctcaccctccgtggtggcggcggcagcgctgctgtccgccgccggagaggtcgccgccgcgaacctccacgcgttccaagccagcttggccgcctgtccctttgtaaatagcgagaagctgcgggagtgcggtgaggtgctggcagcggcgggcggcgtcgggcgggggcgagccgctccgagcgcggacacgcctgtacggtgctcggtcaccagcgcagcgccagctccgcctcggagaccgactggattaacggcggcgacgcgaagaaacgctgcatgggcccaccatcgcaatgggggtaggcggcaggccgagtcaagcgggtattgtcgcagctggatcgaagagtcggagattttactgcagccctgctcctttttttccaaattgtttttaccctttttcttttcccaattctttccttctactttaatgctctcgaggtaaagtgacgaggagtggtggtggtggctgtcatttactagtgttcctttttcctagc

SEQ ID NO: 20725 - DNA, 1131 bp, Zea mays
  Clone ID: LIB3245-085-E9_FLI
gtgccagcctgccaggccagccaccaacctcctcctcttccgcatcgcatcgagagcggggctgtaccgtgcgagactctactgctcgatcgccatggccgccgcgctcaggtgcccggcatccgtcagggtctcgggccccgccgccgcggggctcgccaaggtgcgccaggcgtccagagtcgtagcggtgagcggggcccggcagagccgcggcggcggcgtcgccgtgcgggcgtcgctgttctcgcccaagcccgcggcggccaaggacgcgcggccgaccaaggtgcaggagctgtacgtgtacgagatcaacgagcgggaccgcgagagccccgcgtacctgcgcctcagcgccaagcagacggagaacgcgctgggcgacctcgtccccttcaccaacaaggtgtacaacggcagcctggacaagcggctgggcgtcaccgcgggcatctgcgtgctcatccagcacgtccccgaccgcaacggcgaccgctacgaggccatctacagcttctacttcggagactacggccacatctcggtgcagggcccgtacctgacctacgaggagtcgtacctggcggtcaccggcggctccggtgtcttcgagggcgtctacggccaggtcaagctcaaccagatcgtcttccccttcaagatcttctacaccttctacctccggggcatcccggacctgcccagggacctgctctgcacgcccgtcccgccgtcgcccaccgtcgagcccacccccgccgccagggccgccgagccgcacgcatccctcgacaactacaccaactgaactgatgattgatgaatccattatcatccatctctgctctgtctgtcgcggctgtcagaacttgacgagacaagctcccctgctactcatcagtactcctcactcgtagccgtagtttggctactcttatgtgtgtatggctggtttcttcaattcgtgagtgcgtggtagtaccaataagcaataagacgcagagggatcgatcaagctgtgtgcttcacttggctgcttctgattacaattgatcaatggtaacgtaaacggtaaagctctgtttagtgtttagatgtgtttaaacggagttaaatggttttagcatc

SEQ ID NO: 20726 - DNA, 2379 bp, Zea mays
  Clone ID: LIB3245-086-B11_FLI
aaaaacagcatcagggcggtagcgtaatttccctggccggttgcggccgacgacctcttcgagagaacgaacgattcttcctcccgtttgcttcccctgcccgcactctgcctcgtcaatctcgctccgcgtcccgcttccgctgttgctttcgtcgccatctcgctccggtccccgccgctgctccaagtgggagccaagtcatctctctggccgaagatccaggttgagtcggcgtcgccggcagaggcaagagactccggcgcgatgtcgttggactcggaggcttcctcgcagggtggggactaccgtagcttccgccagatcacgcgagatcgtttattatttgaaatgctcagatcaactaggaagaattcgaaatcaacatggaaggttcttatcatggataagtttacagtcaagattatgtcatatgcatgtaagatggcagatattacagaagaaggtgtttcattggtcgaagatttatataaacggaggcaaccattgccttcactggatgccatatatttcatccaaccaactaaagagaacattgtcatgttcctatccgacatgtcaggaagaagccctttgtacaagaaggcatatgtgtttttcagttctcccgtacataaagaattagttgctcaaataaaaaaggattcaagtgtactacctcgtattgccgcacttagtgagatgaatttggagtactttgctattgattcccagggtttcataactgaccatgagagggcattggaagaactttttagtgaaaatgcagaaggatctcacaagtataatgcttgtctgaacacaatggctactcgtatatccacagtatttgcatcaatgagggaattccctcgtgtacactaccgtattgccaagacgattgatgcttctacaatgacaacactacgagacttagtccccacaaagcttgctgccagtgtatggaattgtcttgcgaaatataaaacgacaatacctgaatttcctcaaacagaaacttgtgagctacttatagtagaccgttcaatagatcagattgcaccaattattcatgaatggacttatgatgctatgtgtcatgatctgctttgtatggatggcaacaagtatgttcatgaggttccaactaaaaatgggtcggcaactgaaaaaaaggaggtcctgttggaggatcatgaccctgtctggcttgagcttaggcatgcacatatagctgatgcaagtgagaggctacatgataagatgaccaacttcatttcaaagaacaaagctgcacaattgcatcaagcacgaaccgatggagaattatcgacaagagatttacaaaaaatggttcaggctcttccacagtacagtgatcaaattgataagctttccctgcatgttgagattgcaggaaaactcaataacataataagggaacaatgtcttcgggatgttggacagctagagcaagatcttgtgtttggcgatgctggaaccaaagaactaatcaactttttgagaacacaattggttgtaagtcgtgaaaataaattacgcttgctgatgatttatgcagcacttaacccagagaagtttgaaagcgacaagggtgcaaaattaatgcagttggcaggattatctgctgatgacatgattgctgtaaataatatgcgttgcttatgtgggcctgataccaaaaagtcttcagtagggggttttacactgaaatttgatgttcacaagaagaaacacacaaatcgaaaagagcgaacaggggaagaatcaacatgggcactctctcgattttaccctattttggagcaattgattgaaaatcttagcaaaggtgagctgccaaaagatgaatataactgtatgaatgaccctagtcctactgttcatggactgccaaccagtagctctgcccgaacaagccccgctcactcaatgcgatccagacgaacaggtggcacatgggcaagacctcgtggctctgatgatggatattcaagtgattctgtgttgaagcatgcctccagtgacttcaggaaacttggtcagcgtatatttgtttttgtaataggcggtgctactcgatcagagttacgtgctgcacacaagctttcatccaagctgaagcgagacatcatccttggttcatctagccttgatgatcctccccagttcatcacaaaattaaagttgatgtcagtagaagaattgacacttgatgaccttcagctgtaaatggtgtccgcccacacggagtgtaaccttttattttctctgttctgtcagctcttatttgtgggggcctgtcatattcattcggtgaaatgcattcttaataccacttttactggtgaatgtaag

SEQ ID NO: 20727 - DNA, 1705 bp, Zea mays
  Clone ID: LIB3245-087-G1_FLI
gcagcaatcaaccgtcgtcttcttcctcgacgcctcataggctcatagggttctccaaattctaaatcgttgcaagcgaaaccaccaaaactgtactcacaaccctcgtctgcgctgcgccaccactcccccgtggcggcttgtagttgtagaagttcccggaaccagacaacccctaggcgctgagttttctgatagcggcttcggatatctcgtcgtgggcggccatggcgggcccgtgctgagtgcggggcgggagcaggtgaaggtctccgagctcgagatctcgatgcagattcgggagggcccggcgcggcggcaggcgccgtccgccgctggggcgctgcggtcgcccatgtccgccatgatgctcgctatgttcgctactatggcctccttctacgtcgccggtcgattgtggcaggatgctcagaaccgacttcatctcattaaggagctcgacagacgaacaggccaggggcaatcagcaatatctgtggatgataccttgaaggttgttgcatgcaggcagcaagggaagcggttggcatcacttgagatggagctggctgcagcaaagcataaaggttttgttggcaaatatactcctgagacaaatggaactcattctgggaaaaagccactgattgttattggaataatgagtagctttgggaggaaaaactaccgtgatgctgtcaggaaatcatggcttccaacaggttcaatgctgaagaaactagaagaagaaaaaggcattgtagtacgttttgttgttggaagaagtgcaaatcgaggtgatactttcgatagggagattgatgacgaaaataggagcaccaaggatttcttgatattggatgatcatatagaatctgatgaagagcttcctaagaagacaaaaagtttctttgctaatgcagcagaaacattcaatgctgcattttatgctaaggtcaatgatgatatatacataaatgtcgatactttgagtgcaatgctcgaaactcactgggacaggcctcgtgtctatataggttgcatgaaatcgggcgaggttttctctgacttaacccacaagtggtacgaatcagactggtggaaatttggtgatgggaaatcgtactttcgacacgcttctggtgaaatgtttgtcatatccagggccatagctcagttcatttctataaacaagtccgctctccggacatatgcccatgatgatgttagtgttggatcgtggatgattggccttgccgtgaatcatgtaaatgaagcaaaactgtgctgttcatcgtggccctcaggtgcgttatgttcagcgctataacgagcaacaatgcttaatgaggaagagttttgcaaacactgtgcctgttggatcgaatcggtattgggaaaattttgttttcttctgccatcttgtgtagtcctttggaggaggcttgtacgagccagttcatactgattactggatcggatatcttgtttttcttttccaaaggaaaggtcttgcatattttctttgcaaggccactacactagaatcatgagttctgacgaaaagccctctgcagattgtatcctgttccgcgtgccatttgtagatgccccaccctttaccattctttttttctgacagacactgccattgttggagtgacagaaatcaatagcaattcgggagattactttgctccagaat

SEQ ID NO: 20728 - DNA, 658 bp, Zea mays
  Clone ID: LIB3245-087-H6_FLI
ggcaattctccaggctccagcagtccaccaccatggcattgcgtgccatgagaccgctgctgcctgctgccaccttcgtcatggttgcaatggcctcctggggagcgcacggcggtgccagcgatgatgccagttctctacttgccttcaaggcagagctcgctggcagcggctccggtgtgctggcctcctggaacggcacagccggcgtctgcagatgggaaggcgtggcgtgcagcggcggcggccaggtggtgtcgctgagcctgccctcctacgggctcgccggcgcgctctccccggccatcgggaacctgacgtccctgcggacgctgaacctgagctccaactggttccgcggggaggtcccggcggccatcggccgcctagcgcgtctgcaggcgctggacctgagctacaacgtcttttccgatcatcagtcagctgtgaaaacgttttcctagcaggtgaaattgggagttcaaggtgcgtaccgatatccaaatttatttaatgtgttgcgcaagaaacaaacaaatgtggtgggagcacttaaattctacaccttttaatgtggaatggcaaagttttatttattagattaaacaaggatatggatatttttatctagaacctaaataaaaacggcttgttctct

SEQ ID NO: 20729 - DNA, 895 bp, Zea mays
  Clone ID: LIB3245-089-C10_FLI
gagacggccggccggccggagaaggaagccattcgctgcagctgcaagcaggatagtcaggagtagcgtgcaacggagatggaggaggactacgtgttcaagatcgtggtggtcggcgactcggcggtggggaagacgcagctgctggggcgcttcacccgcgacgagttcttcctggactccaagtcgaccatcggcatcgagttccagacacgcaccgtcgacatcgcgcgccaccgcgtcaaggcccagatctgggacaccgccggccaggagcgctaccgcgcggtcaccagcgcctactaccgcggcgcgctcggcgccatgctcgtctacgacgtcaccagccgccgcaccttcgaccacgtcgcgcgctgggtcgccgagctgcgcgcccacgccgacaagtccatcgtcgtcatgctcgtcggcaacaaggccgacctggcccgcgacgcccgccgccgcgcggtggacacggacgaggccgccgccttcgcggaggagcaggggctcttcttctcggaggcgtctgccctcagcggcgacaacgtcgagcgcgccttcctcacgctgctccgggagatccacgccatcgtgtccaggaagacgctggatgcggcggcagaaaccggcggcaccaccgacgtcctggctctcaagggcaccaagctgtcgcttgctgatgagatatccatcatggagacgagcgccttgagaacagcaagcggcggcagctgctcgtgcacgtgatggtggtgcatgcatatacgattatacatgcatatacagctcatggaattctaatccggaaatatatgttcaaacagtgtgctgtgctccgagagaaattttcataacggagataaaatatataaaaaaggatatgcagtgc

SEQ ID NO: 20730 - DNA, 1420 bp, Zea mays
  Clone ID: LIB3245-089-C4_FLI
aattaagcagctagtgtccaccgccagaaactagctagctagctagcatatgggtcggctggcggcggcgctggccgccgtggcggtgctctgcctctgcgtgaccttggcgggagcggaggtggtggacgagttcggcggcggggcgtccttcatcttcggggactcgctggtggacgccggcaacaacaactacatcccgacgctgtcccgggccaacatgaccccgaacggcatcgacttcgcggcgtcgggcggggcgcccacggggcggttcacgaacgggcggaccatcgcggacatcatcggcgagatgctggggcaggcggactactcgccgccgttcctggcgcccaacgcgacgggcggagccatcctgaacggcgtcaactacgcgtcgggcggcggcgggatcctgaacgccacggggaaggtgttcgtgaaccgcatcgggatggacgtccaggtggactacttcaacgtcacgcgggggcagctggacgcgctgctgggcagggacagggcccgcgagtttttgaggaggaaggccatcttctccgtcaccgtcggatccaacgacttcctcaacaactacctcatgcccgtgctgtccacgggcacgaggatccgcgagtcgcctgacgccttcgtcgacgacctcatcttccacctccgggaccagctcacgaggctgtacacgctggacgcgcgcaagttcgtggtggccaacgtggggccgctgggctgcatcccgtaccagaagaccatcaaccgagtgggcgaggacgagtgcgtgaagctgcccaaccagctggcggcgcagtacaactcccggctcagggagctcatcatcgacctcaacgccggcctccccggcgccaggttctgcctcgccaacgtctacgacctcgtcatggagctcatcaccaactaccccaactacgggttccagacggccagcgtggcgtgctgcggcaacggcggctcgtacgacgggctggtgccgtgcgggccgacgacgagcctgtgcgacgcccgggacaagcacgtgttctgggacccgtaccacccaagcgaggccgccaacgtgctgctcgccaagtacatcgtcgacggcgactccaagtacatctcccccatgaacctcaggaagctctactccctctagccgcacgtccgacgtccggacgaccatttcatttgccatttggccggccgtccacgtcgacccacctttgcacttgcgcgttcccggcgtgtgcagcgccaactgtgtcgtgtgcggtgtgtactgcatgcgaactgtaatttttgggtgcgaggaaattaattttagcatgcaatttcgatcgtatgtatgtaacttgtaccgtatccaaacaattaaactaaagacatcgaatccaaggacacacagaag

SEQ ID NO: 20731 - DNA, 1627 bp, Zea mays
  Clone ID: LIB3245-090-A11_FLI
ctccgctttctagctatacccttccttataaaatatgcaagagtgcagctgcgcagccgccgtcgcgcagccagccatggccatcaaagatgagccgcagccgctgcacatcctcttcttcccgttcctcgcgccggggcacctcatcccgatcgccgacatggccgcgctcttcgctgcccgaggcgtcaggtgcaccatcctcaccacaccggtgaacgcccaactcatccgctcggcggtagaccgcgccaacgacgcctcccgcggaaccgagggcgccctggccatcgacatcgcggtcgtgcctttccccgacgtcggcctgccccccggcgtcgagtgcgccccggcgcttaataccatggacgaccgcgaaaagttcttccacggggcccagttactccgcgagccgttcgaccggttcttggcggagaaccgcccggacgccgccgtgaccgacagcttcttcgactggtccgccgacgccgccgcggagcacggcgtcccgcggatagcgttcctcggcagcagcttgttctcgcgggcctgcagcgagtctacgctgcgcaacaaccccgtggaggccgcccccgacgaccggacgcgctcgtgctgcttccggggctgccgcgccgcgtcgagctgaggcgcagccagatgatggagcccaagaagcggccggagcgctgggccttcttccagcgcatgaacgctgcggaccagaggagctacggcgaggtgttcaacagcttccacgagctggagccggacttcatggagcactacaccacgacgctggggcgccgcgcatggctcgtcgggccggtggcgctcgccagcaaggacgtggcgacgaggggcgccaacaacgggctctcgcgggacgcgggcgcctgccagcagtggctggacgcgaaaccagagggctcggtggtgtacgtgtccttcggcacgctgacccatttctcgccgcccgagatgcgcgagctcgcgcgcggcctcgacctgtccggcaagaacttcgtctgggtcgtcggcggcgcggacaccgaggagtcggaatggatgcccgatgggttcgcggagctggtggcgcgcggcgaccgcggctttatcatccggggctgggcgccgcagatgctcatcttgacccacccggcggtgggcgggttcgtcacgcactgcgggtggaactccacgctggaggccgtgagcgccggcgtgcctatggtgacgtggccgcggtacgccgaccagttctacaacgagaagctggtagtggagctgctcaaggtcggtgtcgccgtgggatccacggactacgcgtccatgctggagacccggcgcgccgtgattggtggtgaggtgatcgcgaaggccatcgggagagtgatgggcgacggtgaggacgcggaggcaatacgggagatggccaaggagctcggggagaaggccaggcgcgcggtggccaacggtgggtcatcttacgatgatgtcggacgcttagtggacgagctgatggctcgtaggagatccgtcaaagtctgattgcagcatgttcgtcttcgtgtgcacaatattaatctggaactcgtatacataaatttaatctcgatttttgttc

SEQ ID NO: 20732 - DNA, 1176 bp, Zea mays
  Clone ID: LIB3245-092-A1_FLI
tccaattgagttaaagagattgcattttcaacaatgtgaacctgtagagccaccggcaaagcatccacgtgtggaacagttgccccccaataatatgcttttgcagagaagcatgagtagcactgcagaacgttctgcagaaatattaagaagtcctgtacgagctccactaggaattccattttgttcagcaagtgtgggcggtgcaaggaaatttccacctccaccaattgttacaggtgaggatcacttcaacagctgttttgaggatggtgggctgttcagcaccgagctgctgcatagacgtatggagaaaacagcagaaacactgggtttagctggtgtcactatgcatagtgctgagcttctaaatattgctctggatgagtacatgaaaaacttgattaggtcatctgttgagttagtaggaggtagtgttcagagggatgcaaggaaagggacactaccacacaagaaccaagtttatggaaatcggattaatggtgtctggctgccaaaccatgttcatatgcaatcaggcagtggttcatcaggaactacgaatgagattggaagtaaccaattgatctccgtaagtgattttaaggtagccatgcagctaaaccctcaacatcttggggagaactggccagtccttctggagaagatatgtctatgttcttcagaggaaaatgactgacagatggcgcctttttacttcacattgaagttctgtaccaatgtgcttcttggtgcccatccgatgtacatttgagctggaagtggcaagattgcaggcacaacacagaatatgcacatatggggtcaaagcagaattctgattccacgttcagccgtcggagttgtagtagtgaaagaaagacattctttttttcctgataaatcatgcccaaataaaggaaaacgtcttccggccaagccatgcagcttaggcctcattagcacttacaaggtggatagtgttacatctaaaagtcccaacttctatgtaacatctggcataagggactgggggcagcaaaatgcaagtgttgccttgtaacttataggaaaatgttctgtaagtttctaggtcaggatgtacattattgattgcaaaatttttctaggtatcttcagtactaatttcagggatctcgaatgttaatttcattt

SEQ ID NO: 20733 - DNA, 1301 bp, Zea mays; identical to SEQ ID NO: 429
  Clone ID: LIB3245-092-B2_FLI

SEQ ID NO: 20734 - DNA, 1098 bp, Zea mays
  Clone ID: LIB3245-092-C3_FLI
caatccaaccaaccattggccattgcgtagaaaagattactttaagaatgggctgctccaagcgcattgcactggtacttgtcgcggctcttgtagcgctccacgtccatgtcccgatggccaccgcagccaactccaacctcttccgggactacatcggcgccatcttcaacggcgtcaagttcaccgacgtccccatcaacccgagggtccgcttcgactacatcctcgccttcgtgatcgactacaccaccgcgacggagccgcccaccccgaccaacggccagttcaacatcttctggcaggactcggtgctgacggcgtccgcggtggccgccatcaagcagagcaacccgaacgtgcgggtggccgtcagcatcggcggcgccaccgtgaacgaccgccctgtgttcttcaacatcacctccgtcgactcctgggtccagaacgccgtctcctccctgaccaccatcatccagaagtacaacctggacggcatcgacatcgactacgagcagttccaggccgacccggccaccttcgccgagtgcatcggccgcctggtcaccacgctcaagagcaacggggtgatcagcttcgcgtccatcgccccgttcgacaacgccgacgtgcagcgccattaccaggccctgtgggcgacctacggaagcgtcatagactacgtcaacttccagttctacgcctacggcgccagcacgaccgaggcgcagtacgtcgacttcttcaaccagcagcttgtcaactaccccggcggcaacatcctggccagcttcaccacggcgcccaccaccacgtcggtgcccatcaacacgtcgctcagcgcttgccagacattgcagtcgcagggcaagctctacgggatcttcatctgggcagccgaccattccaggagccaaggcttcaagtacgacacacaagcacaagcactgctcgccaacgcccctgctggctactagtagatggctaccataccttcaatgcgtttaagttggatttggatttcattttcaggtgaacaaataatattattatgtatggaataaggctgtcattggaatataatacggggctatttct

SEQ ID NO: 20735 - DNA, 1048 bp, Zea mays
  Clone ID: LIB3245-092-E10_FLI
ggttgaagctctgctccaccctctcgctatcggttcctataaataaagcaagagcccctcgtcgatcctcacctccacagctagcatcgatccgccattgctcaccgcacaagtgcacgctcacctcacacacgcagctaagtagctaacgccgtaggcgagaacaagaaaaggctcgacatggccgaggagaagaagcagggcctgcagctgctggacttctgggtgagcccattcgggcagcgctgccgcatcgcgctggacgagaagggcctggcctacgagtacctggagcaggacctggggaaaaagagcgagctgctcctccgcgccaacccggtgcacaagaagatccccgtgctgctgcacgacggccgccccgtctgcgagtccctcgtcatcgtgcagtacctcgacgaggcgttcccggcggcggcgccggcgctgctccccgccgacccctacgcgcgcgcgcaggcccgcttctgggcggactacgtcgacaagaagctgtacgactgcggcacccggctgtggaagctcaagggggacggccaggcgcaggcgcgcgccgagatggtcgagatcctccgcacgctggagggcgcgctcggcgacgggcccttcttcggcggcgacgccctcggcttcgtcgacgtcgcgctcgtgcccttcacgtcgtggttcctcgcctacgaccgcttcggcggcgtcagcgtggagaaggagtgcccgaggctggccgcctgggccaagcgctgcgccgagcgccccagcgtcgccaagaacctctacccgcccgagaaggtctacgacttcgtctgcgggatgaagaagaggctgggcatcgagtagagagcatccatcggtcggccggtggctggccgggagtaataatgacgaaccaattatctagttttggtttgagtgtgctcagcagagcagttcgtcgtcgttgtattttctattgtcagcggtggcagcgccgtacgtgttgcctcgtgcaccacatccgaataaatggttatgaatttcttgttgtcttcac

SEQ ID NO: 20736 - DNA, 1383 bp, Zea mays
  Clone ID: LIB3245-092-F9_FLI
gccaagcgcacgtccgcagccgacatactccaggcgtaccagctgtacatggccgccatctgcttcaagagagtcgtcttcgtgttctcgaataacaccatctacaatgccgctctgggcaagatgaagatacatatcgtcgattacgggatccattacggcttccagtggccgtgcttccttcgatggatagcggatagggagggcgggccaccggaggtgaggattactggcattgacctgccccagcctgggttccgccctactcagcgcattgaggagacagggcgccggctcagcaagtatgcccagcagtttggtgtgccattcaagtaccaggcgattgcagcatccaagatggagtccatccgcgcggaggatctgaatctcgatccagaggaggtgctcatcgtgaactgcctataccagtttaagaacttgatggatgagagcgttgtgattgaaagcccaagggacattgtgctcaataacatcagaaagatgcggcctcatacattcatacatgcaattgtgaatggctccttcagtgcgcccttcttcgtgacgaggttccgagaggctctgttcttttactcggccctgtttgacgctctggacacgaccactccaagagacagcaaccagaggatgctgattgaggagaaccttttcgggcgggctgccctgaatgtcatcgcgtgcgagggcacagatcgggtggagcgccctgagacgtacaagcaatggcaggtgcggaatcaacgagcaggcttgaagcagcagccgctgaaccctgatgtcgtgcaggtagtgcggaacaaggtcagggatttataccacaaggactttgtgatcgatattgatcaccactggctcttgcagggatggaaaggccgcatcctctatgccatctcgacatgggtggcaaatgatgccccctcttacttttagctgtttttttgtgactcacttgtctacaactttaggggccagtttggtacggcgcgtgcggcgccacggcgcgcctaagctgcggcgcccgaatcggccgccacacctgcggcgggaaaactatggcgcgccgtggcggcttagtccacgcaccaaacaacccctaggtttaggtatgtcatctagatatatctagtgacaagcgtgttcttggcccagttaatagccatggttacttggactctgcagtatgcctagtgccctagtgagaattcaacatgtacctgttctttccaagggtacattcagcttctgtggaacatgagtgacacacgggggatccagaagtcagaaggcataccgaaatctgtcctttgatttaatgtggattatatagatgctcatcactcagtcatgctgttgcatggtgct

SEQ ID NO: 20737 - DNA, 1038 bp, Zea mays
  Clone ID: LIB3245-092-G9_FLI
gcgatcgagtcgtgcagcggctgcttgcgttcgtgcatttttcgtacaggaccgcgcgcgccgcgggtttgagaggagcgcgtgcacacgtacgatacgagcatggcagactaccacaggatccacccagtgagcgcgggctcgccgccgccgccgtccgcgccgccggagcaggcgtcgaggagcggcaagaaacccagccacgaccagctgccggtgacagcccctgccccggcgccgccgcccccgcccccgcccccgccgtcgcggcgcaagcgcagccgctgctgccggtgcgtgtgctacaccgtcctcgccctcgttttgctcgccgttgcgctgggcgccaccgcggggatcctgtacctggtgttccggcccaagatcccgacgttccacgtggaccgcctgacggtgacccgcttcgacgtgaacggcacgtcggccacggtgaccgacgcgttcgacgtggacgtgacggccgacaacccgaaccgccgcatcgggatctactacgacggcggcgacgtgacggcgtccttcaacggcaccgtgctgtgcagcggcgccttcccggcgctgtaccagggccaccgcaccaccgtgcacccgcgcatctcgctcgcgggggagacgcggctcgacagcgccgtcgcggcgcagctgctgcagcagcgggcggccgggttcgtgccgctcaccgtgcgggcccgcgtgcccatccgcatcaagttcggcgccgtcaggctgtggacgatgacgggcaaggcaaactgcaacctggtggtggacaatatccaggcaggcacgcagctgagcatccgctccaattcctgcacttttaagcttaagatctagatgcgccttcctttgtcggccatgcatggttgttgcctccaatgactacggctacgggggtggtagtggtagaggtgtacagtacattcttttcggcacctgtatccatagcttaattgatggctgtaataaataacatccgatatgcatactattttgctatgagattatttattatat

SEQ ID NO: 20738 - DNA, 750 bp, Zea mays
  Clone ID: LIB3245-093-A5_FLI
ggacgacaccaacggcgtcatcgggaacgccgctcccagggagacggacaaggcctccttcaccgcggtggcaagccgcccgggcgacttgctcgtgagcacgggcacggccggcgcctcgtctccggccaccgggatgtggacctccccagtcttggcgagtaaggggtagacgatgacgcagggcgcgtccccgtgcggctgcgcgtcatcccggcatgccaccgtggcgtttcccgagcacgacgtcatggctgctggagaaacagagggataccctgctctctctctctctctctctatctctctctctctcctggttgcccgcccgcgcgtgcggtttcgccaggcaagggagtaaaaacctttgcggcgttggtaactcccaggcaatttacgagatcgtacgcagtttctgttggggggagatggggaagcgcttctcgggttgtctcccctttggaagctgggatgcttgcttggttggtggagtcgagagccgcgcggcgcgggggactgggaagcccggcgatacctttttataggcgtcgaacggggcgagggggaagccttggccgcttaccccttctctcactagcttttctctgtccttgacagcgcttggattggttctgtgttttgtctttcaaccgagagccgcccagactttcatttcatttcttcgcgcactggattgtacaataatatgtacctgtaacggaatactaataattctgcataacatatgac

SEQ ID NO: 20739 - DNA, 1502 bp, Zea mays
  Clone ID: LIB3245-093-G9_FLI
ctgagctgcagcatcccgtccaacagcaggaccagcgagggtgtacctccgcctcgcgagtcgggaccatgtggacgggcagcccgctgctccgggacgttggcgccgccgtgctcacgggagtggccgcggctgccgtgctccgcttctgggaagagatcgccaaccgcgccctgctggaccaggtcacgcttttcctttgtttttttcccccagtttctgtgctccgtataaaatccggtatctattgcttgcgctaacaagtacagtagtaattgaagttttggtttcgattcgttccaaattgccctgaaccccaccctcgatagtcaacccaccaagctctagcagtactgcagcttcactagtcataattataatcaaacttttattagctatcaccttcgaagcctattgatatcattttccctttcaagatgaatctactgattgatctctgtatatgtctttctctgtgcattctagaaactctgcaggaaactggtgcacataactgtaggattagtgtttttccttatgtggcctttgttcaggtaaagtaaaaattaggccaccagcaaagacaaaaattcctcctcctccagtcgtagcgtatcaacctgactgcatacaaatagttcctttccttgctcatttcgttttcagctcagatgatgtgtttgctccatctctcgctccgcttatcatcatcatcaacatcatgaaagtgacagtgattggacttggtttcgtgaaagctgaaggtgtggttaactccatgactaggcatggagaccgcagagaacttctcaagggcccgctgtattatgcctgtgctataactctgacaacaatagttttctggaggacatctcccatctcaatcgcggtgatctgcaatttgtgtgccggagacggtgttgctgacatagctgggagacgattcgggcatgttaagctccctcacaaccctgaaaaatcatatgccgggagcatcgcaatgttcttggcaggtttcatcgcatcagtactgttcatgtgctacttcaacattttcgggtttgttgagaagagctggagcatggttgctgcctttggtgtgatatccctggctgcagcagttgtggagtcactcccgatcagcacacgccttgacgacaatctgacggtttctgtcgcatcagtgctagttggcgcccttgttttctattccattggagccagaaacctgtgctgcatgagcagcgaagtcaggagaagtatcccagcaaccgttggaatggtgtttgcaggcagcagctgaaacatgtagccacagtccaggagcagagttgagcagaaagtgcagagaaaggagttctcttcaatcctgatgtgtgtgtatcttgtactgtaaccattttcctgtctaagcagacattcttgtaactttattaagaaagaggtaaagcgagaataagttcattatggaaaacagaggatgtgctctcataagcaaatgc

SEQ ID NO: 20740 - DNA, 1947 bp, Zea mays
  Clone ID: LIB3245-095-B2_FLI
gcggcagatagagtaccccaaggcccaaacccaagtgcccatcacggagctctcgctagcgacgacgacggcgcccgctcgattggtgctacaagatccctcgtgcgtccaccggtttgcggcgtggggatctcggctctgactgaccgtgcccggagccggaggcaggcgcgatggcagtggcagctccggccgcggtgagcacgggagccgggcagggcaaggagtaccccggcgggctcaccctctacgttctcctcacctgcgccgttgctgccaccggcggccttgtctgcggctacgacatcggcatatccggtggcgtgacatccatggacgcgttcctgcacaagttcttcccgtcggtgtaccgcaaggagcagacggcgcggggaggcggcagccagtactgcaagttcgacagccagctgctgaccgcgttcacgtcgtcgctgtacctggcggcgctcgcggcctccttcttcgtcgcgtccgtggcgcactccctgggccggaaatggtgcatgtttggcggtggcgtctccttcctcgccggcgccgccctcaacgccgccgcgcaggacgtcgccatgctcatcgtcggccgcattcttcttggcatcggcgtcggcttcgctggcctgtccatcccaatctacctgtcggagatggcgccgcaccacctccgaggcacgctaaacatcggcttccagctgatgatcaccgtgggcatcttctccgccaacctcgtcaactacggcgtcgacaagatcagaggcggatggggctggcgtctcagcctcgggctcgccgccgtcccggcggccgtgatcaccgtgggctcgctcttcctccccgacacgccaaactccctcatccgccgcggctaccacgagcaggcgcggcaggtcctcgcccggatccgtggcgcggacgtcgacgtggccgacgaatacggcgacctcgtgtcggccagcgaggcgtccgccgccgtccggcgcccgtggctggacgtcctcgggcgcaggtaccggccgcagctaaccatggccgtcctcgtcccctttttccagcagctcaccggcatcaacgtcatcatgttctacgcgcccgtcctgttcaagacgatcgggctcggaggggacgcgtcgctcatgtcggccgtcatcaccgggctggtcaacatcgtcgcgacgttcgtgtccatcgccaccgtcgacaggctcggccggcgcagcctcttcctgcagggagggtgccagatgctcgtttgccagatcgtcatcggaaccctgatcggcgtccagttcggggcgagcggagacggagccgccatccccaaggcctccgcggccaccgtcgtggcgttcatctgcatctacgtcgcgggcttcgcgtggtcgtggggcccgctcggtgtcctggtgccgagcgagatcttcccgctggagatccgaccggcggggcagggaatcaacgtggccgtcaacatgatgtgcaccttcgccgtcgcgcaggccttcctcccgatgctctgccacttgaggttcggcctcttctacttcttcggcgggtgggtgctcgtgatgacgctgttcgtcgcggccttcctgccggagacgaagggcgtgcccgttgagaagatggggactgtgtggaggacgcactggttctggggaaggttcgttgctgacgctggcatggacggccgcgcgggaaaccgcgactccgccttccacaagggcaaggacattgctatagagagccgtagtcgtcctgtgtagacatgggtattggattggagtgtgcaagtgaaacacatgaaagtatgaaacacgcacaaaaaatttggttgtgggttgagctcacaaaatggacctatttctatcgtacgttggacgtaaaaacaaactaccaagaattataaagaattctcaataaataatt

SEQ ID NO: 20741 - DNA, 889 bp, Zea mays; identical to SEQ ID NO: 1305
  Clone ID: LIB3245-107-B4_FLI

SEQ ID NO: 20742 - DNA, 1479 bp, Zea mays
  Clone ID: LIB3245-113-C3_FLI
cctgccccctgcccacattttccttccttccctcccgtcgccgcctgaaaccgcgacagcaagggtcgtaggagcaaggacgacgacgagaaggctcggttcggctcttcccagtctctccgagggaggaaggagaggatcggagggtgcgatggcgatcgaccacgagtccccgttcaaggagctccgcctcaagaaccgcaggatcatgggcggcggcggccctgaccctgagccggaggaggaggaggaggtcgccacggcggcgtacgcggggcagtggccgcgctggctgcagccgctgctttcggcgcgcttcttcgcgcactgcaggacgcacggcgactcgcaccgcagcggcgagtgcaacatgttctgcctggactgctccgccgcgggcgcgggcgcgggcgcgcgcgccctgtgctcgctgtgcctggcgcaggcccaccgcgaccaccacaccatccagatccggcgctcctcctaccacgacgtcatccgggtgtccgacatccagcgcttcatggacatcgccggggtgcagacctacgtcatcaacagcgcccgcgtcgtcttcctcaacgagcggccccagcagcagaggcctggatgcaaggccgcgtcggcgtccgccaacctctgcgaggtgtgcgcccgcagcctcctcgacaacttccgcttctgctccctcggatgcaaggtcgtgggctgctcccccgacgccgccaaggccaggagctggctcctccggcccgccgtcggcggcagcggcgacggcgactccacgtcctcctcgccgctgcgcgacgcccagaagaggcagagcttcaccccgcccacgccgcagccggcgaagcgccgcaagggcatcccgcaccgcgcgccgttcggcagcttcatcgtcgagtactagctccctctctctccgtctccacggcggcggcggcggctgcattggcagtggcactacacagcacacgcgcggtaaagcagggaaaaaatatatatactcttgaatgaaccaacggaattgagcagcacagagtgagtcagtgaattcaggtcatgtctgaatcaatccgccattacagggcaatgggactgggacggccaccacttccttttgccgtgacacactctggctggctggctggtggtgcttctcgaggtggatgccattcggtcgctgctggctttgctttccacaaagggaggggaggaaagaaaggttgaggaagaatcaaaacactggcttttcatcactgttgctaggctctctgatatagaaatatatatgtacatttttagccttgtcctgtttcaaatcatcatagtggagcattatagctagctagctttttttactagattattcgtctgaagaaaagaaaccatggttcaggagatgaccagctagtgcaaggtacttactttatactagtaataagctatggtggtgggtgatttgtggtgctt

SEQ ID NO: 20743 - DNA, 822 bp, Zea mays
  Clone ID: LIB3245-114-H4_FLI
cacacagctaaagccttgtgcaaaattatcattaagctgtcatcaatcatcatggccgccattacggcaggtctgctggtactcctcgctgctgccgtcgccgctccggcgcacgccacggactacacggtcggcgactcgtccggatggagcagcggcgtggactacgccacctgggcgagcggcaagaccttcgctgctggggacaacctagtgttccagtacagcgcgatgcacacggtggcggaggtgagctccgcggactacggcgcgtgctcggccagcaactccatccagtcctacagcgaccagaacaccaagatcgcgctcacagcgcccggcacgcgctacttcatctgcggcaccccgggccactgcggcaacggcatgaagctcgccgtcacggtcgccgctgggaccgccaccaccaccccggcgtcatccccgcccgccgctgactcgcctccagagacagccacgccgtccgggtctacgcccacggcaacgacgtcgccatcggcgcccacgacgaagcccacctcgagcagcactggcgctgcctgcggtggggaggcccggctcgctatgggcgttttggcctgggccgcgggcctcgccgggctcgccctgatgggttaggcaagaggcagtgctgtttccgttccatgcttttcctgttgcaggcttttgtggcccgttgtgtttaatctgaattcacgtctatggtctatgctcgattctggcttgttcgagactcccgctgtatacatgtacggctatccttgaatccttcatgctggacctgtcccagcggtctgcaat

SEQ ID NO: 20744 - DNA, 1362 bp, Zea mays
  Clone ID: LIB3245-116-C12_FLI
accctagcaaaaaaaaaaaaaaaaacattgcccaatccaaatccccattccctccactcccaaaatttcgaactccgaatcgaagctatcatgtgcgagcgctcacctaccccacgttgactagaagaaccgtccgacttcaacttcccaattttgcctccaaaaaattcaaaatattattcgaccccgccgccatcccgtccgccctacaaatcccgccagcatgcgctccatgttcgccactaggtcgcttctcgccgctgccgcctccgcccccaccgtcctccgcgccagcgctttcccatcgcgttcgctgctcctctctctgcctttccctcggggtcgtgctgccagaaatatgcttggcgcggcgaggtcgatctcttcggccgccccgtcgcgagtcggaggccgtgcggctatggaggtccgggcggctcagtccggcgagatccatgtcatcgtgggccccatgttcgccggcaagaccaccgcgctcctccgccgggtccaggccgaggccggcaacgggaggagcgtggcactaataaagtccgacaaagacaaccgctatggattggattctgttgtgactcatgacggtacaaagatggcgtgctgggccttgtcagaactgtcaagttttcatgacaaattaggaattgaggcctataataaggtagatgttataggtatcgatgaggcccaattcttcgacgatctttatgatttctgctgcaaagctgcagatcgtgatggaaaaattgtagttgttgctggcctagatggtgactacaaacggagaaagttcggttcaattcttgatattgttcctctggctgactcggtcaccaagctaacagcacgctgtgagctatgtggtcgccgggcgttctttacactgaggaagacgcaggaaaccaagactgaactaattggaggagcagatgtgtatatgcctgtgtgcaggcagcactacatggatgggcagattgttattgaggccacaaggattgtgttggaccttgacagatccaccgtgacggcgaaagccttgaaataggccaatacctgacttctgcatgcagatttgcagtgtgtaacgatttatttatgatgacattggttgctgtcgagtgttgaagacgcacaccagttggtgaaaagctgttggccttgagatgctgccaccagcgagggaagccaaatgagttgatcccacaaagtactgttgagaagtttgtaaatatctaacagtgtttgggtttaaaatgcggacatgtatcgcttttcttatgcaattggcattgtcatttttattaagcaatcagatgcttggaatcagctgtacgaatttgtacc

SEQ ID NO: 20745 - DNA, 1389 bp, Zea mays
  Clone ID: LIB3245-117-A1_FLI
cttgctttctgtgcctctcagcaaagggcagcgttccttgctatgtcatctagctagatagcacagagcaagctgcctgggcaggcagctagaaaattaacaacaaaaaaaaaggtcaggagcagtgggatttggtcgcttgctgttgcttttggcttcgtctccgggcacatctcactgctgaagcctcatggggagagctccgtgctgcgacaagaacaatgtgaagaaagggccatggtctcctgaggaggatgccaagctcaaggagttcatcgagaagcatggcaccggtgggaattggattgctctccctcaaaaagcagggttgaggagatgtggcaagagctgcagacttagatggttaaactacctgaggcctaacattaagcacggggagttcactgagaccgaagacagggtcatctgcagcatgtatgcaagtataggaagcaggtggtcgatcatcgcgtcgcagctgcccgggcgcaccgacaacgacatcaagaactattggaacaccaagctgaagaagaagctcctcggctccacagccgcgccacaccctcaccgcgcgccacggcagcagcagcagcaccaccaccaccggcccggcctcaacctgatgctccaacaaacgttgccctccttaccccagctggccacctacaacagcttcttctccgtcgcaggcggaggagccctccaccacgacgacccaatcatcccagcgctagcacttccgccgccacaccaggactacatgctaagccccggcggcggcggcggcggccttggcatcccaacgtcactgctgcacgcgcagcagcagtttcagcagcagcaccagcagcatgtggtgaaggaggagagcggcagcatgatcgtgttcggcagggaccagcagagctgcagctcgtcggacggcggcggcggcgcgcatagccagcaccagcagccgcagtacggcaatggccatggcaaggagctgagcttcgacggctacttgttcggctacagcaacggcggcagcggcatggagcacgacaactgcggcaggctgatgcagcagctgcaggacgctcaccagcagcaagcccatcagcatctagtgcctgtggagtacaactacgaggagatcaagcagctgctcatgagcacagccgccgccgatactctgcacgccgccggcagccacgacgacgacgacgacaacggcgggattgaagggttcggcggctcgcaagggaataaggtgacgatgatgtaaattgacgactgatgctgagagatggacgtacgacacgacacagggtaaaagcgattgatgatcaacgcgcaaggtgtgtgtttgatttttactgctgtattatttcttcttgcttcttc

SEQ ID NO: 20746 - DNA, 1801 bp, Zea mays
  Clone ID: LIB3245-118-C5_FLI
ctcctccattctcctagctccagcaacaaacaggacacaacaccttctcctcctcattcttctaccatagctagctagctagcttcacatcagcagctacatactcaccgatagatacagacctcagagcatcacactacagagtacagacctagctcagagcacacatccagccatggggctcctccctaccgaccgcatggatagcctcttctccccgcgctgcgtgtgggtgaccgggcccatcatcgtgggcgcggggccgtcggggctagccgtggcggcgtgcctgcgggagcagggcgtgccgttcgtcgtcctggagcgcgccgactgtatcgcctcgctgtggcaacggcgcacgtacaaccgcctcaagctgcacctacccaagcagttctgccagctcccgcgcatgccgttcccggaagactacccggagtacccgacccgccgccagttcgtcgactacctcgagcgctacgccgccgagttcgagatcaagccggagttcggcaccaccgtgctgtcggcgcgctacgacgagacgtcgggcctctggcgcgtcgtcaccaacggcggagccggcggcgacatggagtacatcgggcgctggctcgtggtcgccacgggcgagaacgcggaggccgtggtgcccgacatcccgggcctcgccggcttcgacggcgaggtgacccacgtgagcgagtacaagtccggcgaggcctacgccggcaagcgcgtgctggtggtcggctgcggcaactccgggatggaggtgtcgctggacctggccgagcacggcgcgcgcccggccatggtggtgcgcgacgccgtccacgtcctcccgcgcgaggtgctgggcacgtccaccttcgggctcgccgtgctgctcatgcgctggctcccgctctggctcgtcgactggctcatggtgctcctggcgtggctcgtcctcggcaacctcgccaggctcggcctccgccgccccgccgccggcccgctccagctcaaggagacgcacggccgcacaccagtcctcgactacggcgcgctcgcgcgcatccgcgccggcgacatcaccgtcgtccctgcggtgacacggttcgccggcaagggcggacaggttgaggtcgccgacggccgcacgctcggcttcgacgccgtcatcctcgccaccggatatcgcagcaacgtgccgcagtggctccagggcaacgatttcttcaacaaggacggataccccaagacggcgttcccgcacgggtggaagggcgagagtgggctgtacgccgtggggttcacccggcgcggcctctccggcgcctccgccgacgccgtgcgcatcgccacggacctcgggaacgtctggagggaggagaccaagcccaccaagagggccggcgcctgccacaggcgctgcatctcggtcgtcttctaatccgatcggccacacctgggagcatgcatgacgatgattgaagctaacttttctgaagcgcacacacagctgacagacagttgttcgttgatggtgttttagttagtctcacagcacgtccaatccccttggtttgttgttgatttgttctttgagatcgaggtacatcagtagtgagtaatataatacgggtaaaaacagtgagagtgagttgagtaaaagaaaagaaaatggagccctcccatcagtaggggaagtgagtgagccctagcctaggggatttttactgcagctatggccgctagcttgctgtatagtagcaacctgttgatggaggaagaggctctctctttatgtttt

SEQ ID NO: 20747 - DNA, 694 bp, Zea mays
  Clone ID: LIB3245-118-D7_FLI
acgtggaaaaatctcctccaatatgaaggagcaatcaaccacgaggaaacaaatccattatcaaccgcagaatacaagttacagagaggacttatatttataggcgtacagaaaagcatattacaaggcatattccaaatatataaaaggaattagaggcatattacaacaaatctccccttgactctaaatccatagaactgtttcccaaacaccactaggatcctaaatttgaatgtcaaccaactctaaggaatcattagacttggaactggagcacgactttgtatcatcaaaataacctctcttctggaacgcaatagaaacagcttcagcatcaacagttccgcccgagcacctcgtgcgcgcggtaccccgtggcggcctcgaaggcggcgttgacgtagatgacggggaagtcgacctccgccgcgtccgccacgaggatcgctgccggcctcgtctcgccgagccccgcctccggcgccccacacggccaccccggctcatcttccgcctccccgtccacttccatcccctcctcgtcttcctcctcccacagcctcatccgcttcaccgccacgacgccgcgacgccccgcgtcgtcggaggccggtcgccgccccgcacaccccctttctctctcctcggcgtgcgccagtggtttggctggtttggtgcggggggaaatgga

SEQ ID NO: 20748 - DNA, 726 bp, Zea mays
  Clone ID: LIB3245-118-G4_FLI
ggagcagctgctgggcagctatccagcgggccactgagtttaccttactgcttactcttacatactaagatcgctaccagagcatggcgggaacttcgtcgtggtcgtcgtcttcatcctgcgcgtcgtcgttcgggtcgcccgaccacgatgtcgtctgcgtcaccgagccggactctgtgggtgccgcaggcgccgtcgccgacgccgagggaagcgtcaagttcctgtgcagctacggcggcaggatcctgccccgccgcaccgacggcacgctgcgctacgtcggcggcgacaaccgggtcctctccgtcgaccgtcccatccggttttacgtgttgcagcggaagctgagggaattgtgcggcggctgggaagcgcacctgcggtgtcagctaccgacggaggacctggacgcgctcatctccgtcacctgcgacgacgacctcgccaagctgctcgaggagtacgacgaggctagcaaggaccgcctccagtcgctcaagatccgggcgttcctgttcccgactaggacgccggcgccgtccatactacagcgtaggagcccgccgtcgattgctcacctccactggcaaaacacttccccgccggccgcagccggcgtctcgctgacgtgcgcgccgcggtggtgggcagggccccaggcctctcgccaggcgcaggcgccccaggcccagaactacgaccgacacagcctcggtgagg

SEQ ID NO: 20749 - DNA, 1572 bp, Zea mays
  Clone ID: LIB3245-120-H12_FLI
tcaggcgcctgaatcgtccacaatgagccacgagatcaactacacgattaaggcccaaggtgccgaaacaaactgttgagagtgagaaggccgaggccgacgtgccacgctcggatctcacaactagtcacaagctgcttctccatattccacaatccacacatccggaccgagcgcgaccccacctcccagatctcatctgcgacgacctcctccctcccgatcccgctccgtctccccccaccgccaccgctgccgctgccgcctcccccaccgaggtcttgtcttcggcgatccagccggagcccgcggcggcgacgatgtacgggtgggagatgctgtcgttcaacatacacgatgggttcctggaggccatcgtgcggggcaaccgctcgggcctcctcaccgccgccgactacaacaacctctgccagtgcgagaccctcgacgacatcaagatgcacctcaccgccaccgagtacgggccctacctccagaacgaaccttcacccttgcacacaacgacaattgtggagaagtgcactcttaaactagtcgatgagtacaagcacatgctgtgccaggccactgaaccactatctacgtttttgcagtatataacttatggccacatgattgacaatgttgtccttattgtaactgggacactgcatgagagagatgttaacgaacttttggagaaatgccacccattgggcatgtttgacagcattgcatcacttgctgttgctcaaaacatgcgtgagctttatagattggttctagtcgatacaccactggccccttacttctcagagtgcattacatctgaggatttggatgacatgaatattgagattatgaggaacactctctacaaagcatatcttgaggacttctacaaattttgccagaaactaggtggtgcaacagctgagatcatgtgtgatctcctttcatttgaagctgacagaagagctgttaacattacaataaatagtattggtactgagttgacaagagatgaccgcaggaagctgtactccaactttggtttattgtatccatatggccacgaagaattggccgtttgtgaagatgttgaccaggttcgtggtgcaatggagaagtacccaccataccagtctatattttccaggatttcatatggagaaagtcagatgttggataaggcattttatgaggaggaagtcaagaggctatgcttgtcctttgagcagcagttccactacgctgttttcttcgcttacatcaggctccgcgagcaggagatcaggaacctgatgtggatctctgaatgtgtcgctcagaaccagaagtcccgggtccatgacagtgtcgtcttcatattctgagaacccccgccactatatatgtatgtacaaaatgcctgctttgatgatggcacaatcgctcgacaattataaatctgggacttattattattcccattccctctgttagacgccggcgtaaaaaatgccagacctggagttgatgtattatttgttttgtagtcaaataaaggtgtgattatctggcacacaaaat

SEQ ID NO: 20750 - DNA, 558 bp, Zea mays
  Clone ID: LIB3245-126-D8_FLI
cagtcgccctccgccccaggcaaagctgcagctgcaacagcggtgaccacgcacgctgcaccgcaccgacgggtgacacctgctgtgtccaccaaccgtgagccagaaggcgaccgacgacgccagcttagactaggaaccaacaatggcctcgcgccacctgctcctcctcctgctcgccgcgctgctcccggcggcggccacggcggacccggacgcggtgcaggactactgcgtgccggacacgggcggcgggcgcgggcgggccgtggatctagcgctgctcccgtcctacccgtgcaggagccccgccaacctgacggcggcggacttcgccttcgcgggcgtgcgcgccgcgggcaacttctccgcggacacggggttcgcgggggtgtccgtgacccccgcgcagttcccggcgctgcacaccctcggcgtgtccttcgcgcgcgccgacctgtccgcggcgggcggggtcaacccgccgcactaccacccgcgcgccaccgagacggcgctggtcctggccggccgcgtctacgcgggattcgtcgactc

SEQ ID NO: 20751 - DNA, 1319 bp, Zea mays
  Clone ID: LIB3245-129-E9_FLI
ccacaggacaggacacacagagccgagccaccccacccaccatcggcgaccagcagccagccgcgggagcgagctgtttaaagacaccgagcggagtcggacggaggactggcaggcacaaccgaagccaccgcttctagttctcgggttcatcgccagcaatccagaccacataatgggactgccggtgacgaggaggagggagagggacgcggaggcggagctggacctgccgccggggttccggttccaccccaccgacgacgagctggtggagcactacctgtgccgcaaggcggcggggcagcgcctccccgtgcccatcatcgccgaggtggacctgtacaggttcgacccctgggacctgccggagcgcgcgctcttcggggcccgggagtggtacttcttcacgcccagggaccgcaagtaccccaacggctcccgccccaaccgcgccgccggcgacggatactggaaggccaccggcgccgacaagcccgtcgcgccgcgcggcgcccgcacgctcgggatcaagaaggcgctcgtcttctacgccggcaaggcgccgcgcggggtcaagacggactggatcatgcacgagtacaggctcgctgacgccggccgccgcgccaagaaagggtcgctcaggttggatgactgggtgctgtgccggctgtacaacaagaagaacgagtgggagaagatgcggctggggaaggagggcgccgccaaagaggaggccatggacatgagcacctcccactcgtggggcgagacgcgcacgccggagtcggagatcgtggacaacgacccgccgttcccggatccgccggcgccggcgatgatggtgcccaagaaggagcgggtggacgccggcggcagcgccaggagcagcgacctgttcgtggatctcagctacgacgacatccagggcatgtacagcggcctcgacatgctgccgccgcccggcgaggacttctactcctcgctcttcgcgtcgcccagggtcagggggaaccagcccaccggagccgcggggttgggccccttctgagtgagctcaggcgaggatggaggcatggagatgaggagagaagacggacggcgttgcgaactctgtaaatacagcataggactaggagtcgaacctggtcggggttacaagtcgagtgtgtcggtgtttcgtacatgggagccggcccggtctttggcttggcgctggctcattctttagtttcacttcctgcgcagacggtaggtagatgtgtatgcgtagctgtgcactatcacttcctcttcaacagaaccgattcactccg

SEQ ID NO: 20752 - DNA, 1177 bp, Zea mays
  Clone ID: LIB3245-134-B3_FLI
cagccagctccattctatctactgctactctcagtactatatatctatccgcagttccatagttcttccagctgctctacacatacacatacacgctagctctagctctcacatcgattgagatcatcagagaggtggaagaagaagaagctaagataccagatcgaggaagagaggcggtgcggtggttggtagatgatggagagggtcgaggacttagggctcagcctcagcctcagctcgtccctcgcgtctcctcgcactcaccatgtcgccaccatgctgctacgcgctccaggtaaatatataatgcaatttgtctatatatatctctgtactaagtagctatgcttggatctatcagagagtaactgtgaatgaccatatcaattaagctgtagctagctctagtgtacatgtgtgagtcttatgtctgtctgactatatgtaagattagtagtcagcaactaaataccgtacgtgtatgagtatggctgtcactcggatgcatcacatataatgtatcagagaagaggttcctggagatgccactgctgctgcccgcgaagcggacgaccgaggtcaccggcgaggatggcctgcgaggcggcagcgatgaggaggacggcggctgcggcatcgacggctccaggaagaagctccggctgtccaaggaccagtccgcggtgctcgaggatagcttccgggagcacccaactctcaaccctcggcagaaggcagccttggcgcagcagctaggcctgcggccccgccaggtggaggtgtggttccagaacaggcgcgccaggtacgtacgtagcgcacatgcgatatgtcgccgcgcgctagctcgtgtgtgctgatgatcagcaagcatgcactgcatggccgggatttctctctcttttctgcccctcgctcgatcgcttcattcggtcgtgcaggacgaagctgaagcagacggaggtggactgcgagtacctgaagcgctgctgcgagacgctgacggaggagaaccggcggctgcagaaggaggtgcaggagctccgcgcgctcaagctcgtgtcgccgcacctctacatgcacatgtccccgcccaccaccctcaccatgtgcccctcctgcgagcgcgtctcctcgtccaacggcaactccgcagctgccacggcggccgccg

SEQ ID NO: 20753 - DNA, 1532 bp, Zea mays
  Clone ID: LIB3245-134-E2_FLI
ctttcctcttgatatgcgcactcctggcttattccttctttccatcttctgctaaacataaattttcagatccttggtatcaagttggcttcgtcctcacaaccggggtcaacagcgcatacgttctaggatactctggatcaatcatggtccctctaggctggatcggcggcacatgcggcctcctcctagctgccgccatatccatgtacgctaatgctcttcttgcacggcttcatgaagtcggtggcaaacgccatatcagatacagagaccttgctggacacatatatggtcagtcagtaataagctctgcacttgcactccctacctatattatatagaatagtctcactagtttcttcttctttttatttgatttcattttacttcaggaccgaaaatttacgggcttacatgggctctgcagtacattaaccttttcatgatcaacactggctttatcatcttagctggacaagctctcaaggccacgtatggactgttcagtgatgatggagttctgaaactcccttactgcattgcgatatcaggattcgtctgtgctcttttcgccattggaatcccttatttatctgccctcaggatttggttggggttctccacgcttttcagcctcatgtatattgtgatagcagttgtgctgtcgtcgagagatgggataaccgcacctgcaagggattacagcatccccaaatcatcgcagtcaactcgagtcttcactacgataggttccatagcagaccttgtgtttgcttacaacaccggcatgctgccagaaattcaggcaaccatcaggcctcctgtggtgaagaacatggagaaagctctatggttccagttcaccattggctccttgcctctctatgctgtagtttttgtgggttactgggcttatgggtcctcaacatcaggctacctcctcaacagtgtcacaggcccagtctgggtgaaagcggttgcaaatctgtcggcattttttcagacagtcatagcgctgcacatctttgctagccccatgtatgaattcctggacacaaaatatggaagtgggcgtggtggcccttttgagatccacaacgtggcgttcagagtagcagtcagaggaggctacctgacggtgaacacgctggtggccgcggtgctcccattcctcggcgacttcatgagcctgacgggcgccctcagcaccttcccgctgacgtttgtgctcgcaaatcacatgtacctgatggtgaaggggcctaagctgggtgccatccagaaatcatggcactggctcaatgttcttgggttcactgcgctggctgttgcagcggcggtctccgcaataaggctcatcatgcgtgattccagcacctaccacttcttcgctgatctttgagatcgatcgttttcttttctttttgttggaatgctgagccagagctagtattttttcattttcagagaattattatccatgtatgtaaggatgacgcatatatatattgaatagatgatttaagatc

SEQ ID NO: 20754 - DNA, 1085 bp, Zea mays
  Clone ID: LIB3245-136-D7_FLI
ccactcccaggctcccactctcaccccttccgcctacccacgcaaacggcacacgaactaacagccacctctcacgtcccccaccctctggttcatgtcctgctgctccccatgtcgcctccactcgagctcgactacataggcctctcgccgccggcggcagccgccgccgctgaaaacgacgaactgaagggtactgagctccgcctcgggctgccagggtccgggtcgccggaccgccgtgtcgtggctgccaccgcgaccaccctggacctgctcccggccaagggcgccaagcgcgggttttctgacgaggcgcccccgccatcgcctgttgccactgccggaaagggaaagaaggtggcagaagaggagtacgacgagaagaaggtggcagcgaccccgcagccggccgccaaagcacaggtggtgggatggccaccagtctgcaactaccgcaagaacacgatgactaccacccagctggagggcagcaaggaggatggtgatgccaagcagggtcaggggttcctgtacgtcaaggtcagcatggatggcgcgccgtacctcaggaagatcgacctcaagacttacaagaactacaaggacctgtcgaccgcgcttgagaagatgttcagtggcttcagtactggcaaggacggctcatctgagtaccgcaaggatggtgaatatgttctgacttacgaggacaaggatggagattggatgcttgtcggcgacgtaccatgggagatgttcgccggctcctgccgcaggctcaggatcatgaaaggctcagatgcgattggactcgctccaagggcagccgataagtccaagaaccgcaactagaacggtggcttcctatccttacacagtccggtacgagggaggagatgcagtgacttgtagggatctgtacgaaaaccgaaaaagtctactaacagctatgacttgtgagaagaattctggcttatggtattggtctgcactagaatggcttggtacatcgtctatggacaaaacacgctattcgattaattgttgttaattaagccttgggggggtacgagtgctattcatgt

SEQ ID NO: 20755 - DNA, 549 bp, Zea mays
  Clone ID: LIB3245-148-G7_FLI
gctacatcgagttccagcgcaacgccgagctcgacccggagaagaggctgtaccccggcggctcctacttcgacccgctcggcctggcggccgaccctgagaagaaggagcggctgcagctggcggagatcaagcacgcgcgcctcgccatggtcgccttcctcggcttcgccgtgcaggccgccgccaccggcaaggggccgctcaacaactgggccacccacctgagcgacccgctccacactaccatcttcgacacgttcggagggtcctcttaagcccgccattgctccgccccgtccatcgaccggaacgtgttcttggattaattaactacgatctctatgagcctggggatggatcaacccgtcgtgcgtggtctcgttttgtgatgagtgggagagagaggatgacaagatcgatcctttgttaatggagatctcgttaattaggagagctaccgctgggacttggtggtttgtaatatatgatccaaccagtgatgaatcaatgcattcacttgtgtacacatatacatatctaccttgc

SEQ ID NO: 20756 - DNA, 944 bp, Zea mays
  Clone ID: LIB3245-155-E5_FLI
attggcttgttgaggtttcggacgaatataagcttgtggcagatacactttaccttacagtatatcttattgaccaatttctttctcagaactgtatccaaacgcacaagctgcaacttcttgggataactagtatgctgattgcctcgaaatatgaagagtattctgctcctagtgctgaagaattttgtaacataacggctggtacatatgcaaaggctgaggttctggaaatggagcaacaagtgcttaatgatctgggctttcatttatctgttccaacaacaaacacatttctcaggagattccttagagcagcacaggcttctcgtacagtaagatcagtacccaaaccacattgcaacgagtcctttcagtctatatgtattgtcctcaacactaagttggcaagctacatttccaggctcatctgaccactttgaattatctggcgagttatcttgccgagttgactttaatcagttacgatttcatgaaatttcttccctcagaggtggcagcatcttcgattttccttgcaaaatggacacttgaccaatctgaccatccttggaaccctactcttgagcactacacgtcttacaaaagcttcgatattagaacttgcgtgcgggctctacaggaactgcagcacaacaccagtaattgccccctcaacgccatccgtgagaagtatgggcagcagaagttcgagtgcgttgccaacctcaggtcaccggagctgctgcggtcgctcttcagttgatgtgctcccctgcactctgctgattcactcgccatttgctgcaacgatcctgacactgtataaaatatttcttcagtttctgttccatttccaaactttcttcagtttgaacatgcattctgtgacttgggtcaccgacaaaagaggcgcgacacactaatatatcaatttgtaactc

SEQ ID NO: 20757 - DNA, 716 bp, Zea mays
  Clone ID: LIB3245-168-F5_FLI
ctggcgctgttcggcctgacggcggccttgtcgagcttcgcggcgcacacgcaccgctcgcgcaaggcgttcgtgggcagcgtcgggctggtggcttccgtgtccatgtacacctctccaatggtggccgctaagcgagtcatcgcgacgaagagcgtggagttcatgccgttctccctctcgctcttctccttcctgtccagcgcgctctggatggcgtacgggctgctcggcagggacctcttcatcgcgtcgccaaacttcatcggcgtcccggtgggcgtccttcagctgctgctgtactgcatctacaggagagaccacggggcggcagccggtgcagaggcgcacgcgcatggccctgccgccgccgccgatcaggagaagggcatgaaggcagcggcgccggtggccgtgcagccgcaggaggtagccgccagagtgtcggaatataaatgagataatatgtctctctcttttctgaaatcgaatcagaatcccttgtgcgttgtgtcagtctgtgaagtgaatgtttcgttatctccatctgcggcccaagcccaacaccgaactggactctccaagtcgaatgaaattgaaggcttggctcttgggctgtacggccacatagcagcgacccaactgttgagaactacgtatacggatcagcagatccacttatggcgtgtttggtttatgaagtcactctatacttc

SEQ ID NO: 20758 - DNA, 689 bp, Zea mays
  Clone ID: LIB3245-170-A6_FLI
gtgattactacagataccttgctgagttcaagactggagctgagagaaaggacgccgctgagaacacgatggtggcatacaaggctgcccaggacattgctctggctgagcttgctccaactcaccctattaggcttggactggcacttaacttctcagtgttctactatgagattctgaactcacctgatcgcgcctgcagtcttgcaaagcaggcttttgacgaggccatctcggaactggacaccctgagcgaggagtcctacaaggacagcactttgatcatgcagctccttcgtgataacttgaccctatggacctctgacatctcggaggaccctgctgaagagattagggaggcgcccaagcgggactcgagtgaggggcagtaaagccggctttatgtgcctagaaactagtagctagtgtttgctgctgtcgaatgacactatgcaatgtgatctggaacctggtttcttgggtgcgacgcttgtagccgtgttatgactgtcgtccgtaaaatttgggggctccccgtaagggatgctgcctggcaaggcctcggtgtcccacctcgtctgtggcgtggggcgctggagcccggtctggttgggttgggaagccctttaaactgttgtcacttgcattttaccttttccatcgctgtttattgtgagtggtcctatatc

SEQ ID NO: 20759 - DNA, 1525 bp, Zea mays
  Clone ID: LIB3245-170-H8_FLI
ccccaacctctctctctcccccctaggagtgggagctcctggctccatctatccgcctgcagatatcacaagcttttcctgctgctgctgctgcagcagcacctgcagcttctccgtctgcagtgcgagcagctgctaaaaattcccccataagcctctggcttcctgcccccctcactttcttggaagcccagcacaacacgaggatcatattcactccctacagtggcgtactagaataccagttgtgcgcaaacagcggcagcagccgtgatgtacaggtgagctagctctgccgctccactccatggaggatctgtacagcatccacccggggatctcgcgggtcgtcggaggcgcggcgagcgaggcgtccgtcgccggcgccggcgccggcgggccctcgccgtcggatctgacggagctcatgaaggcgcagatcgccagccaccctcgctacccgtccctcctctccgcctacatcgagtgccgcaaggtgggagcgcatccgcatgtgacgtcgctgctggaggaggtcagccgggagaggcgccccggccccggcgccggcgccggggagatcggtgtcgatcctgagctcgacgaattcatggacgcttactgccgggtactggtgcgctacaaggaggagctgacccggccgttcgacgaggccgcgtcgttcctgagcagcatccaggcgcagctcagcgacctctgcagcggcggcagctcgccggcggctaccgccacgcactccgatgacatgatgggctcctctgaggatgagcaatgctcaggggacactgatgtgccagacatggggcaagaacatagctctcacttaggtgaccacgagctcaaggagatgcttcttaagaagtacagtggatgcctcagccgtcttcgttcagagttcctgaagaagcggaagaaagggaagctaccaaaggatgctcggacggtgttgctagagtggtggaacacgcactaccgctggccttaccctacggaggaagataaggtgaggctcgcagcaatgaccggtctcgacccgaagcagatcaacaactggttcatcaaccagaggaagaggcattggaagccatcggaggacatgcggttcgcgctcatggagggtgttgccggtgggtcttctgggacgacactctacttcgatacaggcacaattggaccctgaatcatacaccacttgggatgacaactggccagctcatattagtaataagatctggcatgtggagtgacgatcggctcggtgaaaattgaaaataaatctgctgggctgaggttgatcagactagtcagttgccctattattttacaagatcatgtgtatatggtgccgtcgtatcagaacaaactgtatgcatgtatgggcgaattgagacctgcaaaaggagtttaattagtagtttcacgtattggctcatggatttgtaatactagctacccaatttaattgttagataggctgaagggcttataaaggcaaatttacttc

SEQ ID NO: 20760 - DNA, 1516 bp, Zea mays
  Clone ID: LIB3245-175-H1_FLI
gtctctctctgtctagcggccgagtttaacagttaaaccctagctcaccgtcgtgctcgcctccccgcgcctgctccggtgctcccttcaggcactgacagttcgccgccgcggcggcgctttcgagcccacgcggaagcgcacctagtgccatggcgaagaagcggaagcacaccgacgcccaggcagagacggccggcgcagagaagccagacgactccgcaccggcgcgcccggagcgcacgctcttcggcttcaaggatccggcccccgacgccgtgcctgactccgcggcctccagggccgcggtggcgccgtttaggaacagggagaaggtactcatcacctgctcccgccgcatcacgtacaggtatcgtcatctgatgcaggacgtgttgtcgatgctcccgcacgcgaagaaggacagcaaggtcgagtcgaagcagagcaaggggaacgctctcagacgagatgctcgagctcaggagctgctccagttgtctcttcttcgagtgccgaaaacagaaggatctttacctttggatggtgaagtctcctggaggaccatcagtgaaatttctagttaatgctgttcacaccatggaggagttgaagcttacgggtaaccatctgaaagggtcacggccacttcttacattttctacaaattttgatgagcaacctcattggaagcttgtgaaggaaattataactcatatatttgctactcctaaagatcaccgtaaagcaaaacctttccatgaccatgtatttgtcttctccattgtggatggccatgtttggtttcgaaactaccagatttctgttccccacaatgagattgataaagttgataaaggtggtatggataaaatgacacttattgaggttggccccaggttctgtttgaatccaatcaaaatatttggtggtagttttggtggtcctacatggtatgagaacccatactacatttcccccaatcagatccgtgcactagagaagaggcagaaggcaggcaaatatgccaagaaggtgaaggccaaggtgaggaggaagatgcacgagatggagaacacgctggagcctgatgagtttgctgagctctggaaaggggagtaggctttgatcgaccctgtcaatgtcgtgaagcacccgcaactcctgtcagcaagcgcagattttgtttacctgtgtggcagtgtctatgttgtggaagttttgtatgacaaggcctacgtttattttacataaaatcggattttagtgataacttatgcccatatgacattctctcttgtttgcttctagtggatgtagtgccaagtgttatatcacttatgtgattggtagctgagaatcatggggaagcgcgatcacagttcaaacctcaagatatcaatgtgatagccatagccgtgttccatatgtatactatgtacttcatttcagcaatggttttgtaaggaaaatagatcgagcttcatttaaagtaaagttttagtgtttgatgagc

SEQ ID NO: 20761 - DNA, 1683 bp, Zea mays
  Clone ID: LIB3245-182-D8_FLI
caacaagcactagcagttgtgcccttgctgtgtttggttgggccctcctcttcctcttctccttctccagtcctgttggcatcgcgtacaagagggcagccagtggaccctcgctgccgccattgctggggtgggccgtgctccagccttgtgcggttggcaggcctactagctgtagagtatagtggaggtggagtagtttttttcgcttccattggcctccatccacctctcctccactcgacctgcgcttcactacagcccactggcaggggaaggggagcgtcgaccaattcgtcccgccctcgccgcgccgctggcctcgctcgcgtgccctccccgatggcggcagcggcgatccaccagttcgccgagtgtatcacctgccacgcctggagccccgaccagtcgatgattgccttttgcccaaacaaccatgaagtacatatctataaattcttcacagacaagtgggagaaacttcatgttttgtcaaagcatgatcaaatagtttcgggaatagactggagtaattcatccaacaaaatcgtaacagtttcacatgatagaaattcatatgtttggacacaagaaggatctgattggatacctactctggttattctaaagttaaatcgtgcagctttatgtgttcagtggagcccaaaagaaaacaagtttgccgtgggaagtggtgccaaatctgtgtgtatttgttattatgaacaagaaaacaattggtggattagcaaggttatcaggaaaaggcatgaatcttctgtcactagtcttgcatggcatccaaacaatatatatcttgcaacaacgtctacagatggtaaatgcagagtgttctctacttttatcaagggtgtagacacaaggggatcacaatcgagcacttcaaccaattcaaaattcggagagcaaattgctcagcttgatctatcatctacctgggtatttggtgtaaggtggtcaccaagtgggaagacattggcctatgcagggcataactccatggtttatgtcatcgatgaagttgaatcttctcctgtggcccaaaacttgacgctgcgtgatctgcctctccgtgatgttctttttgtctctgagcgcacattggttggtgtcggatttgactgcaatcctatgatctttgctgctgatgatactgggctttggagtttcgtaagattcttggacgagatgaaagctgctccatcagcttcaaaagcctcacagctctctgaagcccttggaaagctatatggacaatcaaagcagggggctagtagcgacactgttgaaccatcgaaagctcgtggtggggcccatgagaattgcataacgtgtattgtacccttgagaaaaggaagcgatggtactatcaaacgattcagcacgtcaggattggatggtaaggtcgtggtatgggatttggaaaaccacgtcagcattgcaaaatagctcgagggaaggctttcgttaacaatcaaatcgagggggcttctgtcattacccatcgtgctcaggggaccaccattcgtggcagcggggtcctgcaggttttcaagatccagggccagccaggtagattttttttgggtgcctgtacacagaaacattgccttagcgtagggagaacttgcatctatcaagtagattcaatttttggcgagt

SEQ ID NO: 20762 - DNA, 794 bp, Zea mays
  Clone ID: LIB3245-185-F4_FLI
atcgacacgttcgggcaaaggacctctatatatcgaggtgtaacaaggcatagatggacagggcggtatgaggctcatctatgggataatagttgtagaagggaagggcagagtcgcaagggtaggcaagtttaccttggtggctatgacaaggaggacaaggcagcaagggcttacgatttggcagctctcaagtattggggcactacgacaacaacaaatttccctataagcaactacgaaaaagagctagaagaaatgaaacatatgactagacaggagtacattgcatacctaagaagaaatagcagtggattttctcgtggggcatcaaagtatcgtggagtaactagacatcatcagcatgggagatggcaagcaaggatagggagagttgcaggaaacaaggatctttacttgggcacattcagcaccgaggaggaggcggcggaggcctacgacatcgccgcgatcaagttccgcggtctcaacgccgtcaccaacttcgacatgagccgctacgacgtgaagagcatcctcgagagcagcacactgcctgtcggcggtgcggccaggcgcctcaaggacgccgtggaccacgtggaggccggcgccaccatctggcgcgccgacatggacggcgccgtgatctcccagctggccgaagccgggatgggcggctacgcctcgtacggccaccacggctggccgaccatcgcgttccagcagccgtcgccgctctccgtccactacccgtacggccagccgtcccgcgggtggtgcaaacccgagca

SEQ ID NO: 20763 - DNA, 1432 bp, Zea mays
  Clone ID: LIB3245-188-B8_FLI
gcctctcctctcgtttgcctgcgccgccgcgatcgccaatcggcatggctcttcccaaaccccgcccgccaacgccgacggcgtcagcggccacgggcacctcctcgtcgcgaatagactcgccatcgctaaaggccgcgctcgcaatggctctcatccactacaaccgcctccctggcaaagccaacgccaccgcgggcacatcacccccgtctctcctccactggaagcgcaaggccaaggaccggaagcgcgaaatcctccgcctccgcgaggagctcaaggtcctccaagatggggtgcgcggggaggagatggagcccccggttgcgtcgtgccggtgccacttcttcgacgggtgccgggaccttcgaccgcagcagggtggcggtggtggggagcactgggttgacgaggtgctgaggaggaggtttctcagactggtgcggtggaaggagaagcgacggcgagtggatcgatctcttccaagttctagtttgatcgatttcaacagtgaggatgagatgcagcagctcagcatgtcgactgatttcctggtggagctatcagacggcatttttgccaaaagtgaagctggccactcatttgctacattttctcaccaagcagtagatttcattttggctacactgaagaacattctttcatcggaaagggaaaaagacttagttggggagataatcgatagtttagtgactcgtttgatgaaaaggatgtgcactgttcctgaaaagcttgtcacatcagattcaggatcaactggctgctcagatgcccagttctcagtgcagcacttattccgtaagttgggaaatgatgaattcattggtcagcgggtaatccttgtagtttctcaaaagatatccaacgtatctgaaagattgttcttggctgatccgtttgctgatgctttccctgatatgcatgacaatatattcatcatgattcagttacttgagttcctcatatctgattacatgaaagtttggctatgctgtgagcatattaacaaaagactttttgaagaatgtaccagatctattctcaaggcacgcaatgatttgcaaatcctggaaaacatgaatgggctctatgtggtgtacattgagcgtgtggtcggaaggttggcaagggatgtggctcctgctgcacatcaggggaagctggacctagaagttttctccaaactgctgtgctgagagtgccttgcatatgacattccaagcctgacccggcctgttatatgcttaggttgattcaaaaccacgacaccattggtccacttagactatgcatagttacatttctgtttgaaagacaaactttagaatttggtagtggatctacttgtatggcctgttgtttcatgtcaccattgatagttgattagtttcattttgctgacttaaac

SEQ ID NO: 20764 - DNA, 2116 bp, Zea mays
  Clone ID: LIB3245-189-A1_FLI
cagcaagcagcagaaaacatctccgggagtccgaaccacccacaggcggcaggccacaccacaggttccgcttccgcacagctgctagctagctagcgttcgcaagtagcagtagcgttccatcgaggtcgaggcaatggcggtgatggccgaagtagtgtcgaccaccggcgcggcgctccggagcccggcctcgcagccgctgccggccgcggtgaagaacgcagacgctgagaagctccagttcatcgaggagatgacctccaacgtggacgccgtgcaggagcgcgtgctgggggagatcctcgcccgcaacgccggcaccgagtacctcgccaagtacggcctcgccgccgctactacggaccgcgccaccttccgcgccaaggtgccgatggcgacgtacgaggacctgcagccgtacatccgccgcattgccgacggcgaccgctcgcccatcctgtcggggcacccggtgtccgagttcctcaccagctccggcacgtccgccggcgagcgcaagctcatgcccaccatcgaggacgagctcaaccgccgccagctgctgtacagcctccagatgcccgtaatgaacctgtacgtgcccgggatggacaaggggaaggctctccatttcctctttgtcaagtcggagacgaagacgccgggcggcctcgcggcgaggcccgtcctgacgagctactacaagagcaaccacttcaagaaccgcccgttcgacgcctacaacaactacacgagccccacggcggccatcctctgcgccgacgcgttccagagcatgtacgcgcagatgctgtgcgggctgtgccagcgccaggacgtgctgcgcgtcggcgcggtgttcgcgtcgggcctcctccgcgccattcgcttcctccagctcaactgggagcagctcgcggaggacatcgaagccggctcgctcaccccgcgcgtcaccgacccgtcggtgcgcgaggcggtcgccggcatcctccgcgctgaccccgagctcgcggcgctggtccgctccgagtgctccaagggcgactgggctggcatcatcacccgcatttggcccagcaccaagtacctggacgtcatcgtcaccggcgccatggcgcagtacatcccgacgctcaagtactacagcggcgggctcccgatggcgtgcaccatgtacgcgtcctccgagtgctacttcgggctgaacctccgccccatgtgcgacccctcggaggtgtcctacaccctgatgcccaacatgtgctacttcgagttcctgccgatggactccgcggcggcgtccggcggcgacgcgagccagctggtggacctcgcccgcgtggaggtcgggcgcgagtacgagctggtgatcaccacgtacgcggggctgaaccggtaccgcgtcggcgacgtgctccaggtgaccggcttccacaactccgcgccgcagttccggttcgtgcggcgcaagaacgtgctgctgtccatcgagtccgacaagacggacgaggccgagctgcagcgcgccgtggagcgcgcgtccgcgctgctccgcccgcacggcgccgccgtggtggagtacaccagccaggcctacaccaagagcatcccgggccactacgtcatctactgggagctcctggccaagggccccgcgggcggcgccgcggtgggcgaggggacgctggagaggtgctgcctggagatggaggaggcgctgaacacggtgtacaggcagagccgcgtggcggacgggtccatcgggccgctggagatccgggtggtccggccgggcaccttcgaggagctcatggactacgccatctcccgcggcgcgtccatcaaccagtacaaggtgccccggtgcgtgacgttcccgcccatcatcgagctcctggactcccgcgtcgtgtccagccacttcagccccgcgctgccgcactggacccccggccagcgctccgactccgactagacacgcgggccggcgtgcggcgaggcgtgtccggcgcgcttaattagactgggaattcgttccttgcgtatcgcagacgtagaatatgcccgtgaaattaaaatatttgttaattttggaattttgggtactgtc

SEQ ID NO: 20765 - DNA, 691 bp, Zea mays
  Clone ID: LIB3245-191-D8_FLI
gccgggctcgttggatggcgtccggaggcgccgcccgcggtcgccttgctgaggagcgcaaggcgtggcgcaagagccatcccctcggctttgtggccaagccggcgatgctgccggatggttctgtcaatctcatgctctggaactgcgtcgtccccggcaaggaaggcactgattgggaaggtggatatttcccggtcactctccatttcactgaaaattacccaagtaaccccccaacctgcaagttcccacgaaggtttttccatgtcaatgtctatgattctggggatgtatgcctgtcaatacttggtgatgcatgggcgccttctatcacagtgcggcaaattctaataggcatccaggagctgctggagaacccaaacccagcctctcccgcacaggattttgcttacgatgtttttgcagagaatatgccagaatacaagagacgcgtccgtgagcaagccaagaggtatccgtcgctcgtgtagccgtggacctctgcaacacaattgctgctaaccaagtagtcactcactttggtgtagtggaacttgttcatgacgtgcttaactatggtgtctagttagccgtacgcttgttggaactgctaaagtgcagcttattggaactgctaaaatgcccttgactacgtcttattattatggtttatcagtatagtgttgtc

SEQ ID NO: 20766 - DNA, 2425 bp, Zea mays
  Clone ID: LIB3245-191-E9_FLI
atccgctgctcaggatccactatcccagttaatgtcagctattgaaggtttgaagcctgttcaggaagatagtctggcccatataaaatcagctattggtgaagcaatcaagtctatcccagagccaatacctgatgcccttgcaaaactttctcatgaaatacttgatgcagcaccaccaccattagctgagctgatgaaaccttttgcacaattgatggcaccaaacaataatggcaatgggccatctgatgtgcatgctgaggggtcatctagctcttccagtgcacaggtgccagctgaagctaaaaatgagcccaaagttaggccaagtttgggtcttaagaccgtgttgaaagaggctgctggacctgttcctaatgctggagcttctcaggttcaacagccattaatgtatccatctgttgaggagatgctgttcccctgtaattcagtcgacaaatctgtttgcaaagggaagattgatgctcaaagtaagggaaaatctgttacgtcctcaggcatccaacctgctcctcattctcttcgtactcatgccccacctccaccacatccgtgcatttcagaatggtcccgagcacaaagaagccaacaccgtcaattgaaatttgaagacaatgcaaaagccactaatgattctagatggcgcattccgatgtataaaatgccctatgcaccaccacctccagcagtgccacccccaggctatgtaccttctccacattttccttatccaggccgcctcttatcttctgggcatccatacggagatctcgctggtaacatggaaaactcagcaccacatagtctgcatagatggattcagtgtgatggctgtggagcgcaaccaattgttggtccacgttataaatctaatgtgaaggaagactatgatttatgtgattcctgtttccagcgcatgggaaatgaaatggagtacaccaaaatagacaagcctattttaccccacaggtttctaagagatccccatgtgtaccggaaggtgcaccatccacgggttctaatgaagtcaagacgggagaaacttgaaagtcgcttcattttggatgtgactgttcttgatggaacactgatgacaccttctaccccgttcactaagatttggcgcatgcataacaatgggtctgttgtgtggccacggggcacacagcttgtctgggttggtggagatcagtttgcattgcagacatctgttccattagagattcctgtggatggttttcctgtggacaaagagattgatgttcctgttgattttgtggcacctacaaggccagggaggtacatatcttactggaggttggcttccccttctggtcagaaatttggtcagcgagtttgggttcatatccaggtggaagacccttcttttgttaatgacaataacaggaatgctgctattaacctgaatctgcctccagagagctatagttcaaacacaaccaacttaattgatgtgaacattgagcctgctgactcagcccttagtgcacatgctaagcgcacaaaggagttccatttctgttcaactgattttcctgaacccagtaagtctgtgccttttacgttggccactacctctttgtctgcagcagctcctacaaaccaaactggtgatgttcccatgtccagtacacctgctgctgcttgtttgccctctgttaatgtgcctatgcatgaagtcgttactactcatacaccgtcacctattacgcctgtcttgcctacaactatacacttttcagccccagtatctgctcctgcaattgcccctgagcttgcatcaggggctgttggtgtgcctccacctgttagtgctgtggtacctgagctgtcagaactggatgttcacaatgaggagaagttgctgagggagctggaggaaatgggttttaggcaggtcgatctcaacaaggaaatcctcaggcagaacaattacaatctggagcagtctgtcgatgacctatgtggcgtcaatgaatgggatcctctccttgcagagctggaagagatgggatttgatgacacagagatgaacaaggagctgcttgcgaagaatgagggaagcatcaagcgagctgtgatggagctcattgccagggagaagaaggacaagtgaagatcgtgtgctatctaagtatatattcgtaaataatgagacggctgtgccactgcggtgcagccctggtgcgtctcagagcttgcttatggtgaactcttcgtgttaggtttcttccttatatctgtcgtgtctgcggtgtcgatgaactatctagtatgtggagcgtgtgcgtctcagcagttaccctgccatgccacgtggactggctgtcgtgcctactgtctgttaccatgtatatatataaaaaatgatgcgtggacc

SEQ ID NO: 20767 - DNA, 2042 bp, Zea mays
  Clone ID: LIB3245-193-D12_FLI
cgtcatcctgcaccgctgcggcctcccgcgccgtcgagagtgagcgagttcgggagcgctaccgctaccaaacatggagcttagctggagcgggagcccgtgtgagctggttgggagtcctaccaaacaggcattctaaccctaatcgagtggtgccttccctagccgtcggctatggacaagttcctcgtgccggcgccgcctcattgtggcgaggagcccgcgccgcctcctaggagacaccggtggaggcgcatcatcgcggagctggacggccgcatagactccaggttccagcacagagattcgcgcctccttcttgattccttcaccgaggttggggccttcgatcacaagtattacattcatggcgaggaaaggtgtcggacatacgtggatcgaataattagtgcttcaactataaattttcatccagtaagggagggtgtttcagcaatagaattcgatagaaagggaatatacattgcatcagtgacactctcagggtgtctgacggtgcatgactttgagactttgtactgctctaaatatggcccaccatgcagtatgccagatgaatcatcaaattatgtgctccatatatctaaccgaattcccctaaatgctgtccgatggaatccaggaaaccaagacgagattgcttgcacatcaaatcaaagtgataacgttttcctctttgatattggctatgtctcatctacaccaactgaagttttgcataaaggaaaatcgaaattcccctcgctctactctgaatcctgcaagagtttgactgatataacttttacttcagatgataagtcacggatatttgcatctggccttgatggggcagtgtacatgtgggacaggcgatcaagtaagacacactgtcttgagcttgtggcatctccagaagctcagttcaacactgtcaagttaactgtggataatcggactgtgtttggtgcaactaaaaatggcacaattcatgtttgggatctccgtggagggagggcatcagctgcttttcaaagccacaacgaggttcagcaattgatgtcagtgaaattatcaacgttattgggcaaaattgcatcgctaaaggaacaatcaaacattgtttcaagtccgattctgtcgatagacttcaaccctagttgttcatatcaattggccttccatcttgatgatggctggtctggagtcctgaatgttaacaatctcaatgtgactcatcttcactgccctcctcctgcttggttggagggcacagacttggtgctgcaaaagcaattaagaaagccaacctggctgctgacatcttcaatctatgcagttggatcttcctcatatgatggaatctatctactagactttcatccagataccagctctgcatgccatgtggactacaaagaggaaacaagagtctccggggaaaatcaacctgcaggaaacaagtttgttcctttatcccaaagggtgctttcctgtgcagcccatccactcagtcacaccataattgctggtacacagttctcatcgttgctcatgttatcacaaaagtacaagagtatcagaaatccagagccttgatgacatgccgtttcctccacgcagcatcttcaatcgtgcatctgcagaatcacaatggtgtttgttcatctccatcgtgcattaaagaattatgtgcagcatgtaaaccttgctttgctggtgcattggacactcactaggttcgaagtgctgccagcaataaccgtctttcaagaactgatgaatacgcagccattcacaaaaatgcacccatagagaagaaatctcttgctatatataaaaaagaatggcaagagatttcctcccccatagatctcttataatcctcgtcaccaaatcagctctaaagagttggatcaccaccactgtacacatcggctctgtttttcttggacatgattcttgtaatcgtcgttttcttggacatgattcttgtaatcgtcgttattcttgattagtagttcagttttcgattttggacg

SEQ ID NO: 20768 - DNA, 1595 bp, Zea mays
  Clone ID: LIB3245-195-C6_FLI
ggctctacgccgcttctagcgccccgatacgcggcgccggcgcaggcgtgcagccatggcgatgagctggatccgatcggttgttaggagggccctcatcgctccgaagccgcggggctcccgccagtttactgtcaccgccgccggcggcggcgcgacgcagaccgaaagggtggcggcggagatggtccgctacgccctcggcggcgccgtgcaccggagctcgccagaggaggcgatgcggatactggagcaaggcgcctcgaacctgcagggaggaggcgagggcagtgccgaagctgttgggttgctcatgctcgctatgtccacgctgctttaccggagtggaagacgtcaagacgcagtggaaaagctcaaagcaacccaacaagttgccccttctgcagtttttagagttgcagcgtgggaagcactaatgggattacacatggaggcagggcaggagatgtcatacttgatttccccaaatgattcagttgatctgtcaatcaaatatgatagcaaatggtctgatcaggaccatcttaaatttcgggttaatgctgtcagaggacttgttacacttctgaatggagaaacagaatcagctgcccagctgttcgatggttggtgcagagacttttctagaggcgaaaaccaaacagaaaatgctgccgtttcatacggtgaatatttgcattgtgttggggattttcaaatggcagcacaagtgtatgagaaaattctcgaggcattttgcatggatgatatgtctggaaaccttttagcagctggaaacatggttcccgaggaggcttctcttggggccacttgctcatatggccagcttttatctcactctgggaagtttgctgaggcagaggattatctcacaagagctctacagaaggctgaagaacaatttggtgcaaaccacccaaaggtcggcattatattgacctgtgtagctagaatgtacaaactaaaggcaaaatctgaaggttctacttcaattatggtccaggaggggctgtacaggaaggccctagaagtattgaaagcccctgctattaattctgagggtaccagcaaacaggttgactggagagatatcatctccctcgctagaggtgagtacgcggagctgttattaattcagtctaataggaaggcggaaggtgaacggatgaagcagtgggcagaagatgcttggaggaaccgtaggctaacgctagcacaagctctagagttttcagaaccttcaaagccgactgtcgttgttgacacccgaatcggcagggtcgtgtagcttcagtcaacaatctcgtgagatgcacaaatgaagcaatccgtggatgcacctcgtgtcgtgtatattttcgaaagtgttgctccttgcgggctgcatccggtttgatccgttcaagtcccagcacactcgcctgcttgtttttcatatcacctttttgaatagggggacattcgaggatcacaaagcttgtgcatgtgatcactttaaacatttaatagcatatgtatatgttattgtacacagaataacaccacttaaagcatctttacattttgattgctat

SEQ ID NO: 20769 - DNA, 1244 bp, Zea mays
  Clone ID: LIB3245-195-E3_FLI
agctcgcccccttcctcgccaccttgggaggcgacgagcatcaccaggacaccaggttgcctatattttcttccccttcttgaaaatggatcatagttctgacgaagatacagaaatcagtgattctgagattgatgattatgaaggaaaaatttatgcaagactgatgtcaggagatttaaaattaaataagaatggagaaaattacatttgtcccttctgtagcagcaagaagaagaattacagtaaaagtagcctggttcaacatgcctcaggagtcagtgcagcacctaatcgggaggcaaaagaaaaagcagtccatcgcgccctcttcaaatatttgaagaatggtcttgctaaatcacctgaaccagggtcacatgcaactcctgtggagccacaacctcttcagaaccgagacgagaagtttgtgtggccctggatgggtgtcctagttaatgtgcctactgaatggaaggatgggcgccaaattggagaaagtggaaatcgtctgaaggagcaactatcacacttttgcccactgagggtcatcccgttatggacttttagaggtcatacaggaaatgctattgttgagtttggaaaggactggaatggtttcagaaatgcgcgtacctttgaaagtcactttgcggcaggaggattcggtaagaaggactggattggaaaaaagaatcaaggatccgagctctatggatggcttgcgcgggctgaagattacaattctccaggaataatagcggaccacttgagaaaaaatggcgacttgaaatctgtcaatgatcttgcaaaggaaggagcgcgtaaaaatgacaggcttgttgctaatttagctaaccaaattgaggtgaaaaataggtatttacaggaactagaatgcaaatacagtgagacaactgcatcacttgagaagatgatggggcaaagggaacaacttctccagtcatacaatgaagaaattagcaagatgcagcagctagctcgcaggcattctcagaagatcattgatgagaatcaaaagttgcgttctgaccttgaggcaaaaatgaatgatcttgatgtgagatccaagcaactcgatgagattgcagcaaaaagcgattatgacagaaggagccttgagcaggagaagcaaaagaatgctatcaaatcgagtcatcttaaattggcaacattagagcagcagaaagctgatgagaatgtgctgaagcttgtggaagaac

SEQ ID NO: 20770 - DNA, 1593 bp, Zea mays
  Clone ID: LIB3245-196-B4_FLI
gaactactctcaccattaactataacaaattttgtcaccaaaatttggtggctggtggatctacttaagaatcaaaagtcagacaaggtggacatcaccatccaaccggaggagcaggaagccatgaatgatgttctagcagccaggtgacgcctgatgtctttgttcagttgatatagttgtctgattttttccttcttccaagttagaacggtctttcttgtacgtgtatttctacttcaccctcaacgaccgggtgctccgcgcgttcggcagccatgaccgcgtccacgtcatcaactttgacatcaagcaggggctacagtggccgggcctcctccagaaaaagaggaattgaagcagtatctgactcgaaaacttggtagaaaaagaggaattcctgcatacattttcgaaggaatgtgaatatatcagaactgcagtgacaaatggtagtgccattaagcatgatggctcatatgaatcagatcctgcagttgagattgttcgagttgaactccaaggtgctgctgcatttcttttattctcgtctggtacctcttgtacttcttctggttgaaggttccacgcctatatatattggagaacatggatgggaaatgcttctggtagtaaaaaaggcaacacaagaggctggttcaaaatttgaactgctaggttttgcatctgtgcataacttctatcattatcctgagagtattcgcttacgaatcagccagatacttgtgttgccaccttatcagggtgaaggccatggtcttggtcttcttgaagcaatcaattatattgcacagtctgagaacatttacgatgttacaatagaaagcccttctgattacctgcagtatgtgagatcatccattgactgcctctgtttgctcatgtttgatccgatcaaacctgcacttggtgctattgtctcgtctctgaaggagaccaacctgtcaaaaagggcccaaagtttgagaatggttccaccggttgacctgatggagactgtccgttagaagctgaagataaagaagaaacagttcctccggtgctgggaaattctggtcttcctaagcctcgactctcaggatcataagagcatggacaacttcagggcctgcatatatgacctcatgaagggggagatccttggcagtgcctctggaactaacaggaagcgtctattgcagatgccaaccagtttcaataaggaggcatcttttgctgtgtattggacacatgagattggggatgtggatgaacaaactgtttagcagcagccagaggatctcaggacgcaggagcaacagctcaatgagctcgtggacatccaaatcgaggagattgatggggtcgccaagaacgtcacttcacgtggcaaggataagatggcagagctggcggttcaatgaatctgggtgaggttcctacttcaaacgatgttaaaatgttgtcgtagcttatctggtgaggtctcttttacgagttggcttcttggtagaaagggaatgtcacggcataggcactgagtagattgtcacgacagattattatatacttcaattctggaatatttgatgg

SEQ ID NO: 20771 - DNA, 1375 bp, Zea mays
  Clone ID: LIB3245-199-D10_FLI
tcatcttgtagaaaagaaagagtgagagtgagattggcaagggtatagggttcttggtcgatcaaatatctttcccctcttggattctcctcttcctgcttcgttctcgccagatcgatctcactacgtgcctgcgtagctagccactctgtatgcaccatcaccaccaggaccaggccatgggcgacgcgctgtgggacctgctcggggaggagatggcagcggcgggcggggagcacgggctgcccccggggtttcggttccaccccaccgacgaggagctggtcaccttctacctcgccgccaaggtgttcaacggcgcctgctgtggcatcgacatcgccgaggtggacctcaaccggtgcgagccgtgggagctccccgacgcggcgcgtatgggggagcgcgagtggtacttcttcagcctccgcgaccgcaagtaccccacgggcctccgtaccaaccgcgccaccggcgccgggtactggaaggccaccgggaaggaccgcgaggtgctcaacgccgccaccggcgcgctcctcggcatgaagaagacgctcgtcttctacaagggccgggcgccgcgcggcgagaagaccaagtgggtcctgcacgagtatcgcctcgacggcgacttcgccgccgctcgccgcccctgcaaggaggaatgggtcatctgcaggatactgcacaaggcaggcgaccagtatagcaagctgatgatggtgaagagcccctactacctgcccatggcgatggacccttccagcttctgcttccaggaggacccaaccgggcatcccctcccgaaccctagtggctgcacccccttccaccacggccacccccaccacagcatgcagccgcctccattgccgccgagcaaccatgctggcaaggccgtcttcacgggagcagcagcctcctgctgcatgcaacaagagccggcagacggcagcaacagcgccgtgctgcccatgccgccgttccctcccttcaccaccatcgtcgccggcaagccggcggtcccggcgccgccgccccaggttgtcaacgccggtccacaggagccaccgccacctacctggctggaggcctacctgcagcacactggtgggatcctttatgagatgggtgtgggtccaactgcagcgcccaggggcgcgtgatccggaccgtcggttccttagggttacccccctacgtacgtactgaaacactgatgatccatcgatttacctggtctgtaatgtgcggtgaagcttagtatttccaagtgacatatttcgacaagcacttgtagttattaaaaaagagttatcttgtattcggtggcatcattagtcgtcgttgttatgaaatcatgtgtgcttat

SEQ ID NO: 20772 - DNA, 410 bp, Zea mays
  Clone ID: LIB3245-205-C4_FLI
cttctctccccagattcactcaccgtccgtccgtccagggagccatggcagcagcctgcatctgtctgcagctctctctcccaagcaaccattcttcctctgcatgtcctccagcatacaggaagcgtgtcgcgctagccccagggagaggaaaccgtcttctctgcactgcatctggcgcctcttcttctgtggtggtgaccaaggagcaggaggaaggatctcctgagcccgaaatctttagctacaaagacgaccccaacttcaggggctgcaagggctgcggcagggacgagcttcagaggggctgcaatggacaaggccggatccagggcggcatagccgccgtcccgggcttcggctggtggcccatcaaggcgtaccggccgtgccccggcttcgtcgcgtcc

SEQ ID NO: 20773 - DNA, 1097 bp, Zea mays
  Clone ID: LIB3245-206-B1_FLI
tgattatggctcccacgcttgagctgaggcagcaggcgctcgaccgtctcttgccgtatcagaggtctgacttcgaaggcattttccgtgctatggatggactcccggtgaccatccgactcctggaccctcccctccacgagttccttccagaagggaacatcgaggacattgtaagtgaattatgtgctgagacgggagccaaccaggaggatgccctcgcgcgaattgaaaagctttcagaagtaaacccgatgcttggcttccgtgggtgcaggcttggtatatcgtaccctgaattgacagagatgcaagcccgggccatttttgaagctgctatagcaatgaccaaccagggtgttcaagtgttcccagagataatggttcctcttgttggaacaccacaggaactggggcatcaagtgactcttatccgccaagttgctgagaaagtgttcgccaatgtgggcaagactatcgggtacaaagttggaacaatgattgagatccccagggcagctctggtggctgatgagatagcggagcaggctgaattcttctccttcggaacgaacgacctgacgcagatgacctttgggtacagcagggatgatgtggggaagttcattcccgtctatcttgctcagggcatcctccaacatgaccccttcgaggtcctggaccagaggggagtgggcgagctggtgaagtttgctacagagaggggccgcaaagctaggcctaacttgaaggtgggcatttgtggagaacacggtggagagccttcctctgtggccttcttcgcgaaggctgggctggattacgtttcttgctcccctttcagggttccgattgctaggctagctgcagctcaggtgcttgtctgaggctgcctcctcattggcaaccggattgcctgctgctggtggatgtggtgatcaacagtattattacagagccatgctatgtgaacattactagtagcagtgctcataaaagctacaatcccatgtcctttttttccccagtcatgtaaaacttccaaactgctccatggttcaaaactctgttcttcaatacatcatcaattatcgatt

SEQ ID NO: 20774 - DNA, 1154 bp, Zea mays
  Clone ID: LIB3245-206-F3_FLI
gccggacagagcacatgttctttgcttcagacgagaggattaaggctgtcaggcagatgattatggctcccacgcttgagctgaggcagcaggcgctcgaccgtctcttgccgtatcagaggtctgacttcgaaggcattttccgtgctatggatggactcccggtgaccatccgactcctggaccctcccctccacgagttccttccagaagggaacatcgaggacattgtaagtgaattatgtgctgagacgggagccaaccaggaggatgccctcgcgcgaattgaaaagctttcagaagtaaacccgatgcttggcttccgtgggtgcaggcttggtatatcgtaccctgaattgacagagatgcaagcccgggccatttttgaagctgctatagcaatgaccaaccagggtgttcaagtgttcccagagataatggttcctcttgttggaacaccacaggaactggggcatcaagtgactcttatccgccaagttgctgagaaagtgttcgccaatgtgggcaagactatcgggtacaaagttggaacaatgattgagatccccagggcagctctggtggctgatgagatagcggagcaggctgaattcttctccttcggaacgaacgacctgacgcagatgacctttgggtacagcagggatgatgtggggaagttcattcccgtctatcttgctcagggcatcctccaacatgaccccttcgaggtcctggaccagaggggagtgggcgagctggtgaagtttgctacagagaggggccgcaaagctaggcctaacttgaaggtgggcatttgtggagaacacggtggagagccttcctctgtggccttcttcgcgaaggctgggctggattacgtttcttgctcccctttcagggttccgattgctaggctagctgcagctcaggtgcttgtctgaggctgcctcctcattggcaaccggattgcctgctgctggtggatgtggtgatcaacagtattattacagagccatgctatgtgaacattactagtagcagtgctcataaaagctacaatcccatgtcctttttttccccagtcatgtaaaacttccaaactgctccatggttcaaaactctgttcttcaatacatcatcaattatcgatt

SEQ ID NO: 20775 - DNA, 1134 bp, Zea mays
  Clone ID: LIB3245-210-D5_FLI
caagatcaagaataatccagcgccacacgggatcgacctagtacatagatacaacaagtcaacaacgtactaactagcccaccatggcgtcacgcctcgccgccgcccttctcctcgccgtcgtcgccctgctgacgtccgtggcgccgctggcgtgcggccaggcagcgtcggcgccgtccccagcccccgcgccgcccaagaccatcacggcgatcctgagcaaggccgggcagttcaccaagttcctccagctgctgcagtcgacgcgggaggcggagcagatcaccaaccagctcaagggcaagccgtccaacggcgggctcacggtgttcgcgccgcccgacagcgccttctccgcgctccccgccggcacgctcaactccctctccgaccagcagaagacgtcgctggtgcagttccacgtcgtgtccgcggcgctccccgccgcgcagctcgagaccgtcagcaacccgctgcggacgcaggctggcgacaccggcaggggcaagtacccgctcaacctcaccgcggacggctccagcgtcaacgtctccacgggggtcgtcaacgccacgctcgacgccacgccgctttacgccggggacaggctcgtcgtctaccaggtcagcaaggtgctgctgccgtgggcgctctacggcccgccggtccccgcgccggccccttccccggcggagagcaagaagaagaagaaggccacgccggatgctgtggcggatgcgccggcggctgagactgcggcggggacgacgacggcgtcggcgaccgcgcgcgcgggagggaccccagctggcgtccgagctgcttcgtcctgcgtcgtggcgctcgccgccgtggcagctttgtggtgggctatctgaccacgtacagtacagtaaggatgcatgcgtgttttgccatcgtggagcttctttccggacagatttgtttctaattcatcaatcgaccagttcattattcttttcttcgttttataaaaaaagatgtattgtggatgtatttggtggcgttttgtaatgtttgtattgtatactttgaagaactgtacatcatattttgtggacgtatattgttatccaattgtattaatgtggacattatttgcttagggct

SEQ ID NO: 20776 - DNA, 1587 bp, Zea mays
  Clone ID: LIB3245-211-F1_FLI
cttgctttgtgccaccaccgtaccgtaccaaacagatcaaatcagagatggcaagtcgtagtagctctgcagaaggtgcaggcaggacgttgcctgtcaatctcaagttgatcaccgtgctgagcatcgatggcggcggcatcagagggatcatcccggccaccatcctcgccttcctggaagcgaagctccaggaactggacgggccagacgctcgtatcgcggactacttcgacgtcgtcgccggcacgagcaccggcggtctcctgacggcgatgctcacggccccggacacgaacgaacggccgctgttcgccgccaaggacctggcgcggttctacatccagcactcgcccaaaatcttccggcagaagaatgctatggggtccaagctcgtcggcaagctgaggatggcttgtgggcccaagtacgacggcaagtacctccatgcgcagctccgacggcttcttggtaatatgaggctggacaggacactgaccaatgttgtcatcccgaccttcgacattgcctacatgcaacccatgattttctccagctttgagttgaagcaccggccgtcgacaaatgcgcttctgtcagacatatgcatgagcacctctgccgcgcctacctacttcccgccgcactacttccagaccagggacgagaatggcaggaggaaggccttcaacctcgtggacggcggaatcgctgcgaacaaccccaccctgtgcgccatgggccaggtgtctaaggacatcatccttgcggacgacgacttcttcccggtgatgccggcggactacggcaagttcatggtcatctcgctcggctgcgggtcgaaccggaaccggaggtactgcgccaaggccgccgccaggtggggcgtcttcagctggctcttcaaggacggcagcgctcccatcatcgacatgttcaactccgccagcgccgacatggtcgacatccacctctgcgtcctcttcagggccctgcgctccagcgaaaactacctgcgcattcagtacgatcagctgacgggcagcgcaggctccatagacgactcgtccaggaagaacatggatagactggtgaggatagggaacaagctcctggacatgaacgtctcccgggtggacatggagaccggccggaacgtggaggtgcccggtgcagggaccaacgccgagaggcttgccaagttcgccaggcagctctccgacgagcgacggcgccggagccagaacgagcttattatgaattccgagcaagtgtttcaaattcaacatcaagcttggtactacggtggtgacgcttgagctgcatccggcctgctaaatgaggtttcagtactgttctagagccgtgtttcatgctttcggctatgtaccattattcctcatgccgctgttgtcaacttcgcttcagtataacctgggcaagaggtgtagacgtgtagtgttgatatctcgactcgtcaggacatatccacgggctcaaatctttcaggaaagaagcgacagtaccaggcctagcccaggtgatgccgcgtgatgaagtgaagagttcgaatgactttggacggtc

SEQ ID NO: 20777 - DNA, 1587 bp, Zea mays; identical to SEQ ID NO: 20776
  Clone ID: LIB3245-212-F1_FLI

SEQ ID NO: 20778 - DNA, 2461 bp, Zea mays
  Clone ID: LIB3245-216-B8_FLI
gagagttgtcgtctgctgcagggatggccggcgtcctgccgaggtttggccccttcggccctctgccgccatcggatgagttcgggatcagggagacgagaccccgtctcgccggcaggcgggccggcgggtacgacctcgtggagcggatggagtacctgtacgtgcgcatcctcaaggcgcgggacctcaagtggactggcagcttcgacccgctcgcggaggtgaagctcgggagctactcctgcgccacgcggcacatcgagaagacgacgagcccggagtggaacgacgtgttcgcgttctcgcgggagaggatccaggcctcgttcctggacgtcgtggtcaagggcaagggcttcgccaaggacgacttcgtcggccgcctgcgcttcgacctggccgacgccccgctccgcgtgccgcccgacagcgcgctcgcgccgcagtggtaccacgtcttcgacaagaaggcggagcgcgggggcgaggtgatgatggccgtgtggttcggcacgcaggccgacgagtgcttcccgctggcggtgcacgccgacgcctcgttcgccgtggacgccaagctggccgcgcacatccgctgcaagcagtacaccgtgccgcgcctctggtacgtgcgcgtcaatgtcatcgaggcccgcgacatcgcattcgcggacaaggcgcgcgtcggcgaggtcttcgtgcgctccaggatcgccgcgcaggtgcacaagaccaggacgtgcgtcgcccgcctgcccacgtgcggctggaacgaggaccacatgttcgtcgccgccgagccgttcgaggaccacctcatcctctccgtcgaggaccgcgtcaaggtcgacaaggaggaggtcattggccatgtccacatcccattcaaagaattcgaacggcggtgggacgcccgcccgattcgcccaagatggtttaatctggtgcggccagaaggagccgccaaaatcgacaagttctctgccaagatatgcgtccggctgtgcctcgagggcggatacagagtgctgacagagccggtccactacctgagcgacgtccggccggcggcgagggagctgtggcaccacaggccgcccattggcctcatcgagctcggcatccacaacgcgttcggcctgagctccgttcgcacgcgcgacggccggggctcctgcgacgcctactgcgtggccaagtacggcgtcaagtggttccgcacgcagaccgtcatcgacagcctcgcgccgcggttccaccagcagtgcttctgggacgtgcacgaccactgcaccgtgctcaccgtcgccgtcttccacaactgccagataggcgacaagggtggcctcgtgaccggcgaccccgtcaaggacatcctcctcggcaaggtgcgcatccggctctcgacgctcgagaccgggcgcatctacacgcacgcgtaccctctcgtctccctccacggcggcggcatcaagaagatgggcgagctccagctcgccgtgcgcttctcgagcacgtcgacgctgggcctgctccagacgtacgcgcagccacacctgccgccgatgcactaccactccccgctgtccatcgtgcaccaggagacgctgcggcgggaggcggtgtcgctcatcgcgcaccggctgggccggatggacccgccgctgcggcgggagtgcatcgagcacctctgcgaggcgcactcgcaccggtggagcatgcgccgcagcaaggcccacttcttccgcctcatggcggcgctggcgcccctgttcacggggctcaggtggttcgtcgacgtctgtcactggaagaacccgtccaccaccgtcgcggtccacatcatctacgccatgctggtgtgctgccccaacctcatcatgcccaccttcttcatgtacaagttcctcatcggcctctggaactaccggcgccggccgaggcacccgtggcacgtcgacaccaaggtgtcgcacgccgagatggcgcacctggacgagctggacgaggagttcgacgacttcccgacggcgcgtcgtcccgaggtgatccgcatgcggtacgacaggctgaggagcctcggggcgcggatacaggagatggtcggcgacgttgcggcccacgccgagcgtgcgcggtgcgcgatgacgtggcgcgacccccgcgccacggccatgtacctgctggcgtgcctgttccttgcggtcaccaccctcctggcaccgttccaggcggtggcgctgctcacggggttctacgtgatgcggcacccgacgctccggcagaggctgcccgacgtgccggcgaacttcttccggcgactgccatgcaaggtcgattgcctgctttgattgcggatcaaatgatgtttcagtccgtaatttgatattttattgttagcaccgttcgactcttcaattctataaatgttgatctagtatacaattcctccgtttat

SEQ ID NO: 20779 - DNA, 1034 bp, Zea mays
  Clone ID: LIB3245-218-D3_FLI
agatcctcctctcgccttgcggctccccgcccctctccccgcccccgaccgtatcgtctccctctttcacatatccccacactcatcgccctctcgctccacataaccacattcccttcccaccacctttcctctctctctcctcggccgccgttcctgctccgtccacccccaccacatgcggcggcgcgggcgcctccccgcggtgctgtggctcgttgccgtgacgttggcggcgctgctggcgcggccggcgaacgcggcgtggtgcatcgcgcggagcggggcgtcggacaaggcgctgcagtcggcgctggactacgcgtgcggccccgcggggggtgcggactgcgcgcccatcctgaccagcggcctctgctacctgcccaacacgctcgccgcccacgcctcctacgccttcaactccatcttccagcgttcccgcgccgcgccgggggcatgcgacttcgccggcactgccaccgtcacgctcaccgaccccagttatggatcatgcacctacccttcatctccaagcactgccgggcaaacaggatcacctggttcaacatccatgccagggactcccacttctttgtcgccaaaaggcactgggagcaccggaggattgaacccacctgacgtcgattctaccgactccaatgctgaacctctggcgaccgcgtccctctcatctcttgctctgctctgtttcatgtacatgttcttgcagttgtggtgatgcatggatgatctagctaggttcagtagagcattgagacgcagtattgttgttgcatcgtgatacaggagaccccaccacagttttgttccagggaattggttggttatggttggtggtaagccgttgtggtctgccgttcaagtgcaaggcaagagtgcccattggttggattctcaactcattaggcttcttttcgtctaaaaggtcattatgtttcttttttttcttggggatctgattctgttttgttgacgatcttaatttttttggttgatttgagcttggtttt

SEQ ID NO: 20780 - DNA, 1014 bp, Zea mays
  Clone ID: LIB3245-223-G6_FLI
gaatcgctagaatccaaagccaaaaccccaatcgcacaggagagaccgagagagaggttttccatccatggctcccggcgtcgcttccgtgctggtcccgcaggagcccgtcctcctcaaggacatcctcgcctcaccgtccccctgcgggaacaccgctgtctccgcccgccacctcttcggcaacggagtcgcaccgccacgctcctcggacgacggcatcaaggaagccgctgccgaccgccacggtgaccgcgacctctccatccccaagatcttcaccggagacgtgctggacctgctcgacgatgctgcgaggctggacctgatgctggcgctgacgggggacggcggtgcggcgtccatggccggcttctccgcgcgcgggtggtgggtctcgaaggaggatggcgacgcggtgcagctgaaggtgccgatgccggggctggggaaggagcacgtgaagatgcgggtggagaaggacgccctggtgatcaagggggaggccggcaaggacctcgagggcgacgacgacaagggcccggcgcggtacagctgccgcatcggcctctcctcccaggctttcaagatggaccagatcaaggctgacatgaagaacggcgtgctcagggtcaccgtcccgaagatcaaggacgaggagcgcaaggacgtcttcgagatcaagatcgagtagggggtgtgcatcggatgggtcctcccaggtctcgtagttgcagtagtccatatcgtagttgcagtccatatccatatcgtagttgccatgagctagtcgtgctagtagtttcaattactggagtgcagtagtcgtttctgttgcagagcagtcgtagtactagtagctttctggtggtgctccgtctcgtgcctgatgcgaggcagcgtatacctttctgttggtcttgcaaagttcagttccctggatggcgacgatcactgacgatcttgtgatgaacttcaaatggtaatggaatctgcagttaataatcgacatct

SEQ ID NO: 20781 - DNA, 1625 bp, Zea mays; identical to SEQ ID NO: 20690
  Clone ID: LIB3245-225-E3_FLI

SEQ ID NO: 20782 - DNA, 1167 bp, Zea mays
  Clone ID: LIB3245-225-F7_FLI
gttctaaaaaaatgattcatacctactgaaaaccgttctcactctatctaattccttctatttttttcttttttctaaatgaaccctcacccagcattcaccatacgcagtttattttagcagttgatatactatatcaaactaagaaccatgtgaagatagttctctatcatagcaacctctagcatcgtagggatctattttccatttttaacaatcaggttaatagcttgagcttgggtgccttaaatgctcactatttttcatatggggtgatgtgcatcaagcggacggtctggcaagattgacaaatcattgtgctttctcccccggtaagaattgcatcttgacacatcagcttcaaagcagatgctgaccgaaagaattagcattcttttttgggatgtttagaagtcctatcatgtgatctgttcaaaagggagtcttaaaaagaaacagttccaaaacctcaaataatatacatatagatatcaaaaggttgtataatgttgttgccttgtttgctgagtggttctattgattaattaaagctctagcatattgttaaggtttcgacctgagtttgttccatgattttagtggaacgactcaatttcttattgatgggataacaggcagctgttgatcaaatcgaaccctggcgaagttgtgaagcctgtgatcagccggctacactaccacctgaaccggttgcattgcatagactcttccgagtttaacaaattcattcaaggcaatcaacgatgaaggcatgcccatgtatcagaggcccttcatgaagggcaagctgtacatccacttctcggtggagttcccggactcattgagcccggagcagtggaatgccctggaggatgttctcccacccaagccagtatcacagtacactgacatagagctggacgagtgcgaggagacaatgccctacgacgtgaacatcgaagaggagatgcggaggcagcagcagcaccaggaggcctacgacgaggatgatgatgtgccaggcggtgggcagagggtgcagtgcgcccagcagtaggcagcttacgtcaaatttgctgtttcgctttgggcgactattgagtttacccgcttgtattggtctgatgatacttcggttacaagagtgcagtattactaaggatt

SEQ ID NO: 20783 - DNA, 1981 bp, Zea mays
  Clone ID: LIB3245-233-C1_FLI
cacctctgcctgggccctacggctccgtctcgatctcgacaagtttatcacaatgccacgccggatgccaagtctctcaaatctggaatcctttcacgccgccactctcccctttttccttctctcttcgtcgttgtggctcctgccttcctgcctcggcgcatcgactcgcggagagggacagcacagcgcctcctccccatcctttctccattcccagatcgaaggtccataaaaaaccatccttttgcatctgattgagcactgtctttgtgcaagagaacaatttagttgtacatacaaacaaaaagaagtgggagtatttttcagagtttattagaagagactgtttcgaggacccaggtcagagaaaggcgagaagctttagcagcggcaatggtctggtcaatggacccgcaggtgaccgtccacggcgactgggtgtcagccgtggtgccgctgatgaagctgctgtgcctggcggtgatcggcctgctcctcgccaacccgcgggtccaggtcgtgcccagggccaccttcaagctcctgagcaagctcgtcttcgcgctcttcctcccctgcctcatcttcgtccacctcggcaagtcggtcaccatagacaacgtcctgcactggtggttcatccccgtcaacgtgctcatcagcactgccatcgggtgcgcccttgggtacatcgtggccctgatctgccgcccgccgccgcacctgttccggtttacggtgatcatgaccgggttcggtaacacggggaacctcccgatcgcgatcatcgggtcagtctgccacaccaacgaccaccccttcggccctgggtgcgacaccatgggcatcgcctatgtctcgttcgcgcagtgggttgcggtcattcttgtgtacactctggtctaccacatgatggagccaccgatgcagttctacgagatcgtcggggaagggaatgagatacagcaggaacccgagctggtcagcaactacagtaggtccctgcttcatgaggcggagtggccagggatggtcgacaaggaaactgagcattcgaagacaccgttcatcgcgagagttttcatgagcatttcaggttcctcacagaacacgttccctgacatcgatttcaccgaagaaggaacttctgcagctggaccaagcagtcctaagtcgctccgatgtctggcagagccaagagtggtcaggaggattagggttgtcgccgagaagactccgatccagcacgtccttcagcccccgacgatcgcctctttgcttgccattaccatcggcatggttcctgtcctgaaagattttgttttcggggctgatgcgccgctctcgttcttcaccgacagtttggagatcctagccgctgctgtggttccgtcggtgatgttgattctcggaggcatgctcgcggaaggcccaaaagacaacgccttgggcatgaggactatcatcggtatcattgtggccaggctcttggttctcccatgcattggcatcggtgttgtgaccctggcagacaggttgcatctgctcgtggaggaaaaccatatgtaccgctttgtgctctccctgcagtactccaccccgagtgctatcctgcttggagcgatcgccagtctcagaggctatggcgtcaaggaagcatccgcccttctgttctggcagcatatttgtgcggtgttctctctttcactctacctggttgtatacttcaagttgttttctttcatatgaagacaatggccatccatccatccatccatccagttctggcatatatacgtagctatcaagtaggatgctagaagaatgggttttcggcatcggctcctatcagtcagaagtgtttataattcggtagttatttaagtttcagttgtgtgtgttgtttgtgaacaggagatacagacagttattgtctgttcatttcggtcgatatattgatgtgtattttcatgatgct

SEQ ID NO: 20784 - DNA, 1259 bp, Zea mays; identical to SEQ ID NO: 4189
  Clone ID: LIB3245-233-C12_FLI

SEQ ID NO: 20785 - DNA, 2281 bp, Zea mays
  Clone ID: LIB3245-233-F1_FLI
gctgacagcaaagcaaagcttgagaggcttttctcaaaaacgcgccgtcgccgtttcttccccctttttctttgagaaaattcgcccgcgagatctttagtttcagaccccgtgtggattagtcgctgtcacgatcgaggcggggcgccaattgcggtggccaccacctccaatccactccccgcggtggcctcgccgagctgttcttgctccgtcctccctccaactccaagatttgtttcgcacccgattcctgagcttccgcggcgcttcttgctgaaaagaaagctccgagttcttcagttctggatcgatagagaggcggttcctttgcgggctctgaggttcagctctcgctcttgatttgtctcatcgacgcatcagttgggctgcaggcttagagctggaaggaataatttgactagagaaatggggcagtgttgtagcagagctcccgccccggactctggacggggaggcaccaatggttatggctattctaaccaggcaaagccagcgcaaacaccttcgagttacaaccctcctcagcagccggccgaggtgaggtacacgccgccggcgacgaaccctccggtagtcccacctgtgcctgtgcctgtgccaccgaagcccacggcggacacgattcttggcaaacagtacgaggacgtacgctctgtctactccctcggaaaggagcttggccggggccagttcggggtgacatacctctgcacagaggttgcctctggtaagcagtacgcctgcaagtccatctccaagcgcaagcttaccagcaaggcagacagggaggacattcgaagagagatccagatcatgcagcatctgtctggacagccaaacattgttgagttccggggagcatacgaggacaagagcaatgtccatgtggtgatggagctctgcgcaggtggggagctcttcgatcgcatcattgccaaggggcactacacagagcgtgcagctgctacaatctgcagagcagttgtgaatgttgtcaacatttgccacttcatgggtgtgatgcaccgtgacctgaaaccggagaacttcttgcttgcgagcaaggaggagaatgcaatgctcaaggccactgattttgggctttccgtcttcatcgaagaaggaaagatgtacagggacatcgttggaagtgcttattatgttgcgcctgaagtccttaagcggagctatggaaaagagatagatgtttggagcgcaggtgttattttgtacattcttctcagtggtgtgcctccattttgggctgaaactgaaaaggggatatttgatgctattctgcatgaggagattgactttgaaagtcaaccttggccatcaatttctgagagtgctaaagacttggttagaaagatgttgacacgagatccaaagaaaagactgacttcagctcaagttcttcaacattcatggctcagagaaggtggaggtgcatctgataagcctatcgacagtgctgttctttctagaatgaagcagttcagagcaatgaataagctgaaaaagatggccctaaaggttattgcctcaaaccttaacgaggaagagatcaaggggctaaagcaaatgttcatgaacatggacacagacaatagtggcacaatcacgtatgaagaactcaaagcaggactagccaaacttggatcaaagctgtcggaagctgaagtaaagcagttgatggaggctgctgatgttgatgggaatggatccatcgactatgttgagttcatcactgccacaatgcatagacacaagctcgaaagagacgagtatttgtttaaggcattccagtacttcgataaagataacagcggtttcatcacaagagatgagctggagtctgctttgatcgagcatgagatgggtgacacgagtacaataaaggagatcatatcagaagtggacacagacaatgatgggaggattaactatgaggagttctgcgcaatgatgagaggagggatgcagcagccaatgaggctcaagtagcctgttcccttagtagaaatggtgtaccgttagttactgttcttcactctttttcccccttcgtatttggtactcttggtagccggattaagcttacaatgggcgtcgctcttttgcattgtcaagagatgattgtgtatatctttttcttttgctcgtgtttgttgcattgtagtatcctgaacgtcccttccttttgtaagtttgtttatacacaagcacatccaatagaaagtgcaatttgtgtctc

SEQ ID NO: 20786 - DNA, 2320 bp, Zea mays
  Clone ID: LIB3245-236-E7_FLI
gaaatatatgtatgggttggacgggtaacgcaaatggaggatagaaaatctgccactaaagcagttgatgaattcctcattaatcaaaagcgtccaaagacaacgagggtaactcaagtgattcaaggttatgagagtcatgctttcaagtccaagtttgaatcgtggccagtgggtaatgctgctgggaaccctggcacagaggaagggcggggaaaagttgccgctttattgaagcaacaacgcgttgatcccaagggagctgcaaaaagcaccactccagtaaatgaggaagttcctcctttgcttgatggcggtgggaagcttgaggtatggtgcgttgatgggaacactaagactgccctgccaaaagaggacatcggaaagttttacagtggagactgttatatcattctctatacacatcactcgggcgacaagaaagaagagtactatctcagctactggattgggaaggatagcttggtggacgatcaagtgtcggcatctcaaataatcaatacaatgtggaattcattgaaaggacggccagttctgggccgtatataccaagggaaggagccaccacaatttgttgctcttttccagcccatggttatcttgaagggtggaatcggatctggatacaagaagctcatagaagaaaaaggtgctatgggtgagacttatactactgaaggcatagctctaattcgagtatctgagacatctatctacaacaacaagactcttcaagtagatgcggtagcaacgtctttaagctcaacggagtctttcgtactgcaatctggaaatgctatgtttacatggtttggcaattctagcacatatgagcaacagcagtgggcagcaaaagttgctgaatttttgaagcctggcgttgcagtgaagcactgcaaggaggggacagagagttctgctttctggtttgctcttggagggaaacagagttacacaaataaaaacactcctcaggatattattactagagagcctcacttgtatgcattctcattcaagaacgggagactggaggttactgagatcttcaacttttctcaagatgatttgttaactgaagacatgatggtacttgacacacatggtgaagttttcatttggattggtcagtatgtggaatcaaaagagaaacagaaggcatttgacattggccagaaatacgtggagcatgcaaattctattgaagatctttctccacatgtaccactatataaagtcatggaagggaatgagccatgcttcttcaagacgtacttttcttgggataacacaaaatctttggttcatggaaattccttccagaagaaactctcgctgctttttggattgcgttctgagggtgcacctaggagctctggtaatggtgggccaactcagagggcatctgcattagcagctctatcatccgcattcaatccatcatctcaacaaaggctgtctaatgagaggcctaaaagcacaggcgatggacccacgcaacgtgcctcagcactggctgccttatctaatgcattcaacccatccttaaaacccaaaacatcacctccatctcgctcaggtcctctgtgctgactgctgagcaatctggatcttcagaatttctacgatccaaagctagcaacacagcatataagactgatgtcgaccggattgtcataactccagctggcccatcaggcccatcttctcctcagtctgaagctggggagtccaatgtgtttcaccaggaaaaagatgctgcagcagatggggcaccgcctgacactgatggagcagtggctgaggccggagaggaagaaacaacggaaaatgttggtgaagcgacatttagctatgaccgcttgatatccaaatccaccgatccagttcgtgggatagattacaaacgcagagaggcatacttatcagatagtgaattccaaactgtttttggcatgaccaaggatgcattctaccgacagccaaattggaagcaagaactacagaagcgaaaagcagatcttttctaaagagaacaagctttgttaccagtggtctgctacagtatgcaatcctcttgtcgtgaatggtcggtcccatgagagttggtgtattaatatattgttggtcgtttctgaggacggtctactggtggctttgcacggttgtttcttttttggcaaccaattttataggtcaattcttttatttgtatatggcctgggttgtgctgcttgcgaggtcctaagatgcttctttgttcttctttgtgaatgtccatatgtgtatatcattttct

SEQ ID NO: 20787 - DNA, 1274 bp, Zea mays; identical to SEQ ID NO: 4313
  Clone ID: LIB3245-238-D8_FLI

SEQ ID NO: 20788 - DNA, 738 bp, Zea mays
  Clone ID: LIB3245-243-F11_FLI
ttcggtcgctccagcttttgtgcacgtccactgtgtccctcctcgctacccccgctttttgtgcgcggtggcaacgtgcgacagccgagaggcagaatgacgaagcaagtggtggtggtggacacagctctggtggcgccgagcgaggagacgccgcggcagccgctgtggctgtccaaccttgacctggccgtgccgaggacgcacacgccgctggtctactactacccggcgccgggcacgggctccttcgcgccggaccggctgagggccgcattgggcgccgctctggtgccattctacccacttgccgggcgcctcggcgttggcccggacggccggctgcagatcgagtgcaacagcaagggcgcgctcttcgtcgtcgccaacgcagacctcaccggcgcggacgtcttcgacgactacgagccgtcgtcggagatcaggaacacttttgtgccgttaggggagtccggcgaggcgaacaacagccccatatccatgttccaggtgacttttctcaagtgcggcggcgtggtgctaggaaccgccatccaccacgcggccatggacggcgtgggcgcgttccagtttatgcagacgtggtccggggtggcacgcggcctggacgtggcggaggcgtgcgggccgcagccgttccacgaccggacgctcctgcacgcgcggcgcccgccgtgcccgacatccgaccacttcgtctactccccggcgttcctc

SEQ ID NO: 20789 - DNA, 1295 bp, Zea mays
  Clone ID: LIB3245-244-D3_FLI
cccggccattccttgcctgcccgccgcgcggactctatataagccttgtgccccatctcatcagcatccatcaccaccatctccgatccatctcttcggctgcctgtgctacccttcccttcacctcacacaggaatatactacacattcctgccttagatacatatatacttttttactgaaaaaaaaggctgagccggtgcgagcgaggcttgagcaatggcgagcgcgtttagctcgagggcatgcgcgctgctggcgctgctcctggggctctgcaccgccggcgcggcggcgggcagggtcgacgacgggctggaggtgacgtggggcgacggccgcgggagcgtctcgcccgacggccaggtgctgacgctgtcgctcgaccgcacctccggctccgggttccgctccaaggacacgtacctcttcgcgcgcgccgacgtgcagatcaagctcgtccccgacaactccgccggcacggtcaccaccttctacttcatctcggaggggccgtgggatgtccacgacgaggtcgacctcgagttcctgggcaacgccagcgggcagccgtacacgctgcacaccaacgtgtacgccagcggcaacggcagcagggagcagcagttccacctctggttcgaccccaccgccgacttccacacctactccatccagtggacgcagcagcacatcctcgtgctggtggacgggacgccgatccgggagttcaagaaccacgcggaccggggcgtgccgtacccgtcgtcgcagcggatgcgcctctacggctcgctgtgggacgccgaggactgggccacgcagggcggccgcgtcaagacggactggtcgcgggcccccttcgtggcgcagtaccgcaacttcacggccgcgccgccggccacggcggcggacggccggtacgggcagcagatggacgccgcggcgcagcaggccatgaagtgggcgcgggacaactacatggtctacgactactgcgccgacaccaagcgcttcccgcagggcacgccgcctgagtgctccatggcgtagtaggcgtatagaggtgctgggccgctgaaccacggtgcacttccattgcgatgtcgatcagtgcacactatatacgtcgcacgggtcaattcattgtttataccgatcgatcgattctttggtgtgaaagaatactctagtataatttaattcatttggttggttgcaagagattcgttaaaaattaatcgtgtatgttgcaagagattcgttaaaaattaatcgtgtatgtttatactacc

SEQ ID NO: 20790 - DNA, 2646 bp, Zea mays
  Clone ID: LIB3245-244-G2_FLI
caaatactctcatactggatattttgaaaaagaagccatggacagctacttcagcatgccaacaggataatttgactttcattgatccagggaggctcattgaaatcaagtcttctaatcctggaaaaagaatatgaaaatgcaattaacacaagaggcgagctagatgagcgcatgtttgctaatgatgaggacagtttacttggcagtggaagcctttcaggtggagccattaatttaccaggcacaaagagaaagtatgatgttatggcctcacctgcaaaatcaatatcaagcccaaatccaatgtctcctccacgtttttgtctatctcctaaaggaaacagcttttgcaactcaaagatggctcctatcactccagtgagcacagccatgacaactgccaagtggcttcggagtacagtatctccgcttccatcaaaaccttctggggaactattgcgcttcttctcagcatgtgataaggatgtaacagatgacattgtacacagagctgggattatacttggagccatattcacgagcagttcatttggtgaacagatctgtactaatatgcgaagcgctaataggatggatgctatttggacagagcaaagaaaaatggaagcccttaagctatattatagggttctggaatctatgtgtagggcagagtcacagatcttgagtgggaacaatcttacattacttttgtctaatgaacgtttccatcggtgtatgattgcatgttctgcggagttagttcttgcaactcacaagactgtcactttgatgttcccagctgtgttggagaagactggcattacagcctttgacttgagtaaagtcatagagggttttgttcggcatgaagatacactccccagagagttaaagcgtcatctgaattctcttgaggaacggcttctggaaagcatgtcatgggagaaagggtcatcaatgtacaattctttgattgttgctaggccagtactatctatcgaaataaatcggttaggtttactggctgaaccgatgccatcacttgatgcaattgcagcacatcataatatctcaatgggtggcctgccgcctcttcccttccagaaacaggagcgtttgcaaagtatcactttatcagccactatcagcataatgcctattacatgttcctgaagtgttaaaagcagtatttctttgtttcttttacacttttcaatcacgcgaataagtgattgaaccccctttttggtaattgtgtttcctgtagataaagatgaaatcaggtctcccaaaagggcgtgcactgagaggagacatgtgccggtggacagcaattcatttcgatcgccagtgaaggacagtattaaattgaagctaccacctcctcttcaatcagcttttgcaagtccaacaagaccgaatcctgcagcaggaggtgaaacatgcgcagagacaggaatagctgtgttctttagcaagatatcaaaacttgcagccattagaatcagaagtctctgtgaaagactgcaactttctcagcaagttctggagcgagtatattcccttgtccagcaaatccttagccaacagactggtctcttcttcaacaggcacattgatcagatcatactatgcagcatatatggagttgccaagatctctcaactgcaactttcattcaaggagattgtttttgcgtataggaaacaacctcaatgcaagccacaagtttttcgaagtgtttatgttcattggcccccaacaagccataatgggaaaacaggagaagatcatgttgatattatcactttctacaatgaagtatttattcctgctgtcaagcctttgttagtggaggttggacctggtgctagtccaaagaggaaagaagagggaaaagtaggtccatacccagaatcccctcggctagctcggtttccgaaccttcctgacatgtctccaaagaaggtttctgctactcataatgtatatgtctcgccactacgatcatcaaagatggatactttactctcaccaagcccaaagagctattatgcatgtgtaggcgagagtacctatgcgttccaaagcccctccaaggacctgaaggctatcaacaaccgcctaaatagtgggaagaaagttagcggacgattgaacttcgacattgtcagcgatctggtcgtcgccagtagcctcaacggcgttcaaaatgccaagcccgcagccacggaagtggttcccaccaagacacctgtgaagtgcgagccatctgaatcgtgatctactctgatgctgcatcaccaatccagtgtaacttattataaatggttaggtgtcagatgctctgatttaggagtgtttgaatgcactagagataatagttagttagctaaaaaatgttagtggaattagctagctaactattacctaatttgctaaaagtagttgatagctaaaatattagctagactgtttagatgtctcaattttagcagctaactattagttctagtgtattcaaacattcccttagatattaggtggccttatttctgtttgtatttttgacatgtaaacatctttgtgagcagctctaccatctgtaaaatataagaaagctgctctaagagctcccat

SEQ ID NO: 20791 - DNA, 1788 bp, Zea mays
  Clone ID: LIB3245-244-G7_FLI
ctcatcctccccttgtctgcgacccagggaatggcagcactgtcattctagtcactcaacaaccaccaccacctgcacccccgctcgctccgggcaatggcggcggttctggcggtcctggtgtcggcggtggccgccacgtccatcacggccgcggcgctcaacacggacggtctcgcgctgctggcgctcaagttcgccgtctcagacgacccgggcggcgcgctgtccacgtggcgggacgcggacgccgacccctgcgcctggttcggcgtcacatgctccaccgccgccggccgcgtctccgccgtcgagctcgccaacgcctcgctggccgggtacctcccgtcggagctctcgctgctgtcggagctgcaggcgctgtcgctgccctacaaccggctctcggggcagatcccggcggccgtggccgcgctgcagcggctggccacgctcgacctcgcgcacaacctgctgtcgggcccggtcccgcccggggtggcgcgcctcgtctcgctgcagcgcctcgacctctcctccaaccagctcaacggcacgatccccgccgcgctggccgcgctcccgcgcctggccggcgtgctcaacctcagctacaaccacttcacgggcgccgtcccgcccgagctcggcgccatccccgtcgccgtcagcctcgacctccgcgggaacgacctggagggggagatcccgcaggtcggctcgctcgtcaaccagggccccaccgcgttcgacggcaacccgcgcctgtgcggcttcccgctcaaggtccagtgcgcgggggccgccggggcggacgacgacccgaggatcccgaactccaacggcgccaccgaccctggcgctgcggcggaggtcgggaggaggggaggcccgaggcagccgcggcggcggcgctcgtcgccggcggtcccggtcctcgcggccgtcatcgtcgtcgccctcgtcgccggtgtggttctgcagtggcagtgccggcggcggtgcgccgccgccgccggggacgaggggaaggagtccggcaaggagaagggcggcggcgcggtgacgctcgccggcagcgaggaccgccgcagcggcggggaggagggggaggtgttcgtggccgtcgacgacggcttcgggatggagctggaggagctgctccgggcctccgcctacgtcgtcggcaagagccgcggcggcatcgtgtaccgggtcgtccccggccgcggccccgccgtcgccgtccgccgcctcagcgagcccgacgacggcgacagcgacggctccggttctggctccggctggcgccgccgccgcgcgttcgaggccgaggctgccgccatcggccgcgcgcgccaccctaacgtcgcccgcctccgcgcctactactacgcccccgacgagaagctgctcatctacgactacctccccagcggctccctccactccgctctccacggtggcccgacggcgtcgccgacgccattgccgtggtccgtgcgtctgtccatcgtgcagggcgcggcgcgcgggctggcgtatctgcacgagtgcagcccgcggcggtacgtgcacggctgcatcaagtcgtccaagatcctgctggacgacgagctccgcgcgcacgtgtccgggttcgggctcgcccgcctggtcgccggcgcgcacaaggccgccggcggcgggcactccaagaagctcggcagcgcggcatgcgcgctccgaggcggtggcgcggcgtcgtacgtggccccggagctgcgcgcgcccggcggcgcccccgcc

SEQ ID NO: 20792 - DNA, 1006 bp, Zea mays
  Clone ID: LIB3245-262-F8_FLI
cacaccactccacagcagtagcaagagggatagagcaaggccacacacacacacacaccactaggctaggttagccttttaatcgtcgtcgagaagcaagaagggcgcgcacgcaagcaggcaagcaagaagagagccgatcgaccgagagctagcacgcgatggcgaggtcttccaagatgatggtggcggcagctctgctggccttggccctggccgtgtcgaccgccgaggcgaggaacatcaagaccacgacgacggagaagaaggacgacgcggtggtgcagccgcagaccttcccgcccttcgaccgcctcggcggcggcgcgtccccggcgttcggcggcctccccggcggcagcattcctggcagcagcattcccgggttcagcatgcccggcagcggcagcagcctacccgggttcagcttgcccggcagcggcagcatgcccctcttcggcggcggctccccgggcttcagcggcttcggcggcatgcccgggtcgcccaccgccggctccgtccccgagcacgccaacaagccctgaacgccaacaagcgtggtagtagagtggtgctactgttactgtagtacgtcgtcgtcttcatgcatgcgtggttcgtggtttcccctagctccatacgagcagtagttgggccttgcacgtaccgtacgtctagctagctatatatatatagcttgtgttctactgccttttagtttaattacctgcctgcattggagagttggatctgtttcatttggtggtgtttgctttactattaggtcagtatctgtttgtggagacttggtgtttaatttatttagccgtttgtgactggttgtagctagcggtggtgcggtggtgatgttcttgaggcatgaataatgctacatgcatgtgatgtatccatgttttgtgtgtggtaaacctgttgtttgtataagctgtatgcatgggtctttaatttgtttttgaagcagggttcacgttattaatttgtc

SEQ ID NO: 20793 - DNA, 1238 bp, Zea mays
  Clone ID: LIB3245-269-H7_FLI
agctggagtgctggactgcagctgccagcggcatttgcgtgcagcactgcctgcgcctgctgtgccgcccagtccaatggagagggccgcgtcggtcatctcctcgctcctcggcggcggcggcggctccggggcacaggcggcaacggtgaagtccgtcctcgtgtaccccatcaagtcctgcaggggaatctccgtgccccaagcccccatcaccgccacggggttcaggtgggatcgccagtggatgctcgtcaactccaaagggagagcatgcacccagagggtggagcccaagcttgctctggttgaggtccagatgccgccggaggcctttgccgaggactggcaccctacgcccgacgaccacatggttatcagagcacctggaatggaacccttgaaggtccctctttctgtggaatgtgccacaatcagtgatgtctctgtgtgggagtggactggcgctgcttatgatgaaggtgctgaagcagccgaatggttttccacatttttggggtgcccaactcgactggtgcgctttaacgaagattcagaaactaggctgactgaccctgactatgcacgaggttacaaaaccatgttttctgatggcttcccttatctgatagtctctcagggctcattggatgcattaaatgagatactcaaagagcctataccaattaaccgcttcagaccaaatattttagtggaggggtgccacccatatgcagaggatatgtggaaatcagtaaagataaacaagttaacatttcaaggtgtgaagttatgtggccgttgcaaggtgtactttgggcaaaatgcagtctgcaaggaatctctgtcagcaaatggggaaggaaggatcgtcaaggtcggggatccagtttaggccttgttcgtttacatcggattgtacccggaatcattccggctaatcaaagtttatataaattagagaagcaatccggctcggaatcgttccgacccaccaatccgacacaaacgaacaaggccttatgtgacacagtcgttctcttcatctgttgaagtgccagcctgagtgaccgaatcaggacggctatgtaacaaccacttgtataatttttagcactattttagatttatatttgctgaggaaagttaaattaatatttacgaagttttaagtttaagtttaaagagttttagttaagtttttctataagaaataattgtttattctccattatatt

SEQ ID NO: 20794 - DNA, 1135 bp, Zea mays
  Clone ID: LIB3245-270-B3_FLI
ccagtccagtccagcctccagctaggggaagaagaagaagagcgaaggaaggggacgggggcgaggaaggagccagagcagacccaatccctcaatggcttcctctcgcgctctcgctctcgctctcttcctcctctgcgccctgctgcccgcgccccctgtctcggccacattgctgttcggcggcggcgagtcggccaagaaggcgggcgtcgacgcggagtggcggccggccactgcgacgtggtacggcgaggcagagggcgacggcagcgacggcggcgcgtgcgggtacgggacgctggtggacgtggtgccgatgaaggcgcgggtggggtcggtgagccccgtgctgttcaaggacggcgagggctgcggcgcctgctacaaggtcaggtgcctggaccgcggcgtgtgctcgcgccgtgccgtcacggtggtcgtcacggacgagtgccccggcgggctgtgcgcgttcggccgcacccacttcgacctcagcggcgccgcgttcagcaggatggccgtcgccggggccggcggccggctgcgcgaccggggccagctgtccgtcgtgtacaggaggacggcctgcaagtacggcgggaagaacatcgcgttccgtgtgaacgagggctcgactaacttctggctctcgctgctcgtcgagttcgaggacggcgagggcgacataggatccatgcagataaagcaggccaactcggtggagtggctggacatgcggcacgtgtggggggcaacctggtgcctggtgcggggcccgctcgtgggccccttctccgtgaggctcaccacgctgtccgcgcggaagacgctcacggcccgcgacgtgatccccaggaactggacgcccaaggccacctacacctcgcgcctcaacttccagccgtctctctaggtctaggacgagggagggacccaccgcggcgactggggcccacgttttatcggccccggacactgccctgtgggcccgttgcaaaacgaggaatcagtcagtccagagtgtttttttttttgttttccctgtatgcagatgcaggcaaccttcgtatggtttggtttttatcttatcgtagtcgtagctagtgtgaggaggtggttcatggccatc

SEQ ID NO: 20795 - DNA, 1783 bp, Zea mays
  Clone ID: LIB3245-270-B5_FLI
gccaccggtttccccaaatcgaggttgcctgccgtcactcacctcggctcagctccaccaagtgcccgtgaggtgccacgaccgcagcgaggagtgaccatggttgaggtgatgatggtacccagctcccacggctgcggcgagggtggtggtgtaggaagcgacgggaaggcggaggacgggcagcagcaggggcagggacaggggcaggtgctggcgctgctgctggccgcgctccgcaagtcggtggtgctaccgtgccagatggcggacgccgacgacccatcgggggcggcgtgggggatggagatcggctggcccacagacgtccgccacgtcgcgcacgtcaccttcgaccgcctccacggcttcctcggcctccccgtcgagttcgagctcgagatccccggccaggtccccagcgccagcgccagcgtgttcggggtatcaccggagtcgatgcagtgtggctacgatgacaaggggaactcggtgcccaagatccttctgctcatgcaagagaggctgtacgcgcaggatggactcaaggcagaggggatcttccggatcaccccggaaaacagccaggaggagcatgtcagggagcagctcaacagcggcatcgtgcctgacgacatcgatgtgcactgccttgctagtttgatcaaggcctggttcagagaactccctgaaggcgtgcttgacaggctttcacctgagcaagtccttcactgcaacacagaggagcaatgcattgagctcgtgaagcttcttccagcaacccaggctgcacttcttcattgggtcgttgagctcatggctgatgttgttgaggaagaggagtcgaataagatgaatgcaagaaatgttgccatggtttttgcaccaaatatgacacagatgtccgatcctctgacagcactgatgcatgctgttcaagtgatgaacttgctcaaaaccttaattctcaaaacacttcgggaacgcgaggatgatgatgcaggggcctattcttcattctcatcttcgttatcttcatctggtgaacttgacgaggatgatggccatgaccaacaggatgatgaaaatgatagtggcagtgagaaaaactataatggcagtgctaacggaagaccaagagatattgacaaggccactgcactaagagtagacagtgagcagctaattggtgtgtccaggaggcacacatcaaccgatttccatctgccttacattagatacagtaacgacagtgaagacgtatcactggatgatattgaggaatgtttcttaagaaggctagaatggaaatcagtgagggaaagtgttgatgaaggcgacagtagaaactctcctccctcagagaaagaggcagagtggcttagctcctctgagaacgtaacggaagctagcaacgcaattggtgaagaaagaggcagaacaagcaatgccactgatgtaagtttcaatgagctgaggcaaacggaaaccagaattgaaatgacgagtgctgcaaaaggggagcttattctttgctcataagcaatcctggcaagggtgcaggtttcagtctggtcatcatccttgtaagggtatgtgaagttgtaagcctatcgttcttggcagtccttgtaaaattctttgcacgctctactgcatgagctgcgaagttgattaattgtcttgtttagttgaagcagaaacaaccagtttctggctagttggacctcggtaatcagctggactcttgcaaccggaagcatgtcaaactatatttgctcgt

SEQ ID NO: 20796 - DNA, 1977 bp, Zea mays; identical to SEQ ID NO: 4003
  Clone ID: LIB3245-270-H12_FLI

SEQ ID NO: 20797 - DNA, 1332 bp, Zea mays
  Clone ID: LIB3245-272-F6_FLI
gctaccctcgatcccccgatagcagcagcagcagcagatcctcggcggcgacatggacacccccacggcgaaggcggcatggaacgccaactacggcgtcgtcggcagtggggaccgtcgtcttgccttctcccgccaactctcctccaacgccaccacgccgcgcctcgctcggtccgactcctccatctccatgcccgccccccttccccttcccccagtctacgaggggcccaagcccagcaggaagctactccgcctcgccacggccagccgccccatgcgccgcctcgccctcctcctcgccctcaacgttgcctactctgccaccgagttcgccatcggcctcttcaccggacgcgtaggcttagtttcagatgctttccatctcacctttggatgcggcttgttaactttctcattgtttgctatggctgcatcccgaaccaagcctgataacctctacacctatgggtacaagcgattggaggttctggctgcctttacaaatgctctgtttctattgttcctgtctttctccttggctgttgaagcattacatgcatttatgcaagatgaatcggagcacaagcattatctgattgtttctgctgtcaccaatcttttggttaatttacttggtgtttggttcttccggaactacgctcgtgttaacatagtttacaggaatgcagaggatatgaattaccactcggtctgtttgcatgtgttggcagattcaatacggagtgcaggcttgatactagcttcttggtttctttcattggggattgagaatgctgaggttctgtgcctgggaatcgtctcagtggcagtgtttatgcttgttttgccgttatttaaagctactggtaatatcctactgcaaatcgcacctagcaatgtgccaccttcagcctttacaaagtgctcgagacagattgctgcttgtgaagatgtctccgaagtatggcaaggtcgattctgggagcttgttcctggtcaggcagttggatctctctccattagggtgaagagcggcgctgacgaccgggcagtccttgaatacacgcatggtttatatcaggatttgggcatacaggatctgacggtccaaactgatgagtttgtagggcctgttagttagacggtaggggttctatcccagcttcacgaaagtgttgttttcagtttttttttcctaccaagtagtttctttcgcaaccgtgtctatctaaacactgtttttttattaagttcatctcacaacaaaaagttttttcacagctattttctccgagaagacaaacggttataaaaataggttcatcg

SEQ ID NO: 20798 - DNA, 819 bp, Zea mays
  Clone ID: LIB3245-276-A2_FLI
cacccatccccgctccctcctctcctctcctcccgtcccacccatcacctcgcaccagcgccgggggaatggcggccgcgctgtggacgctgctagtggcggtggccctgtcggcggcgctggcctcgaaccgccccgtggcggcgacggcgacggcggcggcggaggcggcgaacgaggtgctccgcgcgcaccagctgccggggggcctgctgccggcggggatcacggcgttccggcacgacgccgccacgggggcgttcgaggcccggctggacgcgccctgcacggcgcgcttcgaggtcggcctccgctacaacgccaccgtctccggggtcatcagccccggccagatcgccgacatctccggcgtcgccgcgcaggacctcttcatgtggttccccgtccacgacatcaaggtcgacatcccctcctccggcgtcatctacttcaacgtcggcgtcgtcaagaagcacctcccgctcgccgtcttcgacgcgccgccggcctgcacgcccgacccgctcctgcagcggctggaggacgtgggcgagggcggattggccgtggtgggcgccgcggcgtcccggcgatgatgggtggaggagaacggaggagggttcgacggcgccggcgagccaggatcacgagcgcagttttgagaggagaacgggcgatcgccggccttcttcgatgcacatagatagcgtgggcatttccatctgttttcttttttctgcttcctactagtggctacactagtaaccaacctcgtctatcattgttcgtttcgtcaagctgttgtcatttcctgctgtc

SEQ ID NO: 20799 - DNA, 2544 bp, Zea mays
  Clone ID: LIB3245-277-B2_FLI
aaagattcctttttaatctgttttgttaagtttgttaagggtttgtttggttagaaggggattgaagaaagcttcctttttaatccattttgttgattgagtcgcattcccgaatccatacttgaacatcaggatctcatatgcgaggtatcatctcgggacactggaaagactatggttgatgcttcattaggagagataatgaccacatgttagaagattacctagcaaaatgaagactggtacttaattattgttgtcacatgatgtttttactcgggagatctggaggttggcgaacgcccggggagaaactattcaaggaactattatttagtcaatttgtttcttttggagaaactttgcacagttgagggatataacttagtttttcaagcctgtccatctccagcagatggtttagttgggaaagaatcttatgctcaggtacaaattggtaggcaaattctaggcaaaggagttgggttaacatgggaagaggccaagctctagttatacatggttgttcagatgtgacagcaatgactaatgggacaaatgtcgagataggtccaaaaggccaagaaccaccatcaattagctctggcaatattagttttgttgttcgtgtattggctaagttattgcagatggcgcttgccttttgcttcagctgatcaagatctagaattcgaattgggccatgtgaagcatttcacatttcacgatctgcaaagtgcaacggacaattttaattccaagaatatattaggtcaaggaggttttggaattgtgtataaaggctgtttgagaaatggaactttagtggcagtgaagagattaaaagatcctgatgttaccggtgaagtccagtttcaaacagaagttgagttgattggccttgctgtgcacaggaatctcttgcgtttgtatgaattttgcatgacctctaaagaacgattgcttgtatatccatatatgctaaatggcagtgttgctgaccgcttgagaggaagctatgcattctaaagggtgtctttccacgtcagccaaagaagaaggtggaagggaaccacaagacctactaccacacaaaggatattgcattcctcgctcatgaccctttgatcgagaagttcagggagattaaggtccatcgaaggaaggttaaaaaggctgttgctaagaaaaacagggatcttgcagacaggctgttgaatcggccaccaacttacaagcttgataggcttgtccttgaaaggtatccaacattcgttgatgctcttcgtgacttggatgactgccttacaatggtgcatctgtttgcggcattacctgctgttgacggtgaacgtgttgaggtcaaacgaatccataactgccgcaggttaagccatgaatgcttgacatttatttccgtgaagggcatatattatcaggctgaagttcaaggacaaaagatcacctggctaactccgcatgctcttcagcaagtattaactgatgatgttgatttcaatgtgatgctttcttttctagaattctatgagactcttctaggatttgtgaacttcaaaatctatcattcaataaatgtaaattatcctcctattctggatccacgtctggaagctttagctgttgagctctatgcattgtgccgatacatgtctgctggttccagaagaatgattgggaattcacaaactgacgaagtaatggaagataaggatgagaaaagtaaagctgaggaagtaattgaggaagagaaggttgtgaagaataaagcaagctcaaaagcagatgaatctgagttcagattagcacagcttcaacatcagctcccaaccaatgaacctggtgcactgatgaatcttgtagaagaatcaactgccgatgatgcagatgatgatgatactaaagattgtaaaggtttatttaagaacttaaagttctacttgagtcgagaggtgcctagggagtccctgttatttataattccagcatttggagggactgtttcatgggaaggagaaggagctccatttaaagaaatagacgaagatatcactcaccagctgaaaacttgcccaacacattagaatatattgaaggcgaggttgaagctcttgacgaagttattggtagccatgctgacttctgcgccctggtagcttctcggggcacagctaccgcttttctgaaagctggttgcacgcatggaaaaattgttaataggcccaactacagcttatcatcatcagatctgatagatattccaagcctagctcgaagtatcggaaatagatttatgacccagatttgggtaaatggcgggcggaaaatggcgggtgacgaagctcgaagtcatcttaagccggatgacgaagctgaagtataacaaatctgaagtatgacgaagctgaagcttgatagttgctacaatattctttcctgtaaaaattctggagagacttttgtaatattattatgtaaaaactcatgtaaatttgtacataccttgtaatatattttgtttccgct

SEQ ID NO: 20800 - DNA, 1868 bp, Zea mays
  Clone ID: LIB3245-277-G2_FLI
cgttcggagcgcacacacacgcaaccagatctcccccaaatccagccgtcggcacctccgcttcaagatgcagatctttgtgaaaaccctgactggcaagactatcaccctcgaggtggagtcgtctgacaccattgacaacgttaaggccaagatccaggacaaggagggcatccccccagaccagcagcggctcatcttcgctggcaaacagcttgaggacgggcgcacgcttgctgactacaacatccagaaggagagcaccctccaccttgtgctccgcctcaggggaggcatgcagatcttcgtgaagaccctgaccggcaagactatcaccctcgaggtggagtcctccgacaccattgacaacgtcaaggccaagatccaggacaaggagggcatccctccagaccagcagcggctcatctttgctgggaagcagcttgaggacgggcgcacgcttgccgactacaacatccagaaggagagcaccctccacttggtgctgcgcctcagaggaggcatgcagatcttcgtgaagaccctgaccggcaagactatcaccctcgaggtagagtcttcagacaccatcgacaacgtcaaggccaagatccaggacaaggagggcattcccccagaccagcagcggctcatctttgctgggaagcagcttgaggacgggcgcacgcttgccgactacaacatccagaaggagagcaccctccacttggtgctgcgcctcaggggaggcatgcagatcttcgtgaagaccctgaccggcaagactatcacccttgaggtggagtcttcagacaccatcgacaacgtcaaggccaagatccaggacaaggagggcatcccaccggaccagcagcgtttgatcttcgctggcaagcagctggaggatggccgcacccttgcggattacaacatccagaaggagagcaccctccacctggtgctccgtctcaggggtggcatgcagatctttgtgaagacactcactggcaagacaatcacccttgaggtggagtcttcggataccattgacaatgtcaaggccaagatccaggacaaggagggcatcccaccggaccagcagcgcctcatcttcgccggcaagcagctggaggatggccgcaccctggcggattacaacatccagaaggagagcactctccacctggtgctccgcctcaggggtggcatgcagatttttgtgaagacattgactggcaagactatcaccttggaggtggagagctctgacaccattgacaatgtgaaggccaagatccaggacaaggagggcattcccccagaccagcagcgtctgatctttgcgggcaagcagctggaggatggccgcactctcgcggactacaacatccagaaggagagcacccttcaccttgttctccgcctcaggggtggtatgcagatctttgtgaagaccctgactggaaaaaccataaccctggaggttgagagctcggacaccatcgacaatgtgaaggcgaagatccaggacaaggagggcatccccccggaccagcagcgtctgatcttcgccggcaaacagctggaggatggccgcaccctagcagactacaacatccaaaaggagagcaccctccaccttgtgctccgtctccgtggtggtcagtaagtcatgggtcgtttaagctgccgatgtgcctgcgtcgtctggtgccctctccatatggaggttgtcgaagtatctgctgttcgtgtcagtgttggtttaataatggaccggttgtgttgtgtgtgcgtactacccagaactatgacaaatcatgaataagtttgttgtttgaaattaaagcctgtgctcattatgtttt

SEQ ID NO: 20801 - DNA, 1464 bp, Zea mays
  Clone ID: LIB3245-278-B2_FLI
gtctgagaagtcgggcttgcgtgctagctagctgcaactgaagaagatggcgaagcaagctgtcctccttcccatggctgcactggcactggttcttggagcacttgcaaccattcctgcaggtgtgcgatccatcggcgtgtgctacggcatgaacggcgacgacctgccgtcggcgagcgacgtggtgcagctgtacaaggacaacggcatcgactcgatgcgcatctactccccggacaccgacgtgctccaggcgctgagcggctcgggcatcgccgtcaccgtgggcgtccccaacgcggacgtgggcggcctcgcctcgcgcccctcggccgccgccgcctgggtccagagctacgtgctggccttcccggccgtccagttccgctacatcgccgtcgggaacgaggtcgtcgcgggggggcgcgtcctgctgcccgccatgcgcaacctcgaccgcgcgctctccgcggccggcctcgccgacgacatcaaggtgtccacggcggtggcgacagacgtggtcggcagcagcttcccgccctccgcgggcaccttcgctccgtctgcgggctacatgccgcacgtcgcgcggtacctgcagagcaccggcgcgccgctgctggccaacctgtacccttactactcgtacatcagcgacccgagcgccgtcgacatcaactacgcgctcctcgccatgcccgccggcacggtggtggtgcaagacggcgggtacagctacgacagcctgttcgatgcgatggtcgactgcttctactcggcgctggagaacgccggggccgggaacgtcaccgtcgtcgtgtcggagagcgggtggccgtcggccgggagcgacgcggccaacacgaccaactcgcaggcctacagccagaacctcatcaaccacgtcggccagggcacgccgaagcgccccgggcccatagaggcctacatattcgccacgttcaacgaggaccagaagcttggagacgacgagacgcggcggcacttcggcttgttcaacaaggacagatcgctcgcgtaccccatcgattttgtcaacccataacagcaggatcatcaatctcgttctctcttcaatgttccaaaattggtgatgtgcactttttgttaaaaccagtagaaatgcacgcaggttcgtatgtctacatgaaaacaaaattaaataatattaagcaatattaaaaaaacctttttggaaagccaatttatgtagtgatagtacataaaaatactactacaccattctcgaatatttatcacctgctagctcatttttaaacaaaaacacaataaataaaaaaaagaacggagcaattattagccagcccatatagcccatgatgacactaaaacataaatagatgtaataagcatatttgtggaagcgatgatttcatcgtgcaatttgtaacagtgtataatttaagttgactttat

SEQ ID NO: 20802 - DNA, 1110 bp, Zea mays
  Clone ID: LIB3245-279-E4_FLI
gccgccaaccaagcgacggctcctcttccacgcatcctagggcggcgacacctgccaagaacacccgtcgccgcgctctcccgatggcgaccagcgatgagctcgcccagatcgacatctctaaggaggagaaggacaagctggtggcggaggtgatgcgctacgtgctcttcaagacgcaccagagctccgactgccccatcaagcgggaggagctcaccgggatcatcaccaagaactaccgccagcgcgcgctgcccacgctcgtcatcaacgaggccaaggagaggctcgccgcaaccttcggctacgagatgagggagctacaaaggacccgcgcgccggccacgcgctctggccggccggcacagcggcagtgtaaggcgtcctttttttttctttcgtttattattattttgttcctttcctctctgtatatgtcaaccacagtggttacgggctggcaatgactgatggaatgtgtggttagttaacgcggatgccaagagctatgttctggtcagcatgttagaccctgaggtgtacagcaagtacgtcgaggacaaggccgccgcccatctgtccggcttcgctttcgctgtcattggcattattcatcttgctggtggcaaaatgcccgaagaggacctctggcatcagttgaagcgggtgggtttgaacgagactgatgaagctcaccttgttcttggcaacaataagcaggcgctcgaacacctagtgcagcaaaggtacttgctgaaggagaaaattgctggaccggaaggtcatttcgtgatgtacgagcttgccgagagggcgttggatgaatccatcagcgtgaagattaaagatcatatttcacaggttgtgggcacatgcttgcagaagtagattgaagtggatggatacgacaatcagtagcactttaggttatctgccttgcggtaggactagctgactcttatcaggctgggaagctacatatcatcttgcatggatatacgaggctcgtactctgcatgcagattttgtacaggagatgtgtgcttgacaagccctggcaactttggtgttactatatccttgattatctagattattatgtggacg

SEQ ID NO: 20803 - DNA, 1596 bp, Zea mays
  Clone ID: LIB3245-288-C12_FLI
ctccttcttctccggttctcgctcgtgcccttctctcctggcggcgacggctgggcgagcggcgcggcccgttatcacttcccaggtcttcggcggcgacgagtttccaccaggctgaccggaacgcagtgggtggagaaccggtgagcagctgcagccatgtccgtggcggccggcgtgagcgacgcggccatcgcggtgcgcgacaagctccgtggaaagattggtcagaccaaggtcaaacggtactggccggggaaggcgcctgagtgggccgatgacgtcgatgaggacgtcgacctcaggacggcacgggtctccctcgacaaggcgttccccagggacgaggacggcgatgttcccgccaaggatgaccgccggctccgccggctcgcggagacccgcgcggagaataaggaggagctgagggcggatcaccgccgcatacggcaggcggagatcgtgtcaaccgcggaggaggagaacgagaggcaggaggctgacgccgacgaggaggatgaggaggcccaagaggagaggaggaggagaataagggcaaggcagctgctgagggagcaggaagagctgcttcctcaggaagaggaggaaccggtggaggccgaggagtctgaggaggaatctgagtacgagacagactctgaggatgagcagatgggaatggccatggtgaagcccgttttcataccaaagtcacagagagacaccatcgcggagcgcgaacggctggaggaggaggaacggcagcttgaggagctggtcaagaagaggctggaggctaggaagatcgagactagacagattgtggtcgaagagattagaaaggaggagcacatcgagaaggcactgaacgaagaggccaacatcgaggatgtcgatacagacgacgagttgaacgaagcagaggagtacgagtcgtggaaaaacagagaaatagcaaggattaagagggacagggaggaaagagatgcgaggttgaaggagaaggaggagatcgagaaagtcaggaatatgaccgaggaggagcgtcgcgaatgggagcggaagaatccgaagccgcttcgtcagacgaaacagaagtggaagtttatgcagaagtattaccacaaaggcgccttcttccaggaaggtgctgatgatgttatccagtcagcgggtaaagaggatatctacacccgtgatttctctgagcccactggagaagataagatggataagagcatcctgcccaaggtcatgcaagttaaacatttcgggcgcagcggcaggacgaaatggacgcatcttgttaatgaagacactacagattggaatgcaccatggtcaacaaatgggcctctgcgagcaaagtataatgcaaaaatggcaggcatgaatgcacctattgctaaaccaaagggaagtaagaagctgaaggattgggatgcaaaatgagatgccaggttagctggtattatctaagcgttataagaactatgtagccaaaaagtgcaaacaatgcttatgcagatgctttcttctcattttgactgcataaacaatgtgacctttatgtgctattatctgttgaagtgtccc

SEQ ID NO: 20804 - DNA, 978 bp, Zea mays
  Clone ID: LIB3245-289-C8_FLI
gaacacaccagttctctagagcagcaccgttcgtccattcgcccacgcacgccgcgtgatccgatcgcgcgcgtagggctccatcgatccgctaccgctacaatggcaatgtcgtacaccaccctccactacttcgccgtctcctgcgccctcctcgtggcatcggtgtcgtcgctgccgccgccggcggtgttccaagtcggcgacgagcgcgggtggacggtgccggcgaacggcaccgagacgtacaaccactgggccaagaggaaccggttccaggtcggcgacgtcctggacttcaagtacggcgccaacgactcggtgctgctggtggcgcacgacgactacaagcagtgcagcacggagacgccgctgggccggttcaccggcggcgacaccaagttcgcgctggaccgctacggccccgtctacttcgtcagcggcgtcgcaggccactgcgaggcgggacagcggatgatcgtgcgggtcatcaggcccggcgcctccgcaccgcgcggcgcccctgtggcggcgccggcgacgccgccaaccgcgagtggcagtggcagatcaggcgcgcccagcccggccacctcgccggccggctccggctccggttccagttccacttctccgagcccgagcccgagcccgagcccgctgccgcaggccagcggtgcgtctaggcgcgtgctcgtgtcgtccgttgcagttgggcttgtgctcttggttgcctgtgccatcaccctgtcgtccgtggtggcttgattaaacttagaagtctgttttctgcattcatgtacttagtgcgccgtcagtttaggaagtaatgttagcttgtcgagatctaggaggtatacgcgtgtcggttaggaatggttgggccactgggccgagtccgcatgctctttatgttaaagacttggtaatttcaaataaatggagttcttgccatgctctaaggctaattgggatttt

SEQ ID NO: 20805 - DNA, 1232 bp, Zea mays
  Clone ID: LIB3245-293-D6_FLI
gcaccgttgccgatcgtcgtcctcctccccactccccagaggccaagccaaaggtccagcaatggcgaggtctccccggcttctcgcgctgctgctggctgtcgtctggatatgcggcgcggccctagtagcgcgtgccgacccgatgctcgagaggttcgagcagtggatgggcaggcacggccggctgtacgctgacgccggagagaagcagaggcggctcgaggtgtaccggaggaacgtcgagctggtcgagaccttcaactccatgggcaacgggtacaggctggccgacaacaagttcgccgacctgacgaacgaggagttcagggccaagatgctgggcttcggacggcctcgcagcggaggcggagccgggcactccacagcgccgagcaccgtggcttgtattggaagtggactgatgggtcgtcagggttattctgatctaccgaaaagcgtggactggcgagagaagggagctgtcgcgccggtgaagagccagggggactgtggctcttgctgggcgttctccgccgttgcggccatcgagggcatcaaccagatcaagaacgggaagctggtgtccctgtcggagcaggagctggtggactgcgacaccaaggccatcggctgcgccggcgggtacatgagctgggccttcgagttcgtcatgaagaaccgcggcctcaccaccgaacggaactacccgtatcaagggctgaacggcgcctgccagacgccgaagctgaaggagagcgcggtgagcatctccgggtacatgaacgtgacgcccagcagcgagccggacctcctgcgggccgccgcggcgcagccggtgtccgtggccgtggacgccggcagcttcgtgtggcagctctacggcggcggcgtcttcacgggaccctgcaccgccgagctgaaccacggcgtcacggtggtcgggtacggcgagacccagggggacacggacggcgacggtagcggcgtgcccgggaagaagtactggatcgtcaagaactcgtgggggcccgagtggggcgacgccggctacatcctcatgcaacgcgaagccagcgtcgcgtctggcctctgcggcatcgctatgctcccgagctacccggtcatgtgatccggcggctgccgccgtcgagacctacagctgcagctctaagaacaatcagtcattatgttggccatcttttgaacaaagggcgttcctctttcccgat

SEQ ID NO: 20806 - DNA, 750 bp, Zea mays
  Clone ID: LIB3245-296-C3_FLI
gctgaatggcatcatccagtgcctgctgggctgtttcacgcaggtgttcagctgctcgttcgggtgtatgggaaagcagggcgccgacctgccgctctgcatcatcggctgcgaccagaggagcgtcgtctgtatgatccgctgcgggctcgcgccgtcgccgcccacgccctcgccaccggcgcccaagccgccttcgcccaagccacccacgccgaaacctcccacgcccaagccgcccacgcccgcgccacccacgcccacgcccgcgcccacacctaagccgcccacacccaagcctcccacgccagcgccaccaacgcccgcgccgccgacgcccatgccaccaacgccagcgccgccggggccgccgtacactccaccgtacgccgtcaccggacgcaagaccgcgacatttgactaaacatgtcgacatatgtgctagctctcgaccgatccatcgtaccaataatttatactccataaaccgagcatatatgtttataaccattaaaaaagaagcatatttcatgctatagctttttattaattaacacggtcaattctattgtcgcaatgtctattagtatgtccacagtgaaggccaaattatgtctaatgagtaatatatgtacacaatataatagatcaatgtattttgatcttttaatatgatgaatgtactttgttctttttattcacatgtaacgctatttgtaagtatataattcatgcaagaaccattacact

SEQ ID NO: 20807 - DNA, 831 bp, Zea mays
  Clone ID: LIB3245-301-B3_FLI
ggcatcggcctgccgcgccctccgcgcggctgtgactgctgtcaccgcgcgccgcgccggcgacgccgcacgtggcctagagccgctccccatcccgttccgcaactacgtcgattccaagccctatgcctacttcctgtatacccccttctccctcacccggctggctcccggcgcctccgcccccagcgcccagccgtggggtgccgcctggacccggccgccccgccccacctggccccgccccaacctcgacggcttaccatcagccgtgtacgggtgcgcgtgcgcggcggcggaatgcggtggtacccagtgcgcgtgcgccgatgtggaggccgatgcagcgggctcgggcttggaggccgggatggggagcctcacggagtgcggtgatgtctgcgcgtgtgcgccgtcatgtgggaaccggcggactcagcgcggcgttgctgtgcggctgtgcgtcgtgcgccacctgcacaaggggtgggggctgcacgctgcggaggccctcagctgcgggcagtttgtgtgcgagtacgccggggagtttttgacaactgaagaagcgcggagacggcacaaggtgtatgatgaacttgcctctggtggcaagctctgtcccgcgctgattgtcataagagagcacctcccttctggtaaagcatgcttaagagtcaacattgatgcaaccagagtgggaaatgtggctcgctttatcaaccattcatgtgatggaggcaacctgcacccagtgctggtgaggagctctggtttgttgctcccaaggctctgcttctttgctgccagggatatcgtggagggagaaga

SEQ ID NO: 20808 - DNA, 721 bp, Zea mays
  Clone ID: LIB3245-307-A5_FLI
ccagtttagagaagagtgaatcatatgaagtctaaaaatgaagttacatacttcaagataatagttcttggagatattgatgtgggcaaaacgtcgttattagttcgttatgttgataaaacttttgatagtaaaacgattagtactgtatcatttgattataaagaacctgatgtgcaaattaataatgctcccgtgaaagttcgcctttgggatacagctggacaagaaagatttcgaacaattactacaagtttttatcgtggtgctcatggtgtggttttagcctatgatgtaactaataggcaatcctttgaaaacctatcttcttgggctctggatattgacaaatatgcacaaaatggagccaagaagttattaatcggatgtaaaatagacaatgttgcaaagagaaaagtgtctttcgaagaagcgaaaagttttgcaaatgaaaacgatttagaatatgaagaaacgagtgcaaaggagggaaccaacgttgacaatgcatttatgaaattgatacaaaaaatatatgagtgtccagaaacaaacccaaattatgcaaataacaataacaacaacatagcaaaggtgggagctcattcattcgagaaaagttcatcgaataagtgtgcctgttaattatttatttcttgattatcatcaattcaaacatgttatataaaaaaagttcaataaaacctccttgtttatactt

SEQ ID NO: 20809 - DNA, 1580 bp, Zea mays
  Clone ID: LIB3245-307-C4_FLI
ctctcactcgctccctcgttcgccgccccgctccccacctcctctcctctgcctccgccgccgccgccaccgccgtggaactcgacaccaatggagacggtagtgcgggaggtggtgccggtgtggtgaggccgcagtggaaggccgcgattgatttcaaatggatccgagacaaccgggatgccgtcgccgacaacatccggacccggaactctaccgccaatctggacctcgtcttcgagctctacgatcagtacctcacactgcagaaggaggttgaaaggctccgagctgaaagaaatgcggttgccaacaagatgaaagggaaactagacccatctgttcgccaagcccttgttgaagaaggtaagaacctgaaagagggacttatagcactcgaggaggatcttgttcagctgacagataagcttcaacttgaagctcaaagtattcctaacactacccatccagatgttcctgttgggggtgaggaaagctctgtcctcaggaaagaggtaggcagtcagaggagcttcaattttgcaatcaaagatcatcttcagctggggaaggaacttgatttgtttgactttgatgcagcagccgaggtcagtggttcgaagttctactacttaaagaatgaagctgttttgttggagatggccctagtaaactgggctatttcagaggtctccaagaagggtttcacaccactcataactccagagatcgtaagatcatctgttgttgagaaatgtggctttcagccaagggccaaaaacactcaggtatactcaattgaggacagtgatcagtgtctcataggcacagcggaaattcctgttggaggcatccacatggactcaatacttgccgaatccgctttgcctttaaaatatgtagcatattcacactgttttcgcacagaagcaggtgcagcaggtgctgccactaggggcctctatcgggtacatcaatttagcaaggttgagatgttcatattctgtcggccagaggagagtggaaaatggcatgaagaacttattacaattgaagaggatctttatgcatcacttggacttcatttcaaaactctggacatggcaactggggatctgggtgcaccagcctaccggaaatttgatatcgaggcgtggatgcccggcctagagcgttatggtgagatctccagtgcatcaaattgtaccgactaccaaagtaggcgactaggcatccgttaccgcccatcaccctcggagcctccatcaacgagcaccaagaaagggaagggagctgcctcaggccctacgcagttcgtccacacgctcaacgctacagcagtggcggtgcctcgtctgatagtttgcattctagagaattttcagcagggcgatgggtcgattgtggttccagagccactaagaccctatatgggtggactagagttgctctccccaaaattcaagtgaccctctacggtcacccgctgttgtgcttgtgtggacttagaactgtctggctgaagtacaagttaaaggaaggtcatttctcactacaaatatacactactgagtttcgtg

SEQ ID NO: 20810 - DNA, 1039 bp, Zea mays; identical to SEQ ID NO: 12382
  Clone ID: LIB3245-310-C1_FLI

SEQ ID NO: 20811 - DNA, 1133 bp, Zea mays
  Clone ID: LIB3245-311-F7_FLI
tgatcatcataatcccaattcgaatatgaaattatttattggtcttgtacttttattttttgtatgttcatctttcgcaggagatgttctcgaattaactcctgaaaactttgataccgtccttgatggatccagaccagcattggttgaattctttgctccatggtgtggacattgcaaaaatttggctcctgaatatgaaaaattggcaactgcattcaaaaaagcaggagataaagtggtcattgcaagcgttgatgcagataaatacagagaacttggatcaagattcgatgtcaaaggattcccaaccattttctacttcaaatctggaaatgttgctgaaaaggaacaatacaatggagatagatctgcagaaggaatggcaaaattcatcaatgaacaagctggaactaatgcaagaattgttaaacctccttcattcgtcaaagttttggatgcaaccaattttgattctattgttggagattcttccaaaaacgtcctcgttgaattctatgctccatggtgtggacattgcaaatcccttgctcctaaatatgaagaacttggagcagtttacagcaacgaaaaggaagttgtcattgcaaagatcgattgtgatgcagaaggaaacaacgcaattgcaagcagatttggagtcactggattcccaaccttgaaatggtttcctaagggaagaaagagcgaaaaggaagaagaagcatacaatggagaaagaactgttgaaggatttgtcaacttcatcaatgaacgtgcaggaaccaagagaaccattgctggaggattcaaggaggattatggaagactttccttctttgatgatctcgtcaacactcttgttgcaggagataactctgctattgcagctgcagaaaacaaagcaaaagaactcactggacaagatagagaattcgcagatatttatgttagattcatgaaggtttaccaaaaacgtggatcttctttccctaaagaagaaatccaacgtcttggacgtctcctccaaggatctggagtcactcgtgcaaagagagatgaatttgttctcaaaaccaacattctcacctctttcaccgattaaatttattattaattaaaaaatttacagt

SEQ ID NO: 20812 - DNA, 598 bp, Zea mays
  Clone ID: LIB3245-311-F8_FLI
ggacaatccaattgcatggagaagtgcatttgcagctgctaggttcgtgcctgttccacccagcaattgggcagaggcagaggccgattgcctcctgaaacgggtgcaggtccacggtttccatgtggagaaatgtggggtcgggctcacactatactggcagcatggcgagcttgtcactgtatcagcatggcggtgctgatcagcaatctacgcctgtgggcaccaatatttcaccaccatttgctagcagcttcaactccagtaacgtgtatttcgtcttgcaatttagtgttgcaaaggtaacaaatatattggtgttgaacccttcatgttgattatctttgcaacttattagctagaagtagaactagcggatttttagcaatgttggtgtcaatgtctctagtgtaatgatgttgctctaggtttttaccctgcttgctctcgggtcactagacattctaatgtgacttgaaacactgcttgtgaggagagggtataattaacctatcaaatgtctgtggtacagtataatacgtgtttcatgttcttttatatcagttcttcttcttatggtatttcattgtgcagtttc

SEQ ID NO: 20813 - DNA, 797 bp, Zea mays
  Clone ID: LIB3245-312-H6_FLI
aaactacagctaacactgcagccccaagatcgatcgagcgtccacagccccaaggaacatagtataacatggccccagccatttccaagcctctccttaccgatctcgttgcacagatcgggaaggtcccatcgagccacatcaggcctgtcggagaccgcccggacctcgccaatgtcgacaacgagtccggcgccgggatcccgctcatcgacctcaagaagctcaacggcccggagcgccgtaaggtggtggaggccatcggcaaggcctgcgaatccgacggcttcttcatggtgacgaaccacggcatcccggcggcggtcgtggagggcatgctgcgcgtggcgcgggagttcttccacctgccggagtcggagcggctcaagtgctactccgacgaccccaacaaggcgatccggctgtccaccagcttcaacgtgcgcacggagaaggtcagcaactggcgcgacttcctgcgcctgcattgctaccccctccagagcttcgtcgaccagtggccgtcaaacccgccgtccttcaggcaagtggtgggcacctacgcgacggaggccagggcgctggcgctgaggctgctggaggacatatcggagagcctgggcctggagcggagccacatggtggcggccatggggaggcacgcgcagcacatggcggtgaactactacccgccgtgcccgcagccggagctcacctacgggctgccgggccacaaggaccccaatgccatcacgctgctgctgcaggacggcgtctccggcctccaggtgcagcgt

SEQ ID NO: 20814 - DNA, 516 bp, Zea mays
  Clone ID: LIB3245-313-B11_FLI
cttcgccatcctcacagaaatccgtcaagatgaccaagcgcaccaagaaggtcggcgtgaccggtaaatatggtacccgttacggtgcctccctgcgaaagcaggtgaagaagatggaaatcacccagcacgccaagtacacctgcactttctgcggtaaggttaccgtccgaagaaagtccaccggtatctggaactgccgctcctgcaagcgaaccattgctggcggtgcctacactgttgccacccccgctgccgccgctatgcgatcaactctgcgacgattgagggagattgctgaggtttaaggcgttttctttggtacaatggtgaaggattcggctttgcttttcggtctggtgtatgggggacattgtttgcgtgcatacactacgagctggcgaaaaataaacgtcgacgctcgatctttggtcataaacaccggtcgataggcaatgaacaaaaaaaagaaaattgcattatctcggacaaccgaataacgaatgattaatgatg

SEQ ID NO: 20815 - DNA, 429 bp, Zea mays
  Clone ID: LIB3245-316-H12_FLI
caaatccaacacggcgtgctctctcgccattaaaggcacggtctttctctctccttcgctcctttctgtttctctctccagagtggagtggttggtgctctcagtcccaggacccagggtggccgtggcctctgccaatagggccgggccggggctccaccgcacaccgggagggagagatggtgggaacgagcccagggggaggagtgttctgtttctcctccatggtctcctctcctcggctcctcttcctgctcctcgccggcgcctcgctatgctgtgtggcggcgcagaagacggacacgctgcggcagggggagtcgctgtccggggcggcgacgctggtgtcctcgccggagggggtgttcgaggcgggcttcttcgcgccggacccccagtaattttgcactcgtgcccagttctgatttc

SEQ ID NO: 20816 - DNA, 929 bp, Zea mays
  Clone ID: LIB3245-317-A6_FLI
gccaaactaaactgccagacgcacagccgcggagccgccagagacagacgctgccgccgtcggccgtcctccgccctccagttgagcggttcaagcagagctgatggctacatcagagccagtacaagagagtttggtggtgcactactcacaacctagtaggccccgggtcctccttgctgcttcaggaagtgtagccgctataaaatttgagagcctttgccgtagcttctctgagtgggcggatgtccgagctgtggccaccacgtcatccttgcacttcgttgatagatcatctctaccaagtggcatcgttctttacactgatgacgatgaatggtctacctggaagaagataggagatgaagtcttacacattgagctgcggaaatgggcagacgttatggtgatcgctccattgtcagcaaataccctggctaagatcgccggtgggttatgcgacaacctcttgacctgcatcgtgagagcgtgggactacagcaaaccgctctttgttgccccagccatgaacacgttaatgtggaacaacccattcacggagcggcatcttcacacaatcaaccaactgggcatagccttgatccccccagttaccaaaaggctggcctgtggcgattacgggaacggcgcaatggccgaaacctcgcagatccatacttccgtgaggctcgcgtgcaagacgcaaccacacgatgcaggcagttcactcgcgggtcctgtcagtaataaccggccatctagctgatgcagcggttggccacttgattgtcaagcttaggaatttgttttatctggagtgttgtaacagattttttttccaactagtgtttgtgtgtattgaaattggggggaaaggctgtaacaataacttcctccctgctcagtaatgatgagtctattcagtttgt

SEQ ID NO: 20817 - DNA, 756 bp, Zea mays
  Clone ID: LIB3245-317-H8_FLI
gtcacctgctggtctctgagctccctacctatcactcccattgccatctccatcctcctgctgtgagcgtgttgtgtgagcccggccgtccggactctgttgacgagtgagaagcaaggatcgccatggcgcggtgcgccgggttcgtggagaaggcgaagccctacgtggccatgatctcgctccagttcggctacgccgggatgaacgtgctcaccaaggtgtcgctgaaccagggcatgagccactacgtgctcgtcgtctaccgccacgccttcgccacgctctccatcgcccccttcgccctcgtcctcgagaggtcctcgtcgctgatttctgatttctggcgatcgagctaaagctagcgcactgatgatgactgatcacgatgcatgcgactgtggaaaattaatggctgcgtgcaggaaggtcaggcccaagatgacgtggccaatcttctggcagatcttcgtcctcgcgatgctcgggccggtgatcgaccagaacttctactacgccgggctcaagttcaccggccccacgttcgcctgcgccatgagcaacatcctgccggccatgaccttcgtcctggcagtcatcttcaggatggagaagctgcagatgaggaaggtgacgtgccaggccaaggtcctcgggacggtgctgaccgtggccggcgcgatgctgatgacgctctacaagggcccgctgatgcagctggcgtggacgaccaacaggcacgcatcatcgtcgcgc

SEQ ID NO: 20818 - DNA, 1243 bp, Zea mays
  Clone ID: LIB3245-318-H3_FLI
gcgctatctcccttcctcgcaacacaagggtacatcttactcaaaactacaataacacaaggctcagtgccgttgtggtcggtgctttagcagaattgccgtggttaccggcgcgaacagaggtatcgggctagaggtgtgccggcagctggctggcaatggcgtcaccgtcgtcttgacagcagtggacgaggagctaggcgcgaaagccgtcggcaatctccaagggctagctctctccgatgttctttctcaccagctggatatcacggatgcttccagcatcgctcggttggccaacttcttgaaggcccgattcgggaagttggatatcctggtcaataatgctgcggttgctggggtcgtgtactctcaagatcatttggatgatctagaaccgagagaggaaaagggatcagaggcttgaatggctgtggaggaactgccgggagacctaccatgctgcaaaggaatgcctgcagacaaactactacggcacaaagcatgtgatcgaagccttgctgcctctgctgaaagcctccgatgatggaagaatcgtcaatatatcctccgactttggcatttcagaaacgaggatctgaagcaagtgctgaacgacgtcggcaacctcaccgaggagcggctggacgaactgctggaccagttcctgagagacttcaaggtcggcacggcagaagcgcgcgggtggccagtggcgttcgcggcgtacaaggtgagcaaggcggccgtgaacgcgtactcgaggatgctggcggcgaagcagcccgcgctgcgcgttaactgcgcgcatcccggctacgtcaagactgacataaccttacactcggggctcctggcgccggaggagggcgcgagtaatgtggtgaaggtggcgctgctgccggacggcggggtgaccggcgccttctttgaggagggcaatgagctggcctccttcgtgtgatgtcaggatcggcctggttcgctagctgcggctgtttgccatcgcgtgagctcacggagtgtttggacccctcggtctgatgtttaagtgtgtggtagcaggatgcaagacgattctggtaataaactgattatgtttgtgaacggtgataacctgatgatgtatgtgttgtaaatttagagaacggtgataacctgatgatgtatgtgttgtaaatttagagaaataagtgacatgcttccttcagatttaaataaattaaatattctaattccgaat

SEQ ID NO: 20819 - DNA, 1305 bp, Zea mays
  Clone ID: LIB3245-323-H1_FLI
gggaggagatgcggcgtcccgtgcacgccttaaaaacgagatccctggggtcaccactggtcaactgcgtcactgcgccgaatcactagaaaccccaacaaacggaatttcacacatccagcgagcaataccgcaccgcaggtaagatcaaagaggaggcgatggctggcggcgggcaggcggcgatttcgttcatgacgcggatggcgaaggtggcggcggggttgggcgtggcggcgtccgcagcctccacgtccttctacacggtggacggcggagagcgcgccgtcatcttcgatcgcgtccgcggcgtgctcccgcgtacgatgtcagagggcacccatttgctggtccccatccttcagaagcccttcattttcgacatccgcactcgccctcacagcttctcctccacctccggcaccaaggacctccagatggtcagcctcacgctccgcgttctgtcgcgacccgacgtcgaacacctcccggacatcttcacctccctcggcctcgagtacgacgagaaggtcctcccatccatcggcaacgaggtgctcaaggccgtcgtcgcgcagttcaacgccgaccagctcctcaccgagcgtccccacgtctccgcgctcgtccgcgaatcgctcaccaagcgcgcccgcgagttcaacatcgtcctcgacgacgtcgccatcacccacctagcctacgggcaggagttcgcgcaggccgtcgagaagaagcaggttgcgcagcaggaggccgagcgctccaggttcctcgtcgcgcgcgctgagcaggagaggcgcgctgctatcgtccgcgccgagggggagagcgagtccgcgcgccttatctccgaggccacgaccactgcgggcaacggcctgatcgagctcaggaggatcgaggcggccaaggagatcgcaagcgttctgtcgcgcacgcccaacgtctcctacatccccgccggcgacaatggccagatgctgctcgggcttaacgccgcccggtgaatggatcgtctttttccgcgcttcagaatgtcaggacgagatgaaactgttcttggtggggaggagggaaagtttgtttctgtagagcttctagaagtgttgctaagagtctgttttttattaatgaaatggctgggaagtctgtttgtgctcaatagagtgtttcttctgtgaaataaaactggtctatgagatggtgtggcgagctctttgctttgctttgctctctgcaattcagttgtatcccatacatgctgtctttatctctgaaataaaacttttcgagtgaactgac

SEQ ID NO: 20820 - DNA, 792 bp, Zea mays
  Clone ID: LIB3245-324-A1_FLI
cctgaaactttcaaatttgtcgcttggccttagctcccgctcccaggtctcactattacttttgtgtgtgtgtgtgtgaattagtagtatctctagatacgctaattcgatttgagacagtttcttgcgacttcgcgacagaaacaactcactggtgagagacataagccgaatgcagcagcgcaactacgggagggaaggattctcgcatataactgtcacaggtgctcttgctcacgggacgaaggaggtggaagtgtggctacaaacatttggtccaggtcaaaggaccccaatccacaggcattcttgtgaagaggttttcattgtcctcaaggggaaaggcacgctcttactcgggtcgagctcgctgaagtacccaggacagccgcaggaagttcctgtctttcagaataccacattttcgatccctgtaaatgatccacatcaggtctggaattctaatgagcacgaagatttgcaagttcttgtgatcatatcgcgcccaccggtcaagatatttatatacgatgattggagtatgcctcatacagctgcaaagctgaaattcccctacttctgggatgaggactgcttgccagcaccaaaagatgaactctaggttaagtggttcctgcaatttgtcagcttcgtgttcatccacaatcctggtggactacgactcacatctacaagttgaaaaccattagtgtactcttcatgtgtagttttgtgttgtgactctgggaaatccatattgacaacgtttataaaattaagcacttctggagc

SEQ ID NO: 20821 - DNA, 1229 bp, Zea mays; identical to SEQ ID NO: 202
  Clone ID: LIB3245-327-B5_FLI

SEQ ID NO: 20822 - DNA, 1155 bp, Zea mays
  Clone ID: LIB3245-327-G9_FLI
cctgcccccgtccctggtcggaccacgagagccccggactgcgttcacctctgccttttgttcacccctgcacgcgttctctggcgctcttgtctcgtgcgtgcgacaacaactgggcgaccgccgccgccgccgccgccgccctacgccaggtgcgcaggtcttcgtcggatccttcgccagcgaggcgacgagcacctaccaggtgatgcccccggcttaattgaatgggctctcttctcaccaggactggcgtcctgccatggctccaggccaagatcgttgatcccgtgctgcaggtcatcagaaggggagcagaacccaagcaactggccttctctgctgccctcggtgtcacgattgggatctttccgatatgtgggaccactgttattctcggtgctgttgctgtagcaatgttgggaagtcgttgcaatgctgttactcttatggttctaaatttggccgccactccaattgaactaagcttgatcgtccctttcttgcgtttgggtgaagctgtcaccggcagcgggcacttccccttgacggccgacgcactgaagaatgttctcactggtcatgcctcaaaggatgtgctgatgagcatcgtccatgcgatgctgggttggcttattgctgcaccaatcgtactggtcgtgctgtacgccgtttcgttcccatgtttcaagatcctggtcaacaggtttggtggtattccttcgagccccaggaccccaatcaaggcggtgtagccagtgcctggccagatcctctgcaggtacgtccatggacatagctgcagatgggtcgctgacatccggggccggccatggcgtggccccaaacgtcagcgaccggacgtaattgcagaggaaacggtttcagccagtgaggcatgctgaatgcccctggaattgtgtgcaccaagttctttgtgatgccgtcggattgagatgggttccggcatcatgttgctcggccatcccaggcactggcgaataaatatgatgacttgagaggcatgtgtcctctgtgattgtgtatgctggtttcacaaccatatatagcgagatgcgtatttatgaatttatgaagtcttgataaataaagctaggaagcacaggggtcacggaccattgtgccattcttccc

SEQ ID NO: 20823 - DNA, 1720 bp, Zea mays; identical to SEQ ID NO: 144
  Clone ID: LIB3245-328-E3_FLI

SEQ ID NO: 20824 - DNA, 1493 bp, Zea mays
  Clone ID: LIB3245-334-A7_FLI
agtgcccccactgccccggcggctgccgaacctctgctccggcgactaggttcccgcctccccgactctgccccaagcgagcgcggcacgcgtgtcgccttggcttcctctcttctgcttcagtctcgcgccgccggtttctatcctgccgtcgcccggagctcatcgtgctgacctccagtgacgcgctgaagggatctgggaacttcgaggatgctttgctgtgctggccaccaggcgtcccttctcctcttcgctctgctctctgtctcctcccttctgctcgtcgacggatcccatcaggaccaggaattcggtgaagctgttggatccagaattcttcaaacaaatccagacgcacatgaggtgcattgctcaagggaaaggagccgtgcagcttgggaagctattgatgagtatttgatgcccttcgtggaaaaagaaaaatatgaactcccaagcaaatgtagacttcgtcctgataatgacatgtttcgggagcaagagcaacataagattcattttgatattaatgagtggcactgtggcttttgcaagaaagctttccgagcagagaagttcattgatcagcattttgaaaatcgccacaagaatcttgtggataatagtgaaggaagatgcatggcagatctatgcggcgcactacattgtgatctgatgatgcagttcaaaaaaaccaaaaagtaaatgcaatgcagctgcagctacaaggaatcgtcatctttgtgagagccttgcagacagttgctttcctattaatcaaggtcttgctgccagccgtcttcatgaatttttcttgcgccagttttgtgatgctcacacttgcagtaagggaacaaaacctttccccaaaggtggcaggaaacaaacaaacaggttatacctcgctctctccattttgacgctgatacttttgccgctgttctatctaattgtgttcctgcaccagagggaaatgaggaaaggtacccaagatctaaaacggttttcgaaaattgggcagaagaaaaagccatcctagtgtccaacagtcacaacgttctcgagctcatggagccaaggatgagctggataaggaacgtggtatgcagtgtgaaatgtttttatgggcagggaagaaatttccctcatttccaggacgggaacaatgtccgcaggtcgaggaatgctggcttcgaccttttcttttctttttctttcttttttgtttcgacatgtagatgcaaacttcgagaggcaagcatgtgtggtctttgtgagattacggcgatattctatatcgtcaaccataaccgaagtcctattgataatttaaggatttttgggaggcctcaggcttaaaaaccaatgtcagtgaatgtagtatgacttctatccaatgtaatgatcaatgtgttggtgaggcacaatctttattcccttgcaacattgttggatttccttgcaaatatttggagcttcctctgtctgtt

SEQ ID NO: 20825 - DNA, 1131 bp, Zea mays; identical to SEQ ID NO: 20725
  Clone ID: LIB3245-335-B6_FLI

SEQ ID NO: 20826 - DNA, 1168 bp, Zea mays
  Clone ID: LIB3245-335-F2_FLI
ctggtagcagcccgcatgtgctagagctagacagaagtcagtctccttcccctctctagtgctcaccggctccttccgtcgccatggacgtcctcctctgctgctgcctgctgcttctcctggcctccgccgcgtccgccggcagcgagcggtgcgtgcggcaggggaaggcggcctactctccctcgctctccccggcccctcacggtagcagcggagcgtgcgggtacggcgccatggccgccgagatcaatgggggcttcctcgccgccggcgggcccaggcagcaccgcgggggcctcggctgtggccgctgtttccagatgagatgccgagacgcaaggctgtgcagcgccgggggagtgcgggtggtgctgaccgacttccacaggagcaaccgtacggacttcctgctcgccgggccggcgttcgcgggcctggccaagcccgggatggcccaggagttgaacaggcgagacgccctctccgtagagtacaaaaggattccctgcgagtacaaggagaagaacctgtcgatccgggtggaagaagcgggcgacaggagccggggcaagctggtggtgaagctgctgtaccagggcgggcagaccgacgtactggcggtggaggtggcccccgtggggtcgtcgtcggagtggcggttcatgacaagggcgtacgggccggtgtggagcacggaccgggcccccgccggcccgctgcagttccgcgcggtggtcacgggcggctacgacggcaagtgggtgtgggccgagcaggaggtgctgccggccgactggcgccccggccaggtctacgacaccggcgtccgcatcgtcgacgtcgcccgggacgcatcccgcggctgcaccgccgccgccatggacgactggaagtgaagtgaggatatggctgggtagattaaaaatacgtatgaatacatactaacacgtcgccacatcggtgctgcgacactctggtaagaagaggacagcatgcaatggctccaagaacagcatcccccccaagcgcgtccggctgtccagaggagaggaggaagaagattggagtagctagcagctagggtgctccggtctttgtttgtttgctgcacgtgtaattgtgtatgcaggatcttctatcaaggtcgatccgattagatgcaggc

SEQ ID NO: 20827 - DNA, 1387 bp, Zea mays
  Clone ID: LIB3245-339-D1_FLI
tccattgcgtgttccaaatccgctggcgtagcgtagaacacagcatctccggtagcgtcaccgtaggcctcgcaagtaaactgacctgccttctccgctttcccctccgtctccgtcgggagtcgagacaaagggagccagagttagtcccggcgccgtgtcgcgagcggaaggagaaggactgaaggaggcgacgatgcaggtgaagcagaaggtctacgagttctacaaaggcacggtggagcgggtcacggccccgcgcaccgtctccgcgttcctcgagaagggcgtcctctccgtccccgagttcattctcgccggcgacaacctcgtcgccaagtgccccacctggtcctgggaagcgggcgatccaagcaagaggaagccgtatctccccgccaataagcagttcctcgtcacccgtaatgtgccctgtttaagacgtgccatctcggttgaggaagagtatgatgcagcaggagcagaggtggttctcgatgaggatggcgaaggctggcttgcaacacatggagtgcaagcatcaaagacagaagaggaggaagacattccctctatggacaccttggacatagggagatctgatggaataaagtctatcccctcttactttagcggtggcaaggatgaagaggaggaagatatacctgacatggatacttatgaagacacaggggataatttggctgctgctgaaccatcatactttatcgcagaagaaccagaagatgacaacattcttcataccagaacatatgatgttagcataacgtatgacaagtactaccaaactccacgtgtctggctaactggatatgacgagtcaagaatgccattaatgcctgaacttgtgtttgaagacatcagccaagaccacgcacgaaaaacggtgactattgaggaccatcctcacttattggctgggaagcatgcatcagtgcacccatgcaaacatgcagctgtgatgaaaaagatcatcgacgttccaatgtcggggggagtggaaccagaagttgacaagtaccttttcatatttttgaaattcatagcgacagtcataccgactattgagtacgattatacaatggacgtcgaccttggcagtacaagctgattattggttggcttgaagcttgtcacttgtctcgggaaaaggaagcaccctaccagaaggcgcaggaagaaggctgaattgcgtgtttgtggttgaacatttgtgcatatgtgcttgttccttggatcggtttgcatttgtgaacaaactctgaaaagctcaaaggcaagacccatcttgtacattctgtgacgctgtcagcttgtgaatccattcgttaatataaatctcaacaacccgttcggcgtgcgtggg

SEQ ID NO: 20828 - DNA, 1230 bp, Zea mays
  Clone ID: LIB3245-339-D6_FLI
cgatgatcaggaacgtacaaagggttcagttcagttttcagtgagtcggcatatgggcaactgcagcagcagcagcggcttcttctctcttccgaaacgctactcaaactcaacaatggcatggtctcggtcgacgatgagggcgggactcacgaagggataaagaccattccggtgcagagagcctgcgagttcaccacgaactccgtgctctgcgtctgcatcgtcacttggaacatgaacagcaagatgtccgcggaagatgtggcgaagctggtgagctccgacaggaagttcgatctgctggttgtcgggctgcaggaggcgccgaagccagacgtttcgcgggtcctgcaggaggcgttggcggggacacacgtgctgttgggtcagaagagcatgcagtctctccggatgcttcttttcggttcaaggagctcggagaagtacatcagagagatgaaggtggacaaacacgcggttgggggctgcgggggtatcatcgggaggaagaaaggagcggtggccatgtacatcaacttcagcgggatccggatggtcttcgtgtcctgccatcttgcagctcacgagcacaaggtggagaagaggaacgcggagttccagcacatctcgcagtcgctcttcgccaggtacggcgcgccgacgccgtacgcgcagtctgccgacataacggtgtggctgggcgacctcaactatagactccaagggataagctcgacaccggcgaggaagatgatcgaggagaaccgccagagcaagctaagaggcagagaccagctgctgcaagaggccgagaagggccaggtgttcagcggctactgcgaggggacgctgtcgtttaagcccacgtacaagtacgacgtcgggggcagcgtctacgacaccagctacaaggtacgagtgccttcgtggacgggcaggatactgttcaaggttggccagtcttcaggcctggatgcagtgctcagctcgtacgaatcactcgactgtgtccggagctccgaccacaagcctgtgaaggcgcatctctgtctcaaagtacgcagtgatggtgatgctgactgatatccagctggcgcaggagggtttcaactggcggttacttctgcagattaacatgacatgctaattaagatgaaaatgttctagtttggaagggtgattatactctagtatattttataacatggcgctcttagcttgtgggcc

SEQ ID NO: 20829 - DNA, 1522 bp, Zea mays
  Clone ID: LIB3245-341-F3_FLI
ctttccctcctcagcttcagccttcagctcctctcctctcctttcctttcctctgctctcctctccacagctgcagccagagccacccaccttatcgtcatcctcgctcgctcctcatcgccagcgcctcctccttcttccccaccgctgcctacatggctgcgcaagaggagaagaccgctgttgctgctgctgctgatgtcgccgcagaggagcctgcgccggcgccggagcagcagcctcagccggctggggcggcgcgcagggcagggccatcggcacccggcggggctccgcccaaccccttcgacttctccaccatgatgaaccttctcaatgaccctagcatcaaggagatggcggagcagatcgccaaggacccggcgttcacggagatggcggagcagctgcagaagacggtggtgtccccgcggcagcaacagcagcagcaggcgcggcagcagcagcagcagctggacccgcagaagtacgtggcgacgatgcagcagctgatgcagaacccgcagttcgtggccatggcggagcggctaggcagcgcgctgatgcaggaccccgccatgtccgccatgctggggggcctcaccaacccggcgcacaaggagcagctggaggcccgcgtcgcgcgcatgaaggaggaccccacgctcaagcccatcctcgacgagatcgagtccggcggccccgccgccatgatgaagtactggaacgaccctgaggctctgcagaagttcggccgcgcgatgggcgtcggcgtcggcccgtccggcgaggccggcggcgcagagcacgccgaggcggaggacgacgctggggaggaaggcgagtacgaggacgagtccatcgtccaccacaccgccagtgttggcgacgtcgagggcctcaagaaagcgctggagaacggcgcggacaaggacgaggaggactcggaagggcggcgtggcctccacttcgcgtgcggctatggcgagctccagtgcgcgcaggcgctcctggaggccggcgccgccgtggacgccgtcgacaagaacaagaacaccgcgctgcactacgccgccggatacggccgcaaggactgcgtcgcgctccttctcgagagcggcgccgccgtgacgctgcagaacctggacgggaagacgcccatcgacgtggccaagctcaacaaccaggatgacgtcctcaagctgctggagaagcacgccttcgtatagacgtcccacgccgccggccggcccgtcttgctcgtctgctcctgtcgccgccgctgccacgtcgcttgcctctgctactgctgccgccgccgccgccattaatgctttgttgatttctctcctggtctagacaacgcaggttccttcatcacttcactgttgagtatttgcattgggtgtgtatgtatcagattttgctttgcgtgatcacggtatcatatttatttatcggactcctcgttcatcaggaggttttcgtaatgaataaggaagaaatttccatttcaccgtcc

SEQ ID NO: 20830 - DNA, 1495 bp, Zea mays
  Clone ID: LIB3245-342-A9_FLI
cgccggccgcgtgcacctccgtgcgtgccttgagggcgcgtatcacgtcatggaggagccgaccatgtacgccagcgacacgcgcccagccgcgcggcagctgtggcgcccgccgattggcgtgctggaagtcggcgtcctcggcgcgcaggggctaacgccgatgaagactgtcgacggccggggcatgaccgacgcgtactgcgtcgccaagtacgggcagaagtgggtgcgcacgcggaccgtggtggactcttgcagcccccggtggaacgagcagtacacgtgggaggtgtacgacccgtgcacggtgctcacgctcgccgtgttcgacaactgtcacctcggcagcgccagcgctggcaacggcgccctcagagaccagcggatcggcaaggtcaggatccgcctctcgacgctagagatggacaaggcgcgcactagcgcgcacccgctcgtcgtgctgcacccgtccggtctgcgcaagaacggcgagctctgtctggccgtgcgcctcacctgcctcacgctcggcagcgtcgtgcgcatgtacggccagcccctcctccccaaggcgcactacgtgcagccgctcaccgtcgtgcagctcgacagcctacggcggcaggcgatgagcatcgtggcagcgaggctgagccgggccgagccgccgctgcgtcgggaggtcgtggagtacatgctcgacgcggactcgctcgtctggagcatcaggcggagcaaggccaacttcttccgcgttacggcgctcctctcaggcgcggccagcaccgtgcggtggctcgccgacgtttgccgctggaagaacccggcgacgacggtcctggtgcacgtgctcttcgtcaccctcatgtgcttcccggagctcatcctgccgaccatgttcctgtacatgtccacggctggcctctggaactaccgtcgccggccgcgccggccgccgagcatggacgcgaggctctcgtgcgccgaggcgacccaccccgacgaactcgacgaggagctggacacgttcccgacgtcgaggcccaacgccgtggtgcggctgcgctacgaccggctgcggagcgtggccgggcggatccagacggtggtcggagacgtggcgacgcagggagagcggatccgatccctgctcacatggagggacccgcgggccacggcactgttcacggtgttctgcctcgtcgccgccgccgtgctctacgtcacaccggtccgggtcgtgtcgctcgtcgtcgggctatacgtgctccgccacccgaggttccggggccggatgccgtcggctgctggcaactttttcaagaggctgccgtcccaggcggacactatgctgtagcctgcagtttcagtgcgacttttgcgagtgtattggtgttcagttcaacaatagtagtactggaaaaacttaaggtccaaaactgtttggaagaagactagtttttaagaattcagttttatcttcagtttttag

SEQ ID NO: 20831 - DNA, 1036 bp, Zea mays
  Clone ID: LIB3245-342-B4_FLI
ctgtctttccatgatctaggagccgtcgccgtcgagagctgaggcgaagcaacatagaagacgaggggggagtgcgactcctcgtgacttgtgagggagagaagccatggcggagatggagccgagcatcgggaaccatatggccgaagaccaaccgactccggccgcctccactgtcgaggaggccgctatggatgcagataccagcggcgagcggcgtagcgctgccgcgttggtgggcctgctccgcgggttcctcgccgtgcaacagcgccgggccgaggcctactccacgctacgaaggggtttttctgagtatatggcttatggaggtgaattggcctatcaacaactgtgtggcaatattacagcggagttcaatgattgctcaaaacaagtccttgaaataatttccctgctctcaatgccagaatttagtcgcagcgatcttgccgatttactgaagggtgttcaagcacatgagaaagagaagttgcatttgacagctaagattcaggtgctgaagaaagccggcaggccttcagagcgcctggtgaaccacgcagactgcaggtcgcgcagcatggcccagcacgtgtgcgtgcacgtcaaggagatcacggaggccgccggcaccgaggacgccgaggcggatgcggagtatgacgcggccctcaaggaggccatacagggcgtgcaggttgccgtgagcagcataaacgaacacatggaggaggtgcgctacgagattgacggactcgaggcagagacgatcggtagcaagtggagcgaagtcgaggaagcgttccctggtaccctgtctataaaatagatagatgagatgagatgagatgagatgttgagcgtggaagactgaagaagaatcacgaacagagagattcgatgtgaatttttgggtactgttcagttcagggtacccgtgttattatacgtcctccaatccaaaatttagttctttctggtcttttttccctccacgtttgaatgataatgaatacagagctacatataaatt

SEQ ID NO: 20832 - DNA, 1643 bp, Zea mays; identical to SEQ ID NO: 658
  Clone ID: LIB3245-343-F11_FLI

SEQ ID NO: 20833 - DNA, 1485 bp, Zea mays; identical to SEQ ID NO: 769
  Clone ID: LIB3245-349-C10_FLI

SEQ ID NO: 20834 - DNA, 1830 bp, Zea mays
  Clone ID: LIB3245-349-H5_FLI
gcttctttctgcttgggtgcctctgccctgaccacagggcccaaccatatcttcttcctcacacagagacactgagcgagcgagcttgagatcgatctcaggaggcggccggcggcggcagcagcagcagagcttgttggcgccgccatggcgataggtggcttcgtggaagcccctgccggcgccgactactgtggccgcgtgacgtccttcgtggtgctctcctgcatcgtagccggtagcggcggcatcctcttcggctacgacctcggcatctcaggtggggttacctccatggagtcgttccttagaaagttcttcccggacgtgtaccaccagatgaaaggagacaaggacgtgagcaactactgccgcttcgacagcgagcttctcaccgtcttcacctcctccctctacatcgccggcctcgtcgccacgctcttcgcctcctccgtcaccaggaggttcggccgccgcacctccatacttatcggaggcaccgtcttcgtcatcggctccgtcttcggcggggcagccgtcaacgtatacatgctcctactcaacaggatactccttggagtaggcctcggattcacaaaccagtccatcccgctgtacctctcagagatggcgccaccgcagtaccgtggcgccatcaacaacggcttcgagctctgcatcagcatcggcatcctcatcgccaacctcatcaactacggcgtggagaagatagcaggtggatggggctggaggatctctctgtccctggccgccgtgccggccgcgttcctcaccgtcggcgccatctacctgcccgagacgcccagcttcatcatccaacgccgcggcggcagcaacaacgtcgacgaggcaaggctgctcctccagaggctgcgtggcaccaccagggtccagaaagagctcgacgatctcgtgtccgcgaccaggacgaccaccacagggcgtcccttccgcaccatactgaggcgcaagtacaggccgcagctggtcatagctctcctcgtacccttcttcaaccaggtcaccggcatcaacgtcatcaacttctacgcgccggtcatgttccggaccatcgggctcaaggagagcgcgtccctcatgtcggccgtggtcacgcgcgtctgcgccacggccgccaacgtggtggccatggtggtcgtggacaggttcggccgccggaagctcttcctggtgggcggcgtgcagatgatcctgtcgcaggccatggtgggagcggtgctggccgccaagttccaggagcacggagggatggagaaggagtacgcgtacctggtgctcgtcatcatgtgcgtcttcgtcgcgggcttcgcctggtcctggggccctctcacctacctggtgcccaccgagatctgcccgctggagatcaggtcggcggggcagagcgtcgtcatcgccgtcatcttcttcgtcaccttcctcatcggccagaccttcctggcgatgctgtgccacctcaagttcggcaccttcttcctcttcggcggctgggtgtgcgtcatgacgctcttcgtgtatttcttcctgccggagaccaagcagctgcccatggagcagatggaacaggtctggaggacccactggttttggaaaaggattgtagacgaagatgcagcaggggagcaaccgagagaggaagcagcaggaaccatagctctgtcgtccacgtccaccacaacatagtcatcatcaacaatactcatggcatgggcctgccctgtatagatagataattaactagctgcaccgcacagattgtctccgactataagctagctagctagttgg

SEQ ID NO: 20835 - DNA, 1451 bp, Zea mays
  Clone ID: LIB3245-350-F10_FLI
ttcaagatttggaggcagggaaggacggggtacccgctcgtcgatgctggcatgagggagctgtgggcgacggggtggctgcatgaccggatacgcgtggtggtggcaagcttcttcgtcaaggtcctccagcttccatggcgatggggtatgaagtacttttgggacacgttactggatgctgatcttgagagcgatgcgctgggctggcagtacatcactggctctcttcctgatggccgggagcttgaccgcatcgacaacccccagtttgaaggctacaagttcgacccgcatggggagtacgtccggcggtggattcctgagctcgcaaggctgccgacggagtggatacaccatccatgggacgcgcctgtctccgtgctgcaagctgcaggaatcgagctgggctccaactaccctctccccatagtggagctggacgcggccaagggcaggctgcaagcggccctgtcagagatgtggcagctggaggcggcgtcgagggccaccatgaacaacgggacggaggaaggcctcggcgactcctcggaggtcctgttccctcaagagctgcagatggaggtcgaccggcagccagccccagccgaggcagcagccaacgtgcacgtgcccgtgccgatgcctgcccggaggcgcggggaccagatggtgcccaccatgacgacctcttcgctgaacagagctggaacagaggtctccgccgatctagtagtagcgaacagcgaggaggaggacaccagggcgcaggttccgttccacgcgcatctccacccacgagccgaagccccgccagctgcgcgtagaaccaacaacggcgctcgccagcacgacgtcttccagcagcctcggaaccacaggcgagaagctctgcttgctccgtcagcgtcggaggcttcgagcagctggaccggcagagagggcgccgtggtcccggtctggtcgcctcctgcggcgtcgggccattcggacgccttcgctgccgacgaagctgacgtctctagtaggagctatttgggtaggcatccgcagtcccaccggctgatgaactggagccaactatcgcagtcatcgtgagttcagatgcacggacagcagcagaagattctgtgcggccaaacttaatcgagctgaagattctcgtatgtagattgtccactgaactgctcatccatagtctgatgggatggaaaccaggcggcttttcctggttgtggtggctataggctatagctgtgtaaatctcgtcttctagaacgtgtgtggtcgatatagtgcggttggctttacaacaacaacaaaaaaaagtcgctattattgatcagacgacaaaggttttccgtattttcttagccttttttggggggaggtatgtgatgtgtgtaaccgtaactgtacattcccttgtgctgaccatattgttagtttcc

SEQ ID NO: 20836 - DNA, 1031 bp, Zea mays
  Clone ID: LIB3245-350-F4_FLI
gcattgtaccctatgttcatgccaccatggaagggcttcgtattggagcaccgattatgcaggtttatcatgagaaatcttttatcttacctgatgtttcaagggtgcttgcttgcctttatgagaaggatgtcaagtttgagactcacacagcctcatacaggagcctactcggattgcaggcatcatctcatgctccagttccattctatgaaggccctacttttctagaagaatccagagaaatctgccgttatatagcagaaaagtatgaaaatcaaggatatccgttcctccttggaaaggatgcccttgagagggcttcaattgaacaatggctccacaacgaggagcatgctttcaaccctccgagccgggccttgttctttcatttggcctttcccctgggtgaaggagaagatgatgatattgatgttcatacaaggaagctagaagaggttctggaagtttatgagcaaaggctcagtgacagcgaattccttgttggaaacaagttcactcttgccgaccttgttcacctgccaaattcccactatatcaaagcatctaacaagtttctttacctttatgattcgaggaaaaatgtaaggaggtggtgggatgctatttctgaccggagttcttggaagaaagtgctgaggtatatgaagagcgtggaggagaagaacaaacaagaagaactcaagaagcagcagcagcagcaggaagaggctcctagaacctccaccgacccaactcgggtagactcgagaaagcagagcagaacagagcctcggacaatattggttcctcctgctgataacgagtcatcagcttcgatagttcctcgaacaaagaagcctcttcctggtgatcacttagtgtctactcaacaaattgatggtgttggtatgccagccacaaattgatggtgatggtcgtcttagtggtgtttgtcttgtcttttattgtttggttctttaacaagagttatatttttaccttctgaccaaagagttgtttaacaggat

SEQ ID NO: 20837 - DNA, 1346 bp, Zea mays; identical to SEQ ID NO: 1868
  Clone ID: LIB3245-358-A7_FLI

SEQ ID NO: 20838 - DNA, 947 bp, Zea mays
  Clone ID: LIB3245-358-G7_FLI
acacaggctgctgcgccgtgcaaggcacgatcgtcgaccaaccaccatgaatgcctgcagtttgcttgcgtccatttcgctgtcactctgctgcactgtcgccctaccatgtagtattattatgcatggtgctccagtttgtcattagtccatgacaaggggctcggttagtccacagccctagaggctgcagctgcacacttctcttctctgttttcgccggttaaactttccccacttgttgctggccttcgaatctgtggtttgtttgagcttagcagggaagcgaagaacagggaagcaaggacatggatgctttcagtgcagtgatggacaaggtaaagagccacccagaaatgatggagaaggtcagtgcagtgatggacaaggtgaagaagagccacccagaagcggtggaaaaggtcaaggacgaggtgatgagccttgctgatgctctccatctgcgtagacatggatccaaagataaagaacctgagtctgaagagaaggccgaagaaggcgaggcagcgcagagcgtcgaagaggaggagggtacctctgctgacaagactgcagaacctaatgtgttggagcaggccgtacaggagattcaggctgtcgccgcagctttgcagcagacagcacctgaaactgaaactgaaattccagttgagactgctgctgctgctcctgaaacttcggctgaaggagacaagcctgaagacacaaacagggaggtggagaaagatgacccaaagaagcggctcgatttcgccgggttcttcgccatgctgtttgagaggttctgctccccggccaacaagaagaaagactgagtgattgcaggtcagctgtggatttctcgttttgtgatcttggacgtggaaattacattttacttgatgtatttattgtgggtggtgtacagtctgcacttgtgttctatt

SEQ ID NO: 20839 - DNA, 658 bp, Zea mays
  Clone ID: LIB3245-360-F9_FLI
gaaagaaaaacagacacacgtcactgttcgccttgtccggtcgtttctgctccattcctcctcctgcaagccgcaaaggaatcaggcggagtggcgcgatgggagagcaggtcgtgacggagcagatccagcggaagctggaggaggtcaacgctaccgtccaacagcacctcgcgggtgtccaggaccacatcaacttcaccatgcagcaagcatacttcaagtgcgcatatggttgctttgatcggcgccatactcaggaagcgatcagcaactgtgtggagaattgtagtgtgcctgtccttgctgccaacaatatttttgagagtgagatggccaagtttcagggaatgttgaaccggtcattgagggtctgtcaagataagtttgaagctgccaatccccagaagttgaaatcagatgcaactcgggaactggaatcctgtgtcaacagatctattgatgacagcctcagggtccttccgcatgtggtggatcagatcaagtccaccctcaaaatcaattagaggcactattacttttagcaaatgaaccagatatagttgagaatgtttcatattcacattcgctgcataactccacattttcagagctcttaccgatattgatagaacatgatcaccctatcgtagttttt

SEQ ID NO: 20840 - DNA, 927 bp, Zea mays
  Clone ID: LIB3245-362-D3_FLI
gcacgacatagatccatccaatagcaactcaccaagccattccagattccaaaggacaagtaagcgaagcgcaaacactagcagccagctcggaataatcggaggagccagtccccccacctactttgctctgctctgctcctccatggccagcagctactactccctcatgctgctcctgctgctggcggccacggccgtagcagaagaagcagccgccgaggcgtccggaggcggcggcaacgcgaccgagacgtcgccgacggcgtacgagatgctggagcggtacggcttcccgcggggcatcctgccggcgggcgtgacagggtacgagctcggcgcggacggcgccttcgaggtgtacttcccgcgggcctgcgagttcctgctggcgaggacgtggctggtccgctacgaggcgcgcgtgtccgggtccgtcgccgccggctcgctcacggcgctgcgggggatcagcgtgaaggtgctgttcctgtggctcggcgtcggcgaggtggaccgcgccggggagacgctcagcttctacatcggccccgtcgccacgtcgttcccgatcgacgacttcgccgagagcccgcgctgccgcggctatgatgccgaggcggcggcctcgtcgtgactcatgacgcagccttcagccggcggtgattattaggactgccttgctgatttagctggctatatatacacttgtgcatcgatcgagtcggagccggcgattagctatttttcctcgtcctttaatttttgtttatttcgcggactttgagcaagttatttgcggtgatcttgttgccctgggtgggttggtttgtaggaatttcggaaaaatcatataagattttttacagaacagtttattttcacagaaaaaacgcaacccaggaagtggaaaaaatcttgcaattc

SEQ ID NO: 20841 - DNA, 485 bp, Zea mays
  Clone ID: LIB3245-362-H7_FLI
gaggaagactagggaggctgccttcatatagcggctagttggagcccaacgctcgccattgcaagccttcccggttacttgttcactaacaaggtcgggacggcatggcccttggagctgcgtaccatcactacctgcagctcgccggcgaccatggcaccgccacacacgcactgctcctcggcgtacttatcttcctcgtcatccgcctagtatccgcaaggcgaaccggcacaacctcagccaacaaacgtaagcagcaacagcggcttccgctcccgccttcgcccccgggcaagctgcccatcatcggccacctccacctcatcggcgccgagacccacatctcgatccgggacctggacgccaagcacgggcgcaacggcctgctgctcctccgcatcggcgccgtgcccaccctgttcgtgtcctcgcccagcgccgccgacgccgtcctgcgcacccaggaccacatcttcgcgtcg

SEQ ID NO: 20842 - DNA, 1847 bp, Zea mays
  Clone ID: LIB3245-363-B2_FLI
tgcccactttctccacttcctcctcctcgcgagctcagctcgcgcaccgccgcagacagcgccgccgccctctcctcctccccttccgctttgccgccacccactgctgccggccgccgcaggcaccccatggccccgaccgggcggctcctcgcggtagccgccctctccttcctatgtctgcaggggccgtggggagattcaggcagcgcatttgctcagagccagccgccgcttcaccggaccgttcgcgcagaggcaaatgacggcggcggcctcatgccggagctcccgcccagcggcctcatgcccatgccggagctctcacccagcggctctcccacgccatttgtccccttcctggcgcccgctccgctcgcgccattctttaacaacagcacgccaaagctctcaggaaaatgcacgctgaactttaccgctgtcgacaaactcatgaccaccacagctgtcgactgcttcacctcgtttgctcctttcctggccaatgtcatctgctgcccgcagcttcaggcaacactgaccatcctcatagggcagtctagcaagcagacagggtctctcgcattggatcccacggtggccaactactgcctgtccgatgtccaggagctgttgctgagccaaggcgccagcgacaaccttcacagcctctgctcggttcacctctctaatgtaaccgagggatcctgccctgttagcaccgtcgatgcgtttgagagcgccgttgattcgtccaagcttcttgaagcctgtcgcaagattgactctgttaatgagtgctgcagccagacatgtcagaatgcgataaatgaagctgcccagaaaatctcgtccaaggacgcaggtttgacgagctacaccgggagtcccaagactgacagctgtaggaatgttgttctgagatggttgtcaagcaggcttgacccacggtccgcgaaggaaatgctgaggcagatttccaactgcaatgtcaatggagtttgtcctctaagctttccagacacaagtaaggtggcaaaagagtgtggtggaacaatgacgaacagtactgcatgttgcaaggcaatgttaacttatgtagcccatttgcaaaagcaaagcttcataacaaacttgcaagctttaaattgtgcctctttccttggggcaaagttgcaaaagatgaatgtcagcatgaatgtctatagctcttgtcaaataacattaaaagatttttcactgcaagttggatctcaagaatctggatgcctccttccaagtatgccctctgatgcatctttcgacagcacttctgggattagcttcacatgcgatctgaatgacaacatcgcagccccatggccatcttccatgcaagcaccatcttcatcgtgcaacaagtctgtcaatatcccagagcgacctgctgcgacatcggcacaaagtggtgtgaaccacaagaacctaaagctaagactgcttgcctctttggtctcccttcttctggtgctcttggtacaagtttagcaaggtccagttgccctattatcgcgatgattcgttcaggagagctaactggaagtcagtgaagcgctgagttttttgcgatctcgcggtcgcatcgaagtgttgtaggtttcacgtgtattttattttattttattttttgaatctcctggtagcaattagtgtagtttgttgtaaggaatatatgtataatataatgatagtagtaacttatattcatttgtatagcgagaaagaacgtctggtggacggattccagcattgtttaacacaatgtttattgtttactaattgatgtgtttgatgttgatagacggatc

SEQ ID NO: 20843 - DNA, 1312 bp, Zea mays
  Clone ID: LIB3245-363-B7_FLI
catccacatccttgtccgcggcgaaacacaatttcccacagcgagcgaggttcccctcccgactcggtgatggcggcgccggcggcggacgaggcatggtgccgaaagacggtgccacgggtgatggaactggtgtgtcggcgccttccgcagcgggacgcatgcgcgctgcttgctgtcagtccctggtgctaccgtgccctcgttgctaactccaggctctgggaggtacttgatctacgtgagatgaagaatgctggaaaccgacttatttcagcactttcactggcaaggtatcgtcacctcaaagtattaaaccttgaatttgctcaagatattgaggatcgatatttagttcatctaaaagaaatgagtggcatctcactggaaaatttggaattcctgaacctaaatgcatgtcagaagatctctgataaaggaattgaagctgttaccagtctttgtcctaatcttcagcaccttgctatctattggattgtaggactgacagactcaagtattgggcacattacaaagaactgcaagcatctagtgcaccttaacttgagcggttgtaagaatatcacggataaaggaatgcagttgattgctaataattaccaaggactaaagagattgaacataaccaggtgtgttaagttgacagatgatgggcttaaccaagttcttctgaagtgttcttcacttgaaagcctaaacctttatgccctttcaagttttactgacagtgtttatagggagataggatcattaagtaatcttacatttctagacctatgtggtgctcagaatctaacggacgatggccttgcatgcatatcaagatgtggacgtctaacatacctcaatttgacttggtgtgtacgtgttactgacgctggcattttagctattgcgcaaggttgtcgagccctcgaactgttaagtttgtttggaatagttggggtgaccgatgcatgccttgaggctttatcaaaatcttgctcgtccagcctcacaacactcgacgtaaatggctgcataggtattaagaggaggagccgggatgacctgctgaagctcttcccatcactgagttgcttcaaagtgcacagctagcaggcacggtggttctcgatggctttgtattctacatctaggaaggggaagggagatgttgaggtgtgtcttgacttcatgttcttgtgttagtatatactttctttgtttcggattttctatgttcgttgattttgctatgtatggagacattgtgtatatctaagttcgtatcaagagttctacagcagct

SEQ ID NO: 20844 - DNA, 670 bp, Zea mays
  Clone ID: LIB3245-365-E12_FLI
accaccccaagagacagcaaccagaggatgctgatcgaggagaacctcttcgggagggctgccctgaatgtcattgcgtgtgagggcacagaccgagtggagcgccctgagacgtacaaacaatggcaggtgcggaaccaacgagcaggcttgaagcagcagccattgaaccctgatgtcgtgcaggtagtgcggaacaaggtcaaggattgctaccacaaggactttgtgatcgacgtcgatcaccgctggctcttgcagggatggaaaggccgcatcctctatgccgtctcaacatgggtggcaaatgatgccccctcttacatctagctgttctgttgactcacttgtctacaaattttaggtttaggtatgtcatctggatatatctagtgacaagtgtgttcagtgggttacatggactcacttgtgattgatggtaatgcgaactagatgcttatcactcaaccatgttgttgcatagtgctaaacatgattagatctaggtcctgggtctgggcaatgtcctctgcagcatctgccgtgtttgatcaatccagtcagttgatcaggttgtaattgacacttggtcctctctgtttccggtgtgattactgcgctgtttcagacttcagaatcgttatcatgaactgatggattttgtctgtct

SEQ ID NO: 20845 - DNA, 449 bp, Zea mays
  Clone ID: LIB3245-366-B5_FLI
gcgggggctacatagcaagctccttctctgctaaccgagcgagagcagctgtagcctacactctacagctagcgcaactaacgaccatccacctgaaagaggaagtgcagtgcaggtccaggcagctagcagtgaccgagagtgagggacagggcaatggcgtcctcactgctccactgccccgacaagctcccgttcttggacgtggaggccatcctccacatgaaagaggggctcggcgagaccagctacgcgcagaactcctcgcttcagaagcgaggcatggacacgctgaggagcctcatcaccagcaccgcgacggacgtgtacgtctcgcagatgccggagcggttcacggtggccgacctcggctgctcctcggggcccaacgcgctgtgcctggcggaggacatcgtggggagcatcggcagggcgtgcggccggtcgtc

SEQ ID NO: 20846 - DNA, 346 bp, Zea mays; identical to SEQ ID NO: 4907
  Clone ID: LIB3245-370-A5_FLI

SEQ ID NO: 20847 - DNA, 457 bp, Zea mays
  Clone ID: LIB3245-373-A11_FLI
ccgcgacaacaaagagggctgtacagacatttggcaagaagaaaacggcaatcgcggttgcctacgtaactgatggcaaaggaatgattagagtaaatggccaaccactcaaactcgtcaaacctgagatcctacaattaaagctttgggaaccagttttgcttctcggtaaagacgctttttccaacatcgatattagagtacgcgtgaagggaggaggttacacttctcaagtgtatgctatcagacaatccattgcaaaggcattgatagcctggactcagaaatatgttgatgaagccaccaaggctaccttgcgtgagacccttgtcacttatgatagaaacttgcttgttgcggatcctcgtcgttgtgaacctaagaaatttggtggtcgtggtgctcgtgccagattccaaaaatcttatcgttaaatcactaataaaaattcttgtag

SEQ ID NO: 20848 - DNA, 1056 bp, Zea mays; identical to SEQ ID NO: 12371
  Clone ID: LIB3245-379-D11_FLI

SEQ ID NO: 20849 - DNA, 496 bp, Zea mays
  Clone ID: LIB3245-381-H5_FLI
gcgacaaggctcctgtgcagatccgcactagaaaattcatcagaaacgtccttctgggcagaagacaatgcatcgttgatgtgatccaccctggtcgcgccaacgtcagcagaagcgagctgcaagagaagcttggccagctgttcaaggtcagcgagaccaacctgatctatgtgttcggtttccgcaccgcatttggtggtggaagctcgaccggttttgccttaatatacgactctgttgaggccgccaagaaattcgaacccagatatagacttgcaagaaacggccttgccaagaagagagagggttccagaaagcagatcaaggagaagaagaacagacagaagaaggtgtggggtgttggccgcagaattgccagacacaaggccaagaagaacgccgattaagcattttgaagtttttattgtacttttatggaatgtttacgtcgccctcgttgtgcgttgttgcctaactaagctggtttgttgac

SEQ ID NO: 20850 - DNA, 395 bp, Zea mays
  Clone ID: LIB3245-382-A10_FLI
gatcgattaagctgtcctcaaccatcatggctgccattatggcggcaggtctggtagtactggcactcctcgctgccgtcgccgctccggcgcacgccacggactacgtggtgggcgactcggccgggtgggccagcggcgtggactacgccacctgggcgagcggcaaaaccttcgctgctggggacaacctagtgttccagtacagcgcgatgcacacggtggcggaggtgagctccgcggactacagcgcctgctcggccagcaactccatccagtcctacagcgaccagaacaccaaggtcgcgcttacggcgcccggcacgcgctacttcatctgcggcgccccgggtcactgcggcaacggcatgaagctcaccgtcacggtcgccgcc

SEQ ID NO: 20851 - DNA, 799 bp, Zea mays
  Clone ID: LIB3245-382-A9_FLI
ggttgctgctgctcccctcgccactaaagctaagactgccaccaaggaggttgctaaccctctcttcgaaaagcgtcctcgcaactttgccattggtaacgacgtccagcccaagcgtgacttgactcgctacgttaagtggcctttctatgtccgtctccagcgccagcgtgccatcctcaagaagcgcttgaaggtccctcccgccgtccaccagttcacccgtaccctcgacaagaatactgccacccaggcccttcgcctattgagcaagtaccagcctgagtctaaggttgagaagaaggctcgtcttgccgccatggctgctgccaaggctgagggcaagcaggttgagacctccaagcccttcaatgtcaagtatggtcttaaccatatcactgctttgattgaggccaagaaggctcagcttgtccttattgctcatgatgttgaccccattgagttggttgtctggctccccgctctctgccgcaagatgggcgtcccatatgccatcatcaagagcaaggcccgcctcggtgccctcgtccacaagaagactgccaccgccgttgccctcactgaggtcaagcccgagcacaagcaggagtttgccagcctctgccaggccatcaaggccaacttcaacgacaagttcgacgaaacccgcaagcactggggtggcggtatcatgggcgccaagtcccaggccaaaatggctcgccgtgctgccattgccaacaaggatgccgagctccgtcagtaattcactccctttataatacagatcattatgcat

SEQ ID NO: 20852 - DNA, 879 bp, Zea mays
  Clone ID: LIB3245-383-G2_FLI
tataattacaaaataactaaacattaacagagacaagtctaacatccatgtccaaaggttccaacgcttacgactttttggctaaagtcctcatcattggtgattcaggtgtcggtaaaacttgtctcctccttcgtttctgtgagaataactttactacctcccacttagccactattggtattgatttcaaaatgaagacaatcgaagttgatggaaagaaggtcaaggttcaaatctgggatactgctggccaagagagattcaagaccattactcagacttactataaaggcgctatgggaataatcttgagttacgccgtcaacgatagagaatccttccaaaacattgaaaactggatgaagcaaatcagacaacatgccagtgacgatgtctgcaaaatccttgttggaaataagagcgatatgcctgatagagttgttgatactgaagaaggcagaagattggctgattcctatggaataaaattcttcgaaacctctgctaaggaagacttgaacgttaatgatgctttccacactattgcaagagaaataaaggagaagattgtccacagagaaagcgataaagcgactgctggtggttctggcttcactggaggaaatggtaccaagttagattccaagggaaagactgacggcaaaaaagctggctgctgccctaattaagcacagaatctagaaggaaaacccgtttataattacctaatgacgttattatcccgttcgaattttttattataatatgctttgctcttttgtaatcccctccaatgaatttgaaagagagagatatcaagctttttattcatgtttgccatctgtatacatatagtcagaagtcaagtttttaact

SEQ ID NO: 20853 - DNA, 531 bp, Zea mays
  Clone ID: LIB3245-384-A3_FLI
gtccccgcaaggcccagctcctcgctgctcactccacagcgccgcgcaatggcggccaagcagcggcaccggcagctgccactcctgcccctcctcgccgcggccgtcgcgtggtcgctactgcgcgccgccgccgccgcgggcacgggcactggcacgctcggcctccggcacaagcccgcgaggcagcacaacagcacgcggcacgggggagggcggcgcgcccagcgtggtggcgctcccggcactggcatggcgtcgtgcaacctgttccagggcagctgggtgtacgacgacacgctgccgatgtacgacgcggcggggtgccccttcgtggagccggagttcgactgccagaagtatggccggcccgacaagctgtacctcaagtaccggtggcgcccggcgtcctgcgagctcccgaggttcaacgggcaggacttgctgaggcggtggaaggggaagaagatactgttcgtgggggactccatcagcctgaaccagtgggagtcgcttgcgtgcatgctgcgc

SEQ ID NO: 20854 - DNA, 929 bp, Zea mays; identical to SEQ ID NO: 20816
  Clone ID: LIB3245-384-D9_FLI

SEQ ID NO: 20855 - DNA, 1829 bp, Zea mays; identical to SEQ ID NO: 7030
  Clone ID: LIB3245-385-C4_FLI

SEQ ID NO: 20856 - DNA, 1069 bp, Zea mays
  Clone ID: LIB3245-386-F3_FLI
caccacagtcctctctttccccggcaccaccaccacccaggctaaccggactggaccgagtgttgaacaacactgagggcgaggcagatagagcgacggcaggcatggtgagccgtgaaaatttgcacctggtgctggacccggcgtctctgggcgcgccgtgggccgacccgtccgccgcagagatcccgccgcagctcctcgccgcgctgggagagtacctctcctccacccgcgccgagggcggcgacgtcgcgacggaggcggacgacgagttcatgatgcacgagttcaaggtgcggcggtgcgcgcgcgcgcggagccacgactggacggcgtgcccctacgcgcacccgggggaggccgcgcggcggcgggacccgcgccgcgtggcctacgcgggggagccgtgcccggacttccggcgccgcccgggcgcgggcgccgcgtgcccgcgcggggccgcctgcccgctcgcgcacggcaccttcgagctgtggctccacccgtcccgctaccgcacgcgcccctgccgcgcgggcgctgcctgccgccgccgcgtctgcttcttcgcgcacgccgcggccgagctccgcgccggcgccggcgccggcgccggcgccgccaaggacggctgctcgccgctcgcgctgtcgctctcgcccaagtcgacgctggcgccgccctgggagtcgccgccggtgtcgccggtggagggccggaggtgggtcgacgagccggcggacgccgaggtggaggagctgttgctcgcgatgcgggagctcggattcaggaaggccaaggcgtcgtcgtcggcgccggtcctgcctgcggctgcggtcacggaggacgacgggccggacttgggatgggtgtcggagctggtgatgtaggcgtccaagatgtggtggatgccgatctgcgatctccttcgctcgctgctgccggcgtcgtcaacggaacagcttcgttaagcaatattgatcgtaccattttctttcatgaatttgcatcattcttcttgtggatataaaccaaacctggtgcaactattaatactgcaatctgt

SEQ ID NO: 20857 - DNA, 429 bp, Zea mays
  Clone ID: LIB3245-391-C11_FLI
gcgcagaaccggcagagcatgctggaggacacggggttctcgttcgtcaactgccgggtgacggggtccggcgcgctctacctgggccgcgcctggggcaccttctcccgcgtcgtcttcgcctacacccacatggacgacatcatcgtccccaacgggtggttcaactggggcgaccccaaccgcgagctgacggtgttctacgggcagtacaagtgcacgggcccgggcgcgacctatgccggccgggtggcgtggtcgcacgagctcaccgacgacgaggccaagcccttcatctcgctcagcttcatcgatggcaccgagtgggtcaggctgtagctgtaaatctcgcagccgctcacgccaccacgccgcacactgtaaagaaacagagcaagacagtatatacagattttatactttccgttc

SEQ ID NO: 20858 - DNA, 1232 bp, Zea mays
  Clone ID: LIB3245-391-D10_FLI
ctgttcacaaattatatgcaatcgcaagcgagcagaatggcgaggtccagtggtagtagaccagtggccctcgtgctgctggcgctgtgcgccgccgccctctcgtcggccacggtgaccgtgaatgagcccatcgccaatggcctctcctggagcttctacgacgtttcctgcccgtcggtggagggcatcgtgcgctggcacgtcgccgaggccctccgccgcgacatcggcatcgccgcggggctcatccgcatcttcttccacgactgcttcccgcagggctgcgacgcgtccgtcctcctgtctggttccaacagcgagcagatcgaggtacccaaccagacgctgcgtcccgaggcgctcaagctcatcgacgacatccgcgccgccgtccacgccgtctgcgggcccacggtgtcctgcgccgacatcaccacgctcgccaccagggacgccgtcgtcgcgtccggcggccccttcttcgaggttcctctcgggcggcgcgacggtctggcgccggcgtcaagcgacctggtgggcaccctgccggcgcccttcttcgacgtgccgacgctgatcgagtcgttcaagaaccggagcctggacaaggcggacctggtggcgctgtccggcgcgcacacggtgggccgcggccactgcgtctccttcagcgaccggctgccgcccaacgcggacgacggcaccatggacccggcgttccggcagaggctgacggctaagtgcgccagcgaccccagcgggaacgtggtgacccaggtgctggacgtgcgcacgcccaacgccttcgacaacaagtactacttcgacctcatcgccaagcagggctcttcaagtcggaccagggcctcatcaaccacccggacaccaagcgcgcggccacccgcttcgcgctcaaccaggccgccttcttcgaccagttcgccaggtccatggtgaagatgagccagatggacatcctcaccggcagcgcgggagagatccgccgcaactgctccgtgcgcaacaccgccctcggagatgtctcatcgtcagcccaccagctcgagaccaccgccggcgacgaggggctcgcggccgacgcgtgaaatgatgattagctgctgttgttttttctctggtctccttcgattctgttgaaataaggcttgctgcatcatcggtatagtttgcattcttctacccatcaatatggtatatcttcctgtgtc

SEQ ID NO: 20859 - DNA, 839 bp, Zea mays
  Clone ID: LIB3245-393-C11_FLI
gctttgtcagatttgagggcacgtagtgtcagatttgagggcacgtagcaggataattcaggggctcttatgcaaagtttgagccaacccatctcgccctgctatataataagattggtccctagggttttcgccgccgcaccccacgacttccgtccgagtctgagctcatctccacgcgccgccgccgccgctcgacgcccaccgcgcagccatggcggaacagactgagaaggctttcctcaagcagcctaaggtgttcctcagctcaaagaaatctggcaagggtaagaagccaggcaagggtggcaatcgattttggaagagcattggccttggtttcaagactcccagggaagcaattgaagggacctacattgacaagaaatgtccattcactggaaccgtttctatcagaggcagaattattgctggaacatgccacagtgctaagatgaacagaaccatcattgttcgcaggaactatctccactttgttaagaaataccagaggtatgaaaagaggcactccaacattccagctcacatctccccatgcttccgtgtgaaggaaggcgaccatgtcatcattggccagtgcaggcccctatcaaaaactgtgaggttcaatgtcgtcaaagtcattccagctggatctgctgctgccggcaagaaggctttcaccgcagcctgagtttaagactatgttccatgagtagtttatatagtgatgtctttttttgttaaaaaaactgccttctaggcttgtgcctttcgactatggtttggagattgttcccatcttaatgaagtccaatcatctgaacatgttactgttt

SEQ ID NO: 20860 - DNA, 2836 bp, Zea mays
  Clone ID: LIB3245-406-B3_FLI
cctgacgccattgatgcgagcgagcaggccgaggctagcacgggacaagcctcttctgctcgcaaattgggacgcaacatacggaagagcgagatgcctcctctgaatgaggaggatctagtgcctggcgcatcttttactgggaaggtgatgtctatcaagccattcggagttttcgttgacattggggcattcacagaaggccttgtccatatctccagagtaagtgatgggttcgtgaaagatatatcttccctcttcactgttggacaagaggtgtcagtgagattgcttgaagcaaataaggaaacaaagcgtatctctctaacgatgagggaaggcgatgactatgtcaagcctcaaaaagaaatgccgaaggctgcaaacggtgggcgaagtgccaccgcaactcctaaaagctcgccaaggcaaacaagggaaaggcaggaactcaaggagacacttgagtcaaaatatgtaccagggcaatctctgaatggcactgtgaaaagtacaacgagagcagggacatttgtgacgttgcctgatgggagtgaaggattccttcccagagaagaggaagcattagcattatttacccttatcggacaatctgcaatggaaattggtaaacagataagggttaaagtactgaatgtggcacagggtcaggccactttgacgatgaaaggggtggaagatgatgaagacgatctgaagacgctaaatatggagcttaagcgggactggtccagagggactaatgcgttcgagttggctttccgtaggaacaaagagatctctgcattcttggatcagagggaaaggaccaaagtgccagctgatacttcagtttctgctccggaagctgaaagctatcaggaggaagctgctccagaagatgaggaaagtagtgaagaattgagctctgtgtcagaagtagcaactgatgtttctcctcctgtatctgatgcctcctctcaggtgggaattcaggattctacttctgctgaggaccaaactgtaggatctgaaagttcacctacaattagtgttgaactgtcctccaacgggaccccagatagctctattgtgtcttcagtttcagaaactgcagataaacctactgaacctgaagaatcttcagcggtagaagaggttcttgtaactgcaagcagcgaggcggggaaagaaccagctgctgacactgaggctgtaccagccttgagtgagaaaactggtgccgaggttgctgctgctgctggagttgcacaagcaagcaccacgacagccactatttctcctacccttgtcaagcaattgcgtgaggcaactggagcaggcatgatggactgcaaaaaggctcttgctgaaacagggggtgacattgataaagctcaagaattcctacggaagaaagggttggcggctgctgacaagagggctggcagagcaacagctgagggaagagttggctcttacatacatgacagcagaatcggggtccttattgaagtgaattgtgagactgactttgtgtctcgaggtgacattttcaaagagttagttgacgatcttgccatgcaagttgctgcttgccctcaagtgcagtacatctctattgatgacgtccctgaggaggttgtgaagaaggagaccgagctggagatgcagagggaggaccttttgtcgaagcctgagcagatccgggctaagattgtcgaagggcgtgtaaagaagaggcttggagaattcgcgttgttcgaacagccattcatcaagaatgacaaggtcacaataagtgagtggctgaagcaaactatagctacaactggagagaatatgaaggtcaggagatttgcccggtacaacctaggtgaagggctggagaagaaaagccaggattttgctgctgaagttgcagcccagacagcagcgaagccgccaccatctgctcctcccaaggaggacaagcctgctgaaacaacagaatccgccgagaagaagccggctgttgcagtttcagcctcgttggtgaagcaactccgagacgaaaccggcgctggcatgatggactgcaagaaagctctggccgagtcagacggcgaccttcagaaggctcaggagttcctgaggaagaagggcctctcgtccgcagacaagaaatcctctcggctagccgccgaaggactgatcggctcctacatccacgacagccgcatcgggtgcatgatcgaggtcaactccgagaccgacttcgtggcccgcaacgacaagttcagggagctggtgaacgacctcgcgatgcaggtggtagcgtgtccgcaggtcgactacgtctcggtggacgacatcccggagagcgtcgtcggcaaggagaaggagatcgagatgcagagggaggacctgcagtcgaagcccgagagcatcagggagaagatcgtggaagggcggatcgcgaagaggctcggcgtgatggccctcctggagcagccctacatcaaggacgacagcaagacggtgaaggatctcgtgaaggagacggtcgcctcactcggggagaacattaaggtgcggaggtttgtccggtacaccctgggcgaggactgatcggctgtgaggccggacggcgatccctccgtcgcagcgcagcgcagccctggcatgagaagtcgggcacgtttttggcatgagaaggtctgtgactcggttccatctgtaattccgtatcacctgttactgctgttcgtggttcagaagagtaagaggggttggttagtatgtccatcaaagcatatatatacaacattaaggcaaattgaattttgtatctttt

SEQ ID NO: 20861 - DNA, 962 bp, Zea mays
  Clone ID: LIB3245-407-A5_FLI
gcagcagccatggagatgctgagcatgctgaaggtggggtacaccatcctgcgcagcgagacgcccgcgacagacctcgtcaacaccttcatggactgggcggcgcgcaggtcccttatgctcctggccatcttcctcccgccgtactacatctacaagctcaccacgtctgcgttcgctgctgccgtgccagaggacgtcgcagggaaggttgtgctcatcaccggcgccgcctccggcatcggccagcaaatagcttaccagtacgcaaagaaggtagcgagactggcgctagtggcgaggatggtgggaagcctgcatgatgtcgcggcgagagccagggatggcggctcgccagacgttctggttgttgccggggacgttgcgaaaccagaggattgccggaggtttgtgcaggccacagttgaacatttcggccgattggatcatcttgtgaacaacgctggtgtagcaaatgtctgctggtttgaggacgtaccggatgttgctgctttgaagcgagtcctggccgtgaacttctggggcgcagttcatgcgacccactgcgctcttccccatctgaagaagagcggcggtgggaaggtcttcgtcaactcctcggctgcggcggcgctggcaatgccaggaatgagcctctacaatgccagcgaggctgctgttctcaacttcttcgagaccctgcgggtcgagctccgcgacgaggtcggcatcaccatcgcgacttccgggtggatcgtgtcggagatgaccggagggaagcagctgtccaaggaagggacggtggaggtcgccgtgcggtgcgccgaggccaccgtggacgccatctgccgcggccggcgccacctcaccgtcccgctgtggtaccgggcgctgttcctgtggcgggcgctcgcgcccgaggtggtggagttcagccagagactgttgtgccgacggaccgc

SEQ ID NO: 20862 - DNA, 1375 bp, Zea mays
  Clone ID: LIB3245-407-F6_FLI
gaccgtggaagcaaagaggcgcaagcgagcacggaacaaatacaccttcaggtggcctccctccgactgccgactgaatcttccacctcgcttcgcgcctccggctccgcgccgggcccgcataatctgtgctcgggatcgcctcttcccgcggcaaatgggggccgactccgaggacgccgtcaagcagctcagcctcctcatggagcaagtggaggccccgctgaagagatcgtttcagaatatgcaccagggctatcctaaagaaacactggtgcgtttccttaaggctagagagtggaatgtagcaaaggctcataaaatgattgtagaatgtttgaattggaggattcaaaatgaaattgatagtgtgctagagaggcctatagtcccagtagatttatacaggtcaatacgtgattcacaacttattggcctgtcaggatacacaaaggagggtctcccaatttttggcattggtgttggacatagcacatatgacaaagcttcggtccactactatgtgcaatctcatatccagattaacgagtaccgtgatcgtataattttgcctaggctgacacaacagtttgggcggcctgttaccagctgtataaaagtgctggatatgactggtttgaagctatcagcactaagccaaataaagatgttgacttccatatcgacagttgatgatctaaattaccctgaaaagacagagacctattatgtagtcaacgttccatacatattttctgcttgttggaaggttgtgaagcccttattgcaggagaggacaaaaaagaaggtcaaagttttgactggctgcgggagagatgaacttctgaagatcatggactactcatcactcccccatttctgccgccgggaggcctccggatcatcgaagcattcgtctaccgacgtcgacaactgcttctcccttgaccatccattccacaaagaactgtacggtcacatcagagagcaagcgtcgcgcagggagctcatcaagatgggatcgttgcatgtcagcatccccgagccggacccagacgacgcgaagatcgtcgaggtcatccaggccgagttccaaaagattggcgagcaggacgagtccaccaacagccacaaagattgacatcatgaccctctgatgttcatttctgtatttcggttaacagtccccccggttgcctggggatttatagcagcaaaagccttgcagtcgcatggtgcaagtgcaagcttgagttcatgtagctggagaggctgagagataaaccagccagtgtatattagatgcacaagaagcgataatcacctttttgttagtatataaccaacacatatatgatatatttagctgtttatt

SEQ ID NO: 20863 - DNA, 942 bp, Zea mays
  Clone ID: LIB3245-408-B3_FLI
gttcaacggtgcacccttggctccccctcccctaacactgtagccgatttaggggctacagtgtgcccctatccccttcaccggcttcctcctcctcctcctctcgcctcccgattccttctctctcccgctaaatggatgggcacgctacgccggatttctcccccgcagccggttccttcgtccacacgaccgcgcgctcggaaaactccgcggagggcgaaggaggcgaaccaagggcgacgtatccgccgccggagaaggtagccctcgatccgccgtctcccgcgattcgtttgtcttgcgacagctgggcgaccgtcgtcgccgccgcccttctccaggtgcccaggtcttcgccggtccctttgccgcctccttgccgccgacgagcaccagccaggaagaaaagaagctgaaccatggggaagagaaagtcagctgctaagccacctcctaagaagcggatggacaagcttgacactgtcttttcctgcccattctgcaaccacgggagtagtgttgagtgccgaattgacatgaagaatctgattggcgaagcatcttgtagaatctgtcaggaaaacttcagcacaactgttaatgcactcactgagcctattgatatatatagtgaatggattgatgagtgtgagcgtgtcaacactgttgaaggcgacgatgatgcgtgagcttgccccatgcgatgaaactgttacctacaatcgtaatgtaatgtgctggtattctcgaatgccatagcccatagtcagccatggcttggaataacgtagtggctgactgatatgccagtaggcacctgtctagtacttacagaactacaaaaagtttgtactatacatatatggacaaccttataagtggctatgtgtgtacctatcctaacgcttatcccagatggtgtatcagcgtttttctgtg

SEQ ID NO: 20864 - DNA, 2163 bp, Zea mays
  Clone ID: LIB3245-414-D2_FLI
gtaaatgcctctccgtgtttctcgcgcgaaacttgtttacgagttaaggcagtatgcgcatcaagctttgttaaatcaggaaaaggtcgagttagcttggtgttgattttgttttaatcttgtcgcatcagttttgttacaattgttgcttagtcatggtaacgactcatcaagtgcttgttcttgtgtggtttattagtttatttgtatggttatggttgattgatatgatattttagctggctgaattaggagtctgccgtgcagcagtattcttgccgccttggcgatactggtatcaacaacgaaagaagagtagttttacctcaaacagaatttctacaagggagtatctttgagatttttagcactgtagtttatgattttagtagattctggatactgcaaagcttcagatcagcaatgaagatattccttagcaagagttcaaatatgaagttgaatgtctcactgtggtctagtatctgccatttgtgtgaaaattatcaaagaacatcatgcatttcctgatagtttgtcccttgattttttccagaggagacctctgaactttctgacctcaagtcctcgattttgtcatagatcagacaaataatggaagagttacaagattgcaactcaagaagcctggttgcccttccgggctctttggttctgcgtctctttaggctgtttggccagcaggatcagagttcatggcagaagtacatactagcttactttctgttggtcaggaatgagtacttctctggggagtcgaagaaacactcagatgtgttctgtgatatttcagaattagatttctttctatatgctacagatttggatagtgaagaacttgaactgaaggagcagaaacccattacgaaggctcaatcaggaggtgattcaagtggcaacagatcgaatgattgctacttccccggccttcatgatgatctgtctcaagactgccttgcttgggcaagcagatcagactacccttccctttcttgtctgaacaaaagattcaatttgttaattaacagtggatatttgtacagactgcgaaggaaatatgacattgttgagcactgggtctatcttgcttgtagcttgatgccctgggaagcatttgatccttcacgaaagcgctggatgaggctaccgagaatgccatgcgacgagtgcttctcctgtgcagacaaggaatcacttgccgtcggaacacagctgcttgtcttcggccgtgaatatactggccttgctatttggatgtacaacttactgactcgcagttggtccccatgcactccaatgaatctgccccgctgcctttttgcctcgggaagctcaggtgagattgctattgttgctggtggatgtgataagaatggacaggtgctgaggtctgctgaattgtacaattcagagattgggcactgggagactatcccagacatgaacctgcccaggcggctctcttcaggtttcttcatggatggcaagttttatgtcattgggggcgtgtccagtcagagggattcattaacttgtggagaggaatataaccttgaaacaaggacctggagaagaatacttgatatgtaccctggtggaaccagtgcatctcaatcgcctcctcttgttgctgttgtgaataaccagctctacgccgctgaccagtcgacaaatgtggtcaagaagtatgacaaggcaaacaatgcctggaacatactgaagccattgcctgttagagctgactcatccaatggttggggtctagctttcaaagcttgtggcgatcgattgctggtaatcgggggccatagaggacctcgtggcgaggtaatattgctgcattcctggtgccctgaaggtggggaagatggtgctgactgggaggttctctcggtgaaggaacgtgcaggcgtcttcgtttacaactgtgcaataatggggtgctgagttacctttgcttcagtacatgccactggtttagcaagccaaccatttcttgctgccatttagctgccctttataatgacttgtaattcagaaatgacaccccctcccctcatttcgcggagctctcaattgattgaatgttttgtagagagcaaagagcattcagttcagtttacctggaactacttttttttc

SEQ ID NO: 20865 - DNA, 1513 bp, Zea mays; identical to SEQ ID NO: 5891
  Clone ID: LIB3245-414-G2_FLI

SEQ ID NO: 20866 - DNA, 1275 bp, Zea mays; identical to SEQ ID NO: 5841
  Clone ID: LIB3245-415-F2_FLI

SEQ ID NO: 20867 - DNA, 1371 bp, Zea mays
  Clone ID: LIB3245-415-H5_FLI
cggcccctcttctctccctccctccctccgtccccgcattaaactcggcgaacgggccaagaaaagcaaaccgagggaggagaaaggcaaggaaagtgggaaggtaggagagagagggagacagggaaagctctcttcctcctcctcctcctctcgaattccgtctcttgtccctgtcgtcctcgcccggtttccccggtttttgagaggggaaagaggaggcggaggagagggatggggagggacgagaggttcccggtgtgggaggccgcgctcggcgccggagtcgccgccgccttcgccgctggactcgtcggtgtctacctttccatgccggactccgactacagcttcctcaagttgccacgtaatctcgaggaactccaaatcctcactggccatcttgagaactatactagtgactacaccctacaggtgttggtaggttattgcgctgtgtacatcttcatgcagaccttcatgatcccagggacaatattcatgtcactgcttgctggtgctctatttgggcaactgcgtggccttgcactggtggtctttgctgccactgcaggtgcttcttcgtgctatttcctgtcaaagatgattgggaagccactggtgttcacactgtggccagataagctcagcttcttccagagacaggttgctaaaagaagagagaagttgttgaattacatgcttttcctcagggtgaccccaacattgccaaataccttcatcaacttagcttcacccatagtagatgtcccctaccatatattcttactgggaactctcattggtcttatcccagctgcttatgtcactgtcagggctggaattgctcttggagagttaacttcgctgagtgacctttacgacacccagtcgatagcactgctattcctgatcggtgttgtttcagtcacaccagcattgctgggcaaggatgaggcacaagagaaaccaccagaaatggcggtaggcgcgtcatgatcaccaaagcacctagcggtgtccacgtcacctgtatatatgtcaacatccagcatgcagtggcttcattagttcggatcaacgggcccttgtggctggatgataaaaacggttcgcatggccacacagcttggcgggacctcggcctaaactccctccactgctggcctagagaggcgcctgtgttgccatcatcagaacatgattcggtagccattcaccacattattaatgaatgaacctgggaagcagaattgcctgtagacgagctgctctgatgtgtaaacgagtagcgctgttcggataggacaggcatttagtccaatccctgtatatattaaccagattcattcaatccatattcagtggttc

SEQ ID NO: 20868 - DNA, 950 bp, Zea mays
  Clone ID: LIB3245-421-H1_FLI
gcgtcatcgtctcgctcgttcctttcgtctctgagcatggaaggaagtcttgcgagcttggatggaagccgggccagcaggccgttccagctagttagtggctctcagacatctagcacaccggagctgggcctggtgcaaaggagaaggtgcgctgggaaggaggatgggagtggtcagtgcgcaaccgggagccggtgccattgttcaaagaaaaggaagctaaggataaggaggtccatcaaagtccctgcagtaagcaacaaggttgcagacatcccagctgatgagttctcgtggaggaagtatgggcagaagccaatcaagggatccccacatcctaggggctactacaagtgtagcagcgtgagaggctgccccgcgaggaagcacgtcgagaggtgcgtggacgacccctcgatgctgatcgttacctacgagggtgaccacaaccacagccgagttctagcccagccagcctgatctctctggctatcgattattcaagatcgcttccgtagtagtcaccctccctctctagagaagggaggacagcaacagcaacaagaagagcctagtgtctgtacataagttctgcttctaacagttggaggagtgattcggttagctagctctttcagaagaatcggtggtgacagaagggaacttatcgatggatgggagaaagggagagagagagagagttcctcatcagatactcatactctatttttgtagcttcggtttatctctcttttttgttcatcctgtgctagggcccatcctgtgggtgcagtgtaacattgagctgcaattgtatgtctgggaatggtgttgggggggattggatcggagaagaaggcatgtggcaggaaattgcctgtaaaagtggctacacctaggaacagaatgtactatcgtcttcagcagtggtacagtcttgttgacgc

SEQ ID NO: 20869 - DNA, 1283 bp, Zea mays
  Clone ID: LIB3245-423-B4_FLI
ccacctccctcatacaacgccgcgcgtgccctagtggtagcaccagctgcgggcctgtggcaacagtgatggccaatgccactgtccccgagttgcagccgcaggtgcaagcggcgggtggccgcaaggtggtggacgaggtgtccggctggctgcgcgttctggacgacggcagcgtcgaccgcacgtggaccggcccacccgaggtcctcccgatgatgcagcccgtggcgccgtacgacgtgccccgcgacgggcacacgctgcacgacctcccaggggagcccaatttccggatctacctccccgaggtcgacgacggccgcaagggcgggcgcctgcccgtcatcgtgcacttccacggcggcggcttctgcttctcccacccgtcctggctcatgtaccaccagttctactcgcgtctcgcgtgcgccgtccctgccgtggtcgtctctgtcgagctcccgctcgcgcccgagcgacgcctgccagcgcacatcgacacggccgtcgccgcggtccgccggctccgctgcatcgcgctgtcggaggacggagctcttggtgacaaggcagctaagctcctccgtgaggccgccgacgtctcccgggtgttcctcgtcggcgacagctctggcgcgaacgtcagccacttcaccgccgcgcgtgtgggccaggacggcgctggcgtctgggcgcccctgcgcgtcgccgggtgcgttctgatccaaccgggattcgtgcgcgcaacaaggagccggtcggagctggaggtgggagagtcggtgttcttcacgctggacatgctggacaagtgccaggccatggcgctgcctgttggcgccaccaaggagcacccgttctcgtgccccatgggtccgcaggcgccgcccctggagtccgtgccgctcccgccgatgctggtggccgtcggcgagaaggacctcgtccgcgacacaaacctcgagtactgtgacgccctgcgcgccgccggtaaggaggtggaggtgttggtcagccgcggcatgagccatgcgttctacctcaacaagttcgccgttgacatggaccccagcacaggagagcgggcgcaggagctgattgacgccatcgtgagcttcatcgcttcccactgaaggctgaagtgctagaatgtaatttgcctgtgatatgcctatgcgtgtctgtccaccaaggaggagaacccgttcacgtctcgcctgcacatgtaacttgcgtttgcccctagtacccatataaatataacttcctccgttcacctc

SEQ ID NO: 20870 - DNA, 391 bp, Zea mays
  Clone ID: LIB3245-425-C4_FLI
atcaagctgggctctgacaaggacttgaaaaagaaagaaagtgctgaaagagaagaacggggcaagaagtccctgagcatcaacgagttcttgaagccagctgaaggcgagaggtactataaccctagtggccgtggccgtggtaggggccgtggggggttccgtggtggttacaacggcggttatcggggaccagctgctgctccagcgatcgaagaccaggctcagttccctgccctggcctaagcacagctcgtgttctcgctcaagattgtgtcacttttgcggagtgcgtcagtcagtcctagtgttgttgctcccaagcttgctttccggattatgtgtatccaacattttctgatgttatgtactggtgtgctcgtgaaaaaag

SEQ ID NO: 20871 - DNA, 1576 bp, Zea mays
  Clone ID: LIB3245-425-H10_FLI
ggcgaagctgcaccggaaggagaaggagagaagcgagagtctccccagccagagcaagccgaatccgaagctagcggagaggagagagggctgagtgaggatgccgacggttacctgcaacgcgtgcaacgcggggttcgacgacgaggagcagcagcggcttcactaccgctctgaatggcaccgttacaacctcaagcgcaaggtggctggagttcctggtgtcacagaggctctgtttctggctaggcaagctgctttggcggaggggagcaagcctgctagcaccccaatgctttacagctgtgctctttgtggaaaggagtacagaagctcgaaagctcacgagcagcatcttaactcgcgatcacatcttttgaaagcctctcaggagcccaatgcctctattgctggtatcacgatagtcaagccacttcctgaacgagtctcacgaagagctccatctgcagtagaggaggatcaagacgacgatgaggaagaagagtgggttgaagttgacccaagtgagatggagttggctgatgagtctacttcaaacatgcaagaagatgagcactcctcaaaatcagatgatgacatggatgaccttgaagagttggatatctcgtcgtgtttcatgtgtgacctcaagcatgacaccatagaagactgcatggtccatatgcataagaagcatgggtttttcatacctgacagtgaatacttgaaggatcccagtggtcttcttacttatgttggactgaaggtgaagcgtgattttatctgcctctactgcaatgacagatgccagtccttcttcagtctagaggctgtcaggaagcacatggatgcaaaggggcattgcaagttgcggtatggagatggtggagatgatgaagatgctgacctcgaggaattctatgattacagcagcagttatgttgattcagaaggcaagcagttgattgctgttgatgacttgaacaacaacattgagctgggaatcggtgggtctgagctagtaataacaaacaagagcgagaaaggcactcgggtcagaacccttggctctagggaatttatgcgctactatcgccagaaaccacggccttctgttgcaccagaccgtgcgcttgcactttcactagcttccagctacaagagcatgggtttggtgacagtgcagtctaaggagcagatggtgaggctgaaagttctccgtgctatgaacaggaccggggtcgagactatgcggaacaagatcggaatgaagagcaatgtgatccggaacctccctaagaattgcccgcactagacaacactgccttctcctgcaccctatctggagcttctcctggcatttatatggtgtcttatggtttcttgtctgtcgctgacaacgttggcgcttaagatatttggaataggactacaccttccatagtttttgttgaactctgtggtgcggaagcagctgttgccattatggcggaaattgctgacgcctcattgaacatgtttagtttttattttgttaaaaaattgggcaaaaaagtttgatgctcatattcatcac

SEQ ID NO: 20872 - DNA, 950 bp, Zea mays
  Clone ID: LIB3245-426-C11_FLI
gttatttctcttcctcctccaaaccaccgatgtcgctaccggttctatccctgcgctgccattgctcgtccgcatcctccttggatttccctcccaggaaggttagggttttctgatgcgctcatacatggggcagcaagaagatgggatgtctgatggcttgtacacttacaagcatcaccgcgagcgaggagctgatatccacaccatctttgtgaagaagagcaaattcaggattctgctgtcatttatcggcacaacgttccttcttgtgtctgtttgctgcgccctgttatcgaaggatggtttatgtctttgttccctttggagcatttcatttgccagtgtaattgcgaaatgcctgcgatgtgaccctgtgaagaaagagtcattggtgatcatgccgacttttggaattcaattagagcaacacttttggagtggaagagttcatcgcaaatttgtgcccattggcaagattctaagaccagtgctgaatgagcatgtgacccctgtctcatgctactggagcttggccttgcttgtacgcgaagaatatgagctcatgcttgttttcaagagcttgaatccaccagtcaagatgttggttccaatctggaaagcgttatgtgcattcgtagactccaattctctgggcaattctgcattgcctcaacccacatgaacatgcttaaacaagttggtgggtggctgtgtgcagccccgatgataattcgaacatatggttcgctgaagactttgctgactgacaacataatgttgagtttcgatacaaatgatgatggaaggtacggaatgttaccgacactggggctcttacgtcgggtgtgaattgtgaaaggatcgtgatgcttaagagtgcactctgatcgctacccgatgccgatcacaaagagtaataaacacaaactctcgcttactctaagctc

SEQ ID NO: 20873 - DNA, 655 bp, Zea mays
  Clone ID: LIB3245-430-H3_FLI
tgcaaagagtctaagccaaccggcggaaaggatggaagcaaactggacgttaatacgaaacaacaacccaatgttagaccttcgggcggtgattacgattacttgttcaagctccttttgattggagacagtggagtgggcaaatcttccctcttgcttcgctttgcggacaacacttttactgaatcctttatcagtaccattggtgttgattttaagatccgtactatcaacattggcggtgcgaacgtgaagcttcaaatttgggatacagccggtcaagaacgcttccgtactattacctcttcttactatcgtggtgcccatggtattatcattgtttatgacgtgaccaactctgattctttcaccaacgttcaaaaatgggtacaagaaatcgaacgctatgctaccgactctgtgcaaaagctacttgtgggcaacaaatccgatttagtctccgagagaaaggttgatgcagcagaagccagagacttcgcacagcagttgggcttggaatttttggaagcatctgccaagaattccaccggtgtagaagaggcttttgtgaagctagccaatgctatcaagaggaaggaggatgactagtgctctttctgacttgtggtggtcacaataaaaccctttatatatt

SEQ ID NO: 20874 - DNA, 925 bp, Zea mays
  Clone ID: LIB3245-431-E4_FLI
gaaccatgggaaagttaagattggagacttcggtttggcaatggtaatgcagcagaggaaaacacagagtatacaaggcaccttagagttcatggcaccagagctgtttggtgaaaactacaacgagttggtggatatatactctttcggcatgtgcatgcttgagatggtgactggtgagtgcccttacagtgaatgtcagggctttgttcagatatacaagaagatatctgaaggtgtaaaaccagttgctctctccaaggtcaaagatgcagaagtaaggagtttcatagagagctgcctagcttcagctgctgatagattgccagcaagtgagctcttgaagagcccttttctcatgaaagatgacatcatcatcaatgataaaacctctaatcctgtgcaagaacctatagcattcccgccaaatttggatctggatcttgaagccacaccaatttttgtatctttgctaccaaatggaaccgttgataatgggaagggatctttcagcctagtgcttcgaaggggtggattcgtactagaaggagatatgagtggtagcaaccctgttaatttattactaaggattcctgtccccaatgataaatgtaagaacattgagttcgcgtttgacctggagaatgatacaagtctcttggtggctacagagatggtgcaagagcttgaactaccttcttggagcatgcctattgtggcaaagctggtagatgcgttcctgctcaaaactgttcgtggttggaggccgtgtgttcaggtcggtcagatgattcaggcagtgcaaaacactgcatccgtgaatggaaaaagcatctgaatcaatgtttgtagctgatgcattattctgcaccttatgtaaatatatcatgctcgaatgcaacgccaggccttgctgactaagcac

SEQ ID NO: 20875 - DNA, 1628 bp, Zea mays
  Clone ID: LIB3245-432-C10_FLI
ggctttgcgcatgcatcctgttgttaggggtgcggtgacaatgctgtctgcttatggagatttcaatgctttcccaaggagactccgggagggatgccagagaactggagtcaaacttgttgatgttcctaatggacggaaagatgctgctgataaggctatactggttgatatgttcctttttgcacttgacaatcacccaccatcatccattatgctcatatctggtgatgtggacttcgctccggcattgcatatacttggccagcgtggatacaccattgtcattgctattccgtcttcagttaccgtctcatcagctctgagcagtgctgggagtttcgtgtgggactggcctagccttgcccgtggtgaaggtgttgtgatccctaggtccttggtgcgccgtctggctgattatccatgttatgtcaacagtgggaatatgggacagttccctgataatcagaatgaagaggaggccattgtatataccggaacatcaaggaatgaatatggtggcagacctcccgtcaatcaaatgtattgttataacacttcccagacaactagagaaccaagcaaagctttgtatactgttgaagatgtgaactgtggtacatcatcaaggcctcataatttatcatgtcgtcagagtgaaagtcctgagacagaccaaggtttgacagatgagcagtcatggtgggttcgtcctggtgatcttcaaggattgaagggtcaactaatacgtctgtttgaattatctggaggatgtgtcccacttgttcgtattccctcagagtatctaaaactctttggcagacatttatatgtatcagaatatggagctgttaagcttgttcatcttttcgagaagctggccgactcttttgttgtcgttggtaagggtcataaaaagatgatctgtctctgcaattctggtgataggaacctgaagaattatccaagtacgccaatcattctgacgaagaaaaacagaggaaattctgctcttgaagaaagcacgataggagcatgtcagcaattaggcagctcatcagatgaattatcagaggatgaaccaattatcaacccagatataaatgttgcatgtgtgttcaatgagcatctagacagcttcagaagggagattcaggagctccttgtttgctactcctgccctgttccgcttggtaattttgagagtttatatgagcaacggtataagaagatcattgactatgagagcttaggagtcaccggtctggaggagctagttgagaaggtgaaagacgtggtagatttgcacgaggaccaaaccagcaaaagcaagttccttattgcaaactacacaaccggttaggctctttctgttgtcttgatgtcctagttcagctcctaaagtacttcagctcgtgtttccttaacatgtgtcacacagggtcggcatctttttttaccgtgccggtatgataagtgtgaatggcatagtaagtatttgtaatggcttccctcatgcctcagctaatctgtgcaaacagggagttgtttcttgtatgcaaaaagatgattatactaaagaacagtgaccatttatttggcaaatacatctaattccagttcaagtc

SEQ ID NO: 20876 - DNA, 846 bp, Zea mays
  Clone ID: LIB3245-432-E12_FLI
ctggcccgtcgccgccgacgagaacaacaagcccgtgccgttcgacatggaaggcgtctggcacgccatggaggagtgccaccgcatcggccttgctaggtccgtcggcgtcagcaacttctctgcggccaagatgtcccggctgctcgccttcgccgccgtaccgccggctgtgaaccaggtggaggtgaacgtcggctggcgtcaagagaaggtcagggaggcctgcgccaagaacggcgtcgtcgtcaccgccttctcgccgctgggcgcgatcggcacggcgtggggatccaacgccgtcatggaaagcggcgcgctggaggacatcgccgccaggagaggcaagaccattgctcaggtagcgttgaggtggcttcacgagcaaggggtgtgctttgtggcgaggagctttaacaaggagaggttgaagcaaaacatggagcttttcgattgggagttgagcgtcgatgacaaggagaagatcatggggattccacagaggagagcatgccgtgcagagttctttttgtcaccagacgggccgtacaagaccttggaggagctatgggacggggagatatgagataccatgtagctgttgtatctattgtttgtcgacatcgttgttgcttgctgctgtggggaaatatcttcggaatactctctgaatgaatgtggactaacagttggtcctggacaattgccttgcatgtcagtatacattttgttgcattctagctaggttgggtgtggtagtactgctagtgattaagattattagggcttttcttagatcatgtacaacctttagtttgccaaataataacttgattttgtgtcatt

SEQ ID NO: 20877 - DNA, 842 bp, Zea mays; identical to SEQ ID NO: 6089
  Clone ID: LIB3245-434-A9_FLI

SEQ ID NO: 20878 - DNA, 452 bp, Zea mays
  Clone ID: LIB3245-437-E1_FLI
gttgactacctgctgacagggcaaagggtggaccacttcagcttctcgtctctcgctctgttgttcctcgcgctgtcgtgcttcatcgcgatcggggtcaacctgagccagttcatctgcatcggccgcttctccgccgtgtccttccaggtcctgggccacatgaagaccgtgctcgtcctctccctcggcttcctcttcttcggcaaggaaggcctcagcctccaggtcgtcgtcgggatggccctcgccgtcctcgggatggtgtggtacgggaacgcgtccgctaaaccgggcggcaaggagcgccgcggcaaagacctgccggtgagcctcaaacaagacaaggacgacactgacaaataatcatttgttatagttacaggtatacgtgtaatcgtttaatcacatggtgcaattgtttgccaaatcattgaacaatttcctgtggt

SEQ ID NO: 20879 - DNA, 1217 bp, Zea mays
  Clone ID: LIB3245-438-D6_FLI
gccctcccggtctcggatagacagcgacggagaggagagcggcgggcggagagaagtggaggaagaagacgaggatggccacctatttcacgctcaacaccggggctcgcatcccctcggtagggctcggcacctacaaggccggccccggcgtcgtcgccgacgcgatcaccgccgccgtcaaggccgggtaccggcacatcgactgcgcgccgctatacaagaacgagaaggagctctttgatgacggcgtcgtcaagcgagaagaccttttcatcacctcaaagatatggtgcagcgatctcgcacctgaagacgtgccgttggcgatcgacagcaccctgaatgatctgcagctggattatcttgacctgtacctgatacactggcccttccagataaagagaggcagcgagctcagtccagagaacttcgtccacctcgacatgcccaagacctggcaggcaatggagaggctgtacggctcaggcaaggctcgcgcggtaggcgtcagcaatttctcgaccaggaaactggccgatctgcttgccgtagcccgtgtccctccagccgttgatcaggtggagtgccacccgggctggcagcaggcgaggctcagagcgttctgccactccagcggagttcatttctctgcatacgcgccgctaggcaggatgaaagccgtcgccagtgacccggtggtcgcatccgtagccgagagcttggggaaaactccggcacaggttgctctgcgatggggtatccagcagggccagagcgtgcttcccaaaagcgccaatgagtcgaggttgaaggagaacattgacctgtttggttggtccattcctgatgagctgtgcgccaagttttctgaaattgaacaggttaagcagatcagaaatgacgcgtttgtgcacccccagagtatttacaaaacaatcgacgaactctgggatggtgagatctaaaatgaagatcattttcggtacgaaaccaatctgtaaccagggttgaaatttacgccaaaaaagtagggatatatgcttttgtcttccaagggggggaaaaggcacatgtttatcttaagcactactggcaacaggcatgtggtgtgggttgcattttcggcagggctgagtgacgtcagcatattgttgcattgcagcagatccaatgaaggggcccttgagtaaagcatagaacgaacaattttcatc

SEQ ID NO: 20880 - DNA, 714 bp, Zea mays
  Clone ID: LIB3245-439-D1_FLI
cgcataaccaatcttgccatcaatatgttcagtgtgatatctgtggtacgaaacagctaaagaagaatttccagcgccatcatcggatgcatgaaggttcctgcgtcactgagagggttaaatgccacatcgaggactgcaaatgttcgttctcgaagaaatccaatttggacaagcatgttaaggcggtacatgagcagcgtcgtccttttgtgtgccaattctctgggtgtggcaagaggttttcttacaagcacgtaagggacaatcatgagaagtcaagcgctcatgtgcacactgagggtgattttgtcgaggctgatgagcagcggccacgttcagtaggtgggtgcaagaggaaacccgtatctgttgagagtttgatgcgtaagagggtagccgctcctgacgatgggcctgctcatgctgatgcaactgaatatttgagatggcttctgtcggtttgattggacgttcaagtgcactttgtgtagttggaaacatcagcgatttacttggcatgtataggaagatgaatgtctctagtatgttatgtaaatgtttatgtacggtatcagaaatacagatcattggacctcaattataaaggcaatatgctgtattggcaagatcttgaatgtaagagcggttgctcatgatcattagatctatgtgtcttcagcacagcttggcaacatgttttggtatgttcgc

SEQ ID NO: 20881 - DNA, 1667 bp, Zea mays; identical to SEQ ID NO: 6370
  Clone ID: LIB3245-439-F2_FLI

SEQ ID NO: 20882 - DNA, 809 bp, Zea mays
  Clone ID: LIB3245-440-D9_FLI
ctccgggcgcaccgtcaccggggtgaggctgtattgcgtcgacagcaacacctgctttcgctacgacgggagcaccagaggctaggatatattgcttcatcagtgacagggagccaagatgccggccggagggttctcggtctcggcgccgtccggcgtcgagttcgaggctaagatcacgccgatcgtcatcatctcctgcatcatggctgccacaggcggtttgatgttcggctacgacgtcggcatctcaggtggtgtgacgtcgatggacgacttcctgggcaagttcttcccggcggtgctgcggaagaaactggaggacaaggagagtaactactgcaagtacgataaccagccgctgcagctgttcacgtcgtcgctgtacctcgcggggctgacggccaccttcttcgcctcgtacacgacgcggcgcctcggccggcgcctcaccatgctggtcgccggcgtcttcttcatcgtgggggtgatcttcaacggcgccgcccagaacctcgccatgctcatcgtcggcaggatcttgctcggctgcggcgtcggcttcgccaaccaggccgttcccctgttcctgtctgagatcgcgccgacgaggatccgcggcgggctcaacatcctgttccagctcaacgtcaccatcggcatcctgttcgccaacctcgtcaactacggcacgtccaagatccacccgtgggggtggaggctgtcgctgtcgctggccggcatcccggcggcgctgctcaccctgggcgcgctcttcgtgacggacacgcccaacagcctcatcgagc

SEQ ID NO: 20883 - DNA, 739 bp, Zea mays
  Clone ID: LIB3245-440-G8_FLI
caggacgtggactcgttcgagacggagctcgtggagaccctggccacgttcataacgctggacgcctcgtaccgctgcagcgaggccagtgagcgggagctggagctggatcccggggagcaggagcggcggctgaccgtgatcgcgagcaacccgctgcggcgccgcgccagctacgacctccaggacagcgtgcaacattcggcagcgtccaccgtggaggtgcgcgccacggccgccgacagcctgagccccagggacgcggagatcagctcggcggcggggccgaagcaggtgcggttcttcatcgacagccacgtggtgagcccggaggccgcggagaacaagcaggtggcggatgagctggaggcgctggcggcggcccgggaggccggcactgcgttcatcctggggcactcgcacgtgcagtgcaagcccgggtcgtcggtgctcaagcggttggcggtggacgtcgggtacaacttcctgcggcgcaactgccgcggcccggacgtcgcgctgcgcgtgccgccggcgtcgctgctggaggtcggcatggtgtacgtgctttgacgaggctgagacgatgcgactttcttttatgaacatctgatacagtaatcacgactgttttcagtcttcccagtaacataatgaggccgttctgtatagcttagccgtttttcagctgttcggactgttacagctgcaatatatagagtcaaaatactgtagaatt

SEQ ID NO: 20884 - DNA, 973 bp, Zea mays
  Clone ID: LIB3245-441-D8_FLI
ccactagctaagcgcgccatggcaaagttcgctcttggtcaccaccgcgaggcctccgacgccggctgcgtccgtgccgtcctcgccgagctcatcctcaccttcctcttcgtcttcgccggcgttggctccgccatggcaacagggaagctggccggcggcggcggggacacggtggtgggcctgacggcggtggcgctggcgcacacgctggtggtggccgtcatggtgtcagcggggctgcacgtctccggcggccacatcaacccggccgtgacgctgggcctcgccgccacgggccgcatcacgctgttccgctccgcgctctacgtggccgcccagctgctcggctccacgctcgcctgcctcctcctcgctttcctcgcagttgccgacagcggcgtgcccgtgcacgcgctgggcaccggcgtcggcgcgctccggggcgtgctcatggaggccgtgctcaccttctcgctgctcttcgcggtctacgccaccgtcgtcgacccgcgccgcgccgtcggcggcatgggcccgctgctggtgggcctggtcgtcggcgccaacgtgctcgccggcgggcccttctccggcgcgtccatgaaccccgcgcgctccttcggccccgcgctcgtggctggggtgtgggccgaccactgggtctactgggtcgggcctcttatcggtgggccgctcgctgggctggtctatgacggcctcttcatggcccagggcggacacgaaccgcttcccagggatgacaccgacttctaggcagtaggcgtgtgttctcctgaataatttgaattgtaaacccatgtattgaagcctctaatgtttcggtttcgattcagatggaatggaagcagcagtaccaaataaagtctcggtgaggtcgtaattcacttaaacatatgtttttaagacctgctttgaaagtaagttattaagagaaaaagaatcagaagct

SEQ ID NO: 20885 - DNA, 1392 bp, Zea mays
  Clone ID: LIB3245-443-A11_FLI
gccacctccccggaattcggcaggcagctcgtcctgctctactgcttccttccttctcctcctcctcctccaccactctcctctgtcaccggcttccccccatcctgcccctcgtgctccagctcctccgggtccgggccaaccacgcgatggcggcgtccgccgggacggtgtacgaggcggacgcggaggccgtcgtgcgccggatcacgccggcactcgaccgcgccagacacaagggccaggcagggaagatagcagtaatcggaggatgtcgtgagtacactggagctccttattttgccgctatctctgccttgaaagttggtgcagatctttcacatgtcttctgcacgaaagatgctgctacagtaattaagagctatagccctgaactaattgtacatccaatattagaagaatcttacagtgtaagggttgatgaacgagcatctgtttcttctaagattcttactgaagttgcaaagtggatggagcgctttgattgcattgttgttggtcccggccttggaagggacccctttcttctggaatgtgtgagtaatatcatgaggcacgcacgacaggctaatattccaactgttgtggatggggatggcctatttcttgtaaacaataaccttaatcttgttgaaggaaaccctcttgccattttaacaccaaatgtctatgagtacaagcgtcttgttcagaaggttcttaactgtgacgtagatgaggaaactgcttctgagcagctaatcgcactttgccaaaaaattggtgatgtaacaataatgcagaaaggaaaagctgatgtcatcagtgatggtaaaacagttacacaagtgagtacttttggttccccaagacggtgtggtggtcaaggtgacatcctttctggaagtgtggcagtatttgcatcatgggcacgacactttgtcttgacaaacgaagaacctacagagaaaagagttaatcctatgacccttgggtgcatagctgcctcccttctactccggaaagctgcgtcacatgcttttgagaagaacaagagatcgactgtcacctctgatatcattgagttcttgggcaaaagcttggaagatatctgccctgccgagcactagctcctgccagtaattgtagtcatgcacgcggaagcataataatgtttatatgtctgttgaacagggtgttaccatgcctaattctaatgttgcccagtgatgttgagaactgtgcagtagaagcgtaatgtacaatggtgtttaatgtgggggctcttaaagtgttttagggagttatttgtaaaaaaaatcttagagccgtctctccgtgaagagacgcctctggctcgtaaaccaattaacaacagacgcttcacttccc

SEQ ID NO: 20886 - DNA, 1867 bp, Zea mays
  Clone ID: LIB3245-443-A8_FLI
ttcatgctctgcctcctcggcggcttcgtcgccgactccttcctcggccgctacctcaccatcgccatcttcaccgccgtccaggcctcgggcgtgacgatcctgacgatctcgacggcggcgccggggctacggccggcgtcctgctccgcgaccggcggaggcgtcgtcggggagtgcgcgcgggcgtcgggggcgcagctgggggtgctgtacctggcgctgtacctgacggcgctgggcacgggtgggctaaagtcgagcgtgtcggggttcgggtcggaccagttcgacgagtcggacggcggggagaagcggcagatgatgcgcttcttcaacttcttcttcttcttcatctcgctggggtcgctgctggccgtcaccgtgctggtgtacgtccaggacaacctgggcaggcgctggggctacggcgcctgcgcctgcgccatcgccgcgggcctcctcgtcttcctggccggcacacgcaggtaccgcttcaagaagctggccggcagccccctcacgcagatcgccgccgtcgtcgtcgccgcctggcgcaagcgccgcctccctctccccgccgaccccgccatgctctacgacgtcgacgtcggcaaggccgccgccgtcgaggatgggtcctccagcaagaagagcaagcgcaaggagcgcctcccccacaccgaccagttccgcttcctggaccacgcggcgatcaacgaggatccggcggcgggggcgagcagcagcagcaagtggcggctggcgacgctgacggacgtggaggaggtgaagacggtggcgcggatgctgccgatctgggcgaccacgatcatgttctggacggtgtacgcgcagatgaccaccttctcggtgtcgcaggccaccaccatggaccgccgcgtcgggggctcgttccagatccccgcgggctccctcaccgtcttcttcgtcggctccatcctgctcaccgtgcccgtctacgaccgcctcgtggtgcccgtcgcgcgccgcgtcagcggcaacccgcacggcctcaccccgctgcagcggatcgccgtcggcctcgcgctctccgtcgtcgccatggcgggcgccgcgctcacggaggtccgccgcctccgcgtcgcgcgcgagtcctccgagtccgcctccggaggcgtcgtgcccatgtccgtgttctggctcatcccgcagttcttcctcgtgggggcgggcgaggcgttcacgtacatcggccagctcgacttcttcctgcgcgagtgccccaaggggatgaagaccatgagcacggggctgttcctcagcaccctgtcgctgggattcttcgtcagctccgcgctcgtcgccgccgtgcacagggtcacgggcgaccgccacccctggatcgccaacgacctcaacaagggccgcctcgacaacttctactggctgctcgccgccgtctgcctcgccaacctactagtctacctcgtcgccgcccgctggtacaagtacaaggcgggccgccccggcgccgacggcagcgtcaacggcgtcgagatggccgacgagcccacgctccactgatccatccatgttcgatcgatcgacgaggcacgcgacggacgaccctaaattgaaccctatacaccgagcttaattatatatccgtccgatcgtcgtcggtcagattcattgctagctccgcgtgttgtaccatcgtgtcagtcagtgtatacgagtgtgtatcttttgtatccaagtacagcacgcgcgcgtgcgtaagcgtgtagttataaaaattaataacatgtttcttagaggagtgaggggggaattgtaaaaccgcttgtcaattgggctaagatcgttcgggacactgagc

SEQ ID NO: 20887 - DNA, 854 bp, Zea mays
  Clone ID: LIB3245-443-F8_FLI
gcgccgacgcccgcacgctcgggatcaagaaggcgctcgtcttctacgccggcaaggcgccgcgcggggtcaagacagactggatcatgcacgagtacaggctcgctgacgccggccgccgcgccaagaaggggtcgctcaggttggatgactgggtgctgtgccggctgtacaacaagaagaacgagtgggagaagatgcggctggggaagggggcagccgccggcgcagtcaaagaggaggaggccatggacatgagcacctcccactcgcagatcacccactcgtggggcgagacgcgcacgccggagtcggagatcgtggacaacgacctgccgttcccggatccggcgatgatggtgcccaagaaggagcgggtggacgacggcggcagcgccaggaccagcgacctgttcgtggatctcagctacgacgacatccaaggcatgtacagcggcctcgacatgctgccgccggccggcgaggacttgtactcctcgctcttcgcgtcgcccagggtcagggggaaccagcccaccggacccgcggggttgggccccttctgagtgagctcaggcgaggatggaggcatggagatcaggagagaagacggacggcgttgccaactctgtaaatacagcataggacgaggagtcgaacctgactgaacctggtcggggttacaagtcgagtgtgtcggtgtttcgtacatgggaaccgggccttacatgggagccggcccggtcttggtttggcgctggctcattctttagtttcacttcctgcgcagacggtagatgtgtatgcatagctgttcactatcacttcctcttcaacagaaccgattcactccg

SEQ ID NO: 20888 - DNA, 722 bp, Zea mays
  Clone ID: LIB3245-443-G4_FLI
caggaacaagatcctgcagcgacaggatgcccctgctgctataatgcaagcgaataaactaaatgatccagaagctgtcacaaagaggtcaaagctaatgctgccgcctcctcaaatttctgaccacgagctagaggagatagcaaagatgggcagtgctggtgatcctgctttagctgatgagcttggtgaaggaagcactgccacaagaaccttgcttgccagctattctcagactccaaggcttggtatgacaccattgcgaactccgcagcgaactccagctgggaagggtgatgcaatcatgatggaggcagaaaatcttgcacgtctcagagaatcacaaacgcctttattaggaggtgataacccagagcttcatccatcagatttctctggtgttacaccacgcaagaaggagatacagactccaaatccaatggcaacacctttagcaagccctggccctggtatcactccaaggattagtatgacaccatccagagaggggcacagctttggtttaacaccgaaagcaactcctcttcgtgatgaacttaacataaatgaagtggaaatgcaggacaacactaaacttgagcttcgtaggcaagccgaactgaggaaaagcctgcgatctggttttgcttctattccacaaccaaagaatgagtaccagatagtcatgccacctattacggaagatgagaaagaagaagctg

SEQ ID NO: 20889 - DNA, 1068 bp, Zea mays; identical to SEQ ID NO: 3435
  Clone ID: LIB3245-447-G5_FLI

SEQ ID NO: 20890 - DNA, 1452 bp, Zea mays
  Clone ID: LIB3245-447-H12_FLI
gccccccacactctgcgtctgtagtcttctttctcgcgtcggcagtcagcttggcagggccgaaccaatggcggtcgacccgcggcaggtggtggcgggcttcctcaccctctccatgttcgtcatgctcggcaacatgatcaagcacgaccacttctctcccgtcaccgaggagctgggcttcgaggcaacaggtgtggtgtcgaacacaaggaagcttgacaacgatgctgaaatgagcagcgtcgatacggctggagtggaggacctgatggacgctgtcgaggaagttaaaccttgctggaccaaaccaagtccaaaaaatcagccgtctaatggttttgttacattctccttgactatgggccctgagtatcacatctctcagatcacagatgctgtggttattgcaaggtatctaggtgcaacacttgtactcccagacatcagaggaaatgaattaggaaataagcgaaaattccaagacatttacaatgtggataagttcgtgaggagcctggatggtgttgtcgaagtaatagaggatatacctgatgaagtgagtgctaagaagccagcagtcatcagagtaccgaaccgtgtgactgaaagcttcatcacaggcaccatccagcccatcttccaaaaaaacaagtacttaagactagcggtcattttctcttccgtaagtttaaggccaaaggagacgaacaacaaggacatggacgcaactgcttgccttgcgatgttcggtggcctcgagctgaagcacgaatattctgaggtggccagaaaaatgctggataggcttcaagaattaagcaagaagtcagatgggaaggtcttggcgatcgatttgcggaccgacttgctggaaaagaagagttgcaagacaacccgcggcgctcgaagaaaaggctgttatagccctgatgaggtcctggctttcctgaggagtgttggcttctctgctaacacaaccatctacttgacagagacgtcgtggtacaaaggcctggatgttctgaaggaagaattcccaaacacttggtataagggtgacattatgccagccgagaacaaagctgaattcctgaaatccagcaatgcagacctagcaagggctctggaccttgagatctgttcgcagagcgacgtgttcgtccctgccgtcgctggcctgttctacgggcatgtcacgggtaagaggatcgcgtccggacgcacccagatcgttgtgccttcccagtccagcacctcgacacatgcgtcagacttcatctccacctacatctccaacaagaaccaccttgcctacgcgtgctactgctaagcatccttttgtacggccgttaataagatcagctgaagggaaagtgctctgggtgcatatacaagtacctctcgtggacatgaatgatgttgtacactagctaatgttttgttatgagg

SEQ ID NO: 20891 - DNA, 1636 bp, Zea mays
  Clone ID: LIB3245-448-E7_FLI
tcctccacaccgatcactcgctgctcccctctctcgccggagctccgggccggatggcggcggcagcagcagctcctcccgcctccgtgatcgcgtgatggacgcacacaccgccgcgctccgccgatggacgacgccggaaggccaccaccacacgctcccgtggcggtgaccgcctccgcctccgcctccgccaccgccgcgcccgcccctccccaaccctcagccactgctgccgtcgacaggtcctcccccgaccccgacgcgctctatgaagaggggatgtggcaacaaatggccatggacagcggtgccactatgcaacctgggtcatatcctgagcgaccaggtgaacccgactgcacttactatctcaggactggattgtgtcgatttggcatgagctgccgattcaatcatcctccggataggaatctggctattgcctctgccagaatgaagggagaatatcctgagagagcgggacagccagagtgtcagtattatctgaagactggaacatgcaagtttggccctacatgcaaatttcaccatcccagggaaaaggctggaattgcagggagggtgcagctaaacacatcaggatatccactccgcccgaatgaaaaggagtgtgcatattatttaaaaacaggacactgtaaatatgcaaatacttgtaaattccaccatccggaacttttcaatgtggtgccttcgtcacgtggttctcctatttatacctctgtacattcctctgcgagtgctggtccgcagtcctatactggaactatgccaagctgggcttttccacgagcttcttttataccaagccctaggtggcaaagtccttcaaattatgcgccgatgattgtacctcagggccttgttcaaatgcagagctggaattcatatactggtcagctgcagtcacctggggctcaacaaacttatggaagttcacaacaaggagaagctagtacaggaaatcagggaatgctgtcaccatacagacccagttcgtttcccgtgcctcaatatgcgctgcagagagagaatgtatttcctgagagacctgatgaaccagaatgccaatattacatgaagacaggagattgtaaattcggtgcagtgtgcaagttccatcatccccgggtgagatcactgccccctccagattgtgtcttaagtccaatgggtcttccactacgtccaggtgaagaactgtgcaaattctattctcgttacggcatctgcaagttcggcgccaactgtaaattcgaccatcctacagtggttgctccaatggtctatgcgtatggtttctccgcgtctgcttcccctgcatccgcttcgactaatgtacctatggcgcgacgccttctgggatccccaccggggtctggatatacatcttaggcgtcgttttttttttcagttgacctacttcgatttataaaatccatggcactgcctcaggcgctgtgaatgtttctcctaacttcctgccgggatcaaagttctgtaaattgagttgctaccggagatgtacagcccctttttttttggttaatccagatctttgggaataactctcgaaaccgaataaactttggatacagagatgccagttttc

SEQ ID NO: 20892 - DNA, 917 bp, Zea mays
  Clone ID: LIB3245-453-E4_FLI
ggttttgctttatgctggttcatttgtctacggacaatggactagttgctgcactgtttctgtgattcaccatgggaagcagtggagcagatacaccgtctaaggagcagcagccacctgctacctcaggtgctgcaataccacctgtttatccagattggtctagcttccaggcatatcccccaatcccaccacatggattcttcccctcacctgtggcatcaagtccacagggtcatcctttcatgtggggagctcaagctatgattccaccttatggaacaccgccaccatatgtcatgtacccccctggagtatatgcccacccatctatgcccccgggtgcacatccatttactccttatgccattacttctccaaatggcaatgctgatgctactggaactactgttgcagctggtaatactgatggcaagccctctgaaggcaaagataaaagtccaacaaagcgatccaaaggaagtttgggcagcttgaacatgcttactggaaagaatcccagtgaacatggtaagtcctcaggtgcatcgggtaatggagtcacttctcaaagtggcgaaagtggcagtgacagttcaagcgaagggagtgaaggaaattctcacaatgattcacatcacaaggaaagtggacaggaacacgatggggatgttcgaagttcccggaatggtgtatcacgtttgcaatctgagggaaaattgaaccaagctatggcaatcttgcccataccatcaagtggcccagcaactgatccaactacaaacctaaatattgggatggactattgggccaacacagcaagctctgctcctgcaattcatggcaaagcgacgtcaacaacagttccaggggctgtggtcccagcagagcagtggacacaggatgaacatgaactc

SEQ ID NO: 20893 - DNA, 1520 bp, Zea mays
  Clone ID: LIB3245-453-G11_FLI
aaattcttgtctgcacacatatcattgaaagtggaatagatattgcacatgccaatacaatgattatccagtttgctgaactatatggacttgcccagctgtatcagttacgaggaagagtaggaagatcaggtacagaaggcttcgcataccttttctacactgataagtctttgctctcaagagttgcaacgactcggagctattgaggagcattcagagcttggccaaggtttccatgttgcagagaaggatatgggtatcaggggatttggaagcttgtttggtgagcaacagtctggagatgttgcaaatgttggcatcgatttattctttgatatgctttttgatagcttgtcaaaggttgaccagttttgcctagtcccagtaccatacaaagatgttcagctggatataaacatttctccacgtctctcttctgaatacataagttatctggaaaatcctgttgagttgctcaatgaagcggcaaaagctgcagagaaagatctatggaccttgatacagtttacagaagacctccgtcgacgatacggaaaggagccccgtgatatggagttactactgaaaaagctctatgtaaggcggatggctgcagatcttggtatcagtcggatatatccatctggcaagatgatattcatgaaaacaaacatgaacaagaaggtatttaggctcatgacagaagcaatgacttctgagacacatcggaattccctatcatttgctgaaaaggaaattaaggctgaactcctcgtgaatttgccagataccctacttctgaactggcttttccattgcttatcggactgctatactgtaataccagcccttgtgaagtactagattattgttactatttcataagaactgaaggcttctgctgcccaccatgaaaggggacaatatgtccatgcttgaagagaatgatctatcagagaaatcagtcttggctctttgattcatctctgatggatgactcttcgttatgttggtattggcagtcaggctctggcaggccaaagcaagcccatacacactactgctttaggaaaaggtccgccaaaattgtcaacattacaagcatacttcaatgctatacacaaactggagaatgctccacacagacacattgcagttttctacattcgctaacatcaataggatgagtgcctgatgcataattgctaaattcaggtgcaatgcaagtatgaaacatgaaatcaggaagctcagaggacctagttcagatgtacctgacaatagattacatttcaaaattcttctaggtttttttgacatgaactatcaaaatattgctcgagtagatagggaactagggatggcgttaacaatagaccatttgtttgacaataaaacattaggaattttggaccaattggtcagagttaatatttgttgtaaatctattcaaacagatcgtgacattgacaataactataatagttgaaaaaaatcacggaactacaagtattttt

SEQ ID NO: 20894 - DNA, 1194 bp, Zea mays
  Clone ID: LIB3245-454-F3_FLI
ttgatgaaaagcggaggatcaagatggcccttgatgtggccaaaggcatgaattgcctgcacactagtgtacctacaattgttcatcgggatctgaaatcgccaaacttgctggttgacaataattggaatgtaaaggtttgcgactttggactttcacggttaaagcacagtacgtttttgtcatccaaatccactgctggaacacctgagtggatggcacctgaggttctacggaatgaacaatcgaatgaaaagtgcgacgtttacagctttggtgtcatattatgggagctggcaacgcttagaatgccatggagtgggatgaatccaatgcaggttgtgggggcagttggtttccaggatagacggcttgatattcccaaggaagttgatcctctggtagcaaggatcatattcgaatgctggcagaaggacccaaatctgcgcccttcatttgcacagttaacaagtgccctaaagactgttcaaagactagtgaccccttctcaccaggagacccagagcccccatgttcatcaagaaatctcagtgaacttgactccataggagggctttcaacttcctgctgtgcatagtttttgttcttttgccgtttgtgttttgtccaagagcccgcaaatgcgggcgcggcttgtagattgagcgccccaggcggtggtagacactgccgtcgcgacaaggaccccgtggtagggtatgtatagagttgcccatcatcgggagaagtgattcagtgtgtagcaactgatcgtcaatccctcttttagtccaaccggccgaccgggtgcgactgtgcgagccctctgaaaagcagtgagagctctgtgtgttcattgtgaagtgcgtggctatgctaagtggattttctgtcttgctgcgcaataggcagcagcgtatctggaagtttgaagcgttgtaaaactctgtacaatcaggacacttgaatatagttcgtttttaaaaagggaaatttggatccataccattaaaagatcaccactttggatccataccattactatctcacttacatgtgggtccacatgagtcaatgacatgtggggtccatggtatatatctaaagtttggatcttttaatggtatagatccaattgttccttttaaaaaaggacacttcaatataggatacatacattgtgttctttgtttt

SEQ ID NO: 20895 - DNA, 283 bp, Zea mays
  Clone ID: LIB3245-456-E3_FLI
cgagacgagtacggaggacaagaaaaccaagtgatctccagtcttcggatcatccaaatacaagcatacatctctgcaacacctgccttcccagccggcgtgaaatttcttttgctgaaactggatgctggactcttgcggtcttgtcttaccgagacgtgctgaccataagataaggcgtgtaacaagggacacgatagtcttttgtctagagcagcgggcgaacaggcacacactttcacaattacgtttccagttcgtcttttagcagccattactagtt

SEQ ID NO: 20896 - DNA, 1209 bp, Zea mays
  Clone ID: LIB3245-456-G10_FLI
gtgccttgatcgcatcaggaagcttgccgacaactgcactggtctccagggcttcctcgtcttcaacgctgttggtggaggaacgggctctggccttggttccctcctcctagagcgcctgtctgttgactacggcaagaagtccaagcttgggttcactgtgtacccttccccccaagtttctacttcggtagttgagccatacaacagtgtactgtccacccactccctcctcgagcacactgatgtggctatactgctggacaatgaggccatctacgacatttgccgccgatcccttgacattgagcgcccaacctacaccaacctcaacaggcttgtgtcccaggttatctcatcccttactgcctccctgaggttcgatggtgctctgaacgtggatgttaacgagttccagaccaacctggtaccctacccgaggatccacttcatgctttcttcgtacgctccagtcatctctgctgagaaggcctaccacgagcagctctctgtggctgagatcaccaacagcgccttcgagccatcttccatgatggccaagtgcgacccacgccatggcaagtacatggcctgctgcctcatgtaccgtggtgatgtggtccccaaggatgtgaatgctgctgtggccaccatcaagaccaaacgcaccatccagttcgtggattggtgcccgactggcttcaagtgcggcatcaactaccagcctcctagcgttgtgcctggtggcgacctggccaaggtgcagcgtgccgtgtgcatgatctccaactccaccagtgtcgtggaggtgttctcccgcatcgaccacaagttcgacctcatgtacgccaagcgtgccttcgtgcactggtacgtcggtgagggtatggaggaaggtgagttctctgaggcccgtgaggacctggcggcgctcgagaaggactacgaggaggtcggcgctgagttcgatgagggcgaggatggcgacgagggtgacgagtactagagaagtttgctgatgacgcagcatcaggccagtgtgctgcccttatcccgtgatctgccgtgagttgctcctgctatcgtgttatgtgtgtctgttatgaagtattgtgtggtttacaacacctgatgttgtaagagtcgttaattcccctgcattgctaccgggttattgagaataattatggctgtttacgttgttgcttc

SEQ ID NO: 20897 - DNA, 1685 bp, Zea mays; identical to SEQ ID NO: 2447
  Clone ID: LIB3245-457-G8_FLI

SEQ ID NO: 20898 - DNA, 671 bp, Zea mays
  Clone ID: LIB3245-457-H7_FLI
ccgatccgctggacgtggcacgccatggcgtcgcctcggcagactccgagagggcggccgtggacgtggacctgatgaattcgacgacggagggtgacgacggcaggagcagggacgtcgtgtcgtcggcgtcaggtgcagggaccgcactgcggttcccggcagcggcagctcagacggagccgctgcatccttcgtcatcgcatggccatgggcgcggccaccactgctctccgttggacctggagctgggcatgtccctgcccgccccatccgtcggaacgtgatggagatgaggcgaggccgaggccgtgcgtgactgctgtctccctcagctgtgtgtgtcagccagatggagatgatgcgctagccaatacagtactgttcgtgatcgtgaaaacggtgtgcaaacactagcacagcggcactaaactaggatgtcgctcctcgcaccatattgtgtactgtaaccacgttgatccacatcatctctatctcttcaccaccgttggatcataggctgtcagtttcatctatccgtccatgtgtcatactcattcacgatgcggtggcttaatgatccagcagtaatttttcttctttcgtgacttaagggtatatacggtggtatttaatgtagaggcttttgatgtatttaaaggggtatttgc

SEQ ID NO: 20899 - DNA, 1374 bp, Zea mays
  Clone ID: LIB3245-459-A6_FLI
tgaacctccttgctttcggagttttgaatttccctttgtcagctgtgagcttgtaaactccagcgatctcccagaatatagtcctcttggcattcgagagttgatgaggacatccttgaacttccctaccccagtaagattgtggggctcccctactagggatgggagccctgatgctgtgctaaagaatgctgccaaaagattcatgtgcaccccgtccataatgaaaaaaaggcacagagatcttttatctccagttcctgatataagaactgacaagaaaccaaatactgaaagggattttatgagctcaggcatatcctctacaagagttgggaaatcttgcatggatagcgttgatgattcagctgatttagtttcaccgaaagagagtgcatttcaaaagaagctgaagctttgtcacgaaaacaaagaaaatttgaatgaaattgctgatcaaggagaaaatgaagccaatgcaaagcattcttcagggattcttactccgagcagtgttgacaaccataatacacataagaatggtccaaattttcgaattccggagctaaataccactgtacaggctttgtctaactctaaagacataatattttctagatcaaagccatcagaacatgttgaaaaatctgcagcctgcattgatgcagattacgagtatttgaacatattggctgatactccaggtattaaaagaggcttagaatctccttctgcctggaagtctcctgtgttcacaccattccaggatgcatacttcatgagcccagcaagcagagcttttgatgccttaggattggtgaagcagattaatgagcagagtgcttctgctgtggaggaagcacatgaagttctggcaaatggaagcccatggaaacaacataacaaggaaaactctgacaaagaaaatatagaaaatacagctttgaagcatgagcatgtcacaagcaaacctccatcgatactcatggtagaggcacgggtgctcgatttcaatgaatgctccacacctgtgaggaagaaagacgataagaaagtggaaatggttttaggaggacctgcaacatcccctgttacttcctcgcatctttggataaatatgcggtagccctttgaggtgagtgggagtggggatgcttcgcctatgctgttcagtatgtacatgtctgttattcccataatttccaccgttttgaaatacacattccaattagtactttattctttgtgcttggtaccctaaatgtcaattctaaatggaaatacatttttttgtagtgttaagatttgtaatgtgtcatttgattatgttaaatattaaacaaggcaatatatttaaattcagagtatattatg

SEQ ID NO: 20900 - DNA, 2191 bp, Zea mays
  Clone ID: LIB3245-459-C1_FLI
aaactcggccccccgcaggatcttttgttccggaccccgtgagtcgctgccacgatcgaggcagggcgccaattgcggtggccaccacttccaatccactccccgcgttcgcctcgccgagctgttcttgctctgtcctctctccaactccacgatttgttccacacccggttcccgagcctccgcagcgcttcttgctgaaaaagggaactccgagttctccagctctggatcggcagagagcggtggttccttttgcggactctgaggtccagttcttgtttttgatttgtctcatcaacccaccagtcgggctgcaggcttagagctggaaggaataatttgactagagaaatggggcagtgttgcagcagagctacggccccggactctggacggggaggtgccaatggttatggctattctaaccaggcaaagccggcgcaagcacctccgagttacaaccctcctcagcaggcggccgaggtgaggtacacaccatcggcgacgaactcttcggcagtcccacccgtggctgtgccgccgaagccaacggcggacacgattcttggcaagcagtacgaggacgtgcgctctgtctactccctcgggaaggagcttggccggggccagttcggggtgacatacctctgcacagagattgcctctggtaggcagtacgcctgcaagtccatctccaagcgcaagctcgtcagcaaggcagacagggaggacattcgaagggagatccagatcatgcagcacctgtctgggcagccaaacattgttgagttccggggagcatacgaggacaagagcaatgtccatgtggtgatggagctctgcgcaggtggggagctcttcgatcgcatcattgcaaaggggcactacacagaacgtgcggctgctacaatctgcagagcagttgtgaatgttgtcaacatttgccacttcatgggtgtgatgcatcgtgatctgaaacccgagaacttcttgcttgcgaccaaggaggagaatgcaatgctcaaggccactgattttgggctttctgtcttcattgaagaaggaaagatgtacagggacattgttggaagtgcttactatgttgctcctgaagtccttagacggagctatggaaaagagatagatgtttggagtgcgggtgttattttgtacattcttctcagtggcgtgcctccattttgggctgaaactgaaaaggggatatttgatgctattctgcatgaggagattgactttgaaagtcaaccttggccatcaatttctgagagtgctaaagacttggtgagaaagatgttgacacgagatccaaagaaaagactgacttcagcccaagttcttcaacatcagtggctcagagaaggtggggaggcatctgataagcctatcgacagtgctgttctttctagaatgaagcaattcagagcaatgaataagctgaaaaagatggccctaaaggttattgcttcaaaccttaacgaggaagagatcaaggggctaaagcaaatgttcatgaacatggacacagacaatagtggcacaatcacatacgaagaactcaaagcaggattagccaaacttggatcaaagctgtcagaagctgaagtaaagcagttgatggaggctgctgatgttgatgggaatggatctattgactatgttgagttcatcactgccacaatgcatagacacaagctcgaaagggacgagcatttgttcaaggcattccagtactttgacaaagataacagcggcttcatcacaagggatgaactggaatctgctttgattgagcatgagatgggcgacacgagtacaataaaggagatcatatcagaagttgacacagataatgatgggaggattaactatgaggagttttgtgcaatgatgagaggagggatgcagcagccaatgaggctcaagtagcctgttcccttaatagaaacggtgtaccactagttactgttcacttttttttcttcatgtttggtacttggtagttggataaagcttacaatgggtgttgcttttgtattgttgagagatgattgtctatacctttttttcccttttgctcgtgtttgttgcattgtagtatcttgaacgtcccttcctttttttaagtttgtttatgcaagtacatctaataaaaagtgcattctgtctt

SEQ ID NO: 20901 - DNA, 753 bp, Zea mays
  Clone ID: LIB3245-459-E10_FLI
tgttttcagcacccgcaccacctgactgtctgttcgcagcacccggacctgtgtcccgtccgtctctgtaatggccgctgcagccgccgctccagcatctgtggcgccgtcctctgcgcccaaggccgccggcgacaacaggaagacggtggtgtccgtggacgcatcggagctggagaagcacgtgctagcggtggacgacagctctgtggaccgcgccgtgatcgccaggatcctccgtggctccaggtacaaggtgaccgccgtggagtcggcgacgcgcgcgctggagctgctcgcgctaggtctgctccccgacgtcagcatgatcatcaccgactactggatgcccgggatgactgggtacgagctgctcaaacgcgtcaaggagtcggcggcgctcaggggcatccccgtcgtcatcatgtcgtcggagaacgtgcccacccgcatcactcgctgcctggaggagggcgccgagggcttcctcctcaagcccgtccgccccgccgacgtctcccgcctgtgcagccggatccggtgactgcgtgtggtgctatgttaggagctaggatcctcaacaacaacaaaaaaaatcctcttctttctttctctcttgcttggacatagatcttcaaacaaggagctaacatttggggggagactttttagctttagggatctcaacaagttgttcggaacggggggctgttcttttctccattcttcttaataacatcaggtgtcaatgtc

SEQ ID NO: 20902 - DNA, 1376 bp, Zea mays
  Clone ID: LIB3245-459-G11_FLI
gggtcgggctcggcaacttcctggagatggggccgctggacgtggacctgaagccgcgcaactcgacgtggctccacaaggccgacctcatctttgtggacaacccggtcggcacagggtacagctacgtggaggacgacagcctgttcgtgaccagcgactggcagcaggccgcggacatgacgacggtggtcagggcgctggcgaaggaggtgcccaccctggcgagcagcccgctgttcctggtcgccgagtcctacggcggcaagtacgccgccacgctcggcgcgtccattgccagggccgtccgcgctggcgagctcaacgtcacgctcggaggtgtggcggttggagatagctggatctcgccggaggatttcacgctttcctacacaccgctgcttctgagcgtgtcgaggctggacgacaacgccggcgacgaagcaaacaagaaggcggagacggtgaaggagcaaatcgtggcggggcagtgggccgcctcgcagaagtcatggggcagcctgctagatttcatcgacacaaagagcggcaacgtcgacgtttacaatttcatgctcgactccggcatggacccggtggcactgcccgtgggttcttcatcactgatgagcagcttgcaggcgatgaagtactcgacgtacggccaggactcccagcctggctccaacaccattgacggcatcatgaatggggtcatcaagcaaaagctcaagataatccccaagaacttcacgtggggggagcaatccgactcggtctacaacgcgctggtcaacgatttcatgaaaccgaagatcgatgagattgatgagctgctgtcttatggcattaatgtgacggtgtacaatggccagctcgacgtaatctgctcgaccaacggagcagaagcatgggttcagaagctcaaatgggatggtctgaggaccttcctgagcctgccaaggcagcccctctactgtggcgccagcaagggtaccaaggcctttgtcaggtcccacaagaacctgcatttctactggatacttggagcagggcactatgtgcctgcagaccagccctgcatcgcgctaagcatgatcagcagcataacccagtcgccagcaagctagttcactgactctatgtggtgtatgccaagaacaaaggaggcgttgaagcaggtagcgcaaggtcccggaggaccattcggcgttcttgaagtgcggtataggttggatacctgaaagacgatgcagttgacaaggacattttttttacagaaaaagatccgataaaaacatatatgatctacgtattacaaaatattgtaaagaggccggaacttgtttttttaataatagaaatgtatctggctt

SEQ ID NO: 20903 - DNA, 1793 bp, Zea mays
  Clone ID: LIB3245-460-A12_FLI
gcgagtgctgcaaacacaggcacacagctgctatcggatgtcggaggccaaaacccagacgcaacgcaacccaccccctctctgtcctctccgtcctgaactcgcgcctcgcttcgtctctcccattcccacccgctgaagcttcaaggagcttctcgtctgagaccgagctaacgagctcaccggcgggcaggatgctggcggcgtccaccaaggtcggctctaggctggcctctccgcacgcctccttgtccgccggtgctgcggcggcggcactggcgagctcccccgtgctgggctctgggatgctcccaggcgccgggttcggcgagacggggagtcaccacgcggcagacgcgccgccggcgctgccttgcagttcctcgggcgattcaagggaatattatcagtggaagagactggtgaatcaaaggcagtcaacgctagatggaggcaaagtgcctgctgcattgggccaccatgtttttggtgcgggctgttcctcacggaaccaacatatctacagatatttttcatcttctcatcaagggagtatatgggccgggagcaaggttctacatgacctgccagggtatgtaaaaattgtggaagtagggccacgagatggtctacagaacgagaaggacatcgtgccaacacctgtaaaggttgagcttatacgaagattggccacatctggattacctgttgtggaggcaacgagttttgtatctccaaaatgggtacctcagttagctgatgcgaaggatgttatggaagcagttcggactatggggggtgtacgttttcctgtattgactccaaaccttaagggatttgaggcagctattgcagcaggggcaaaagaaatcgcaatatttgcatcagcttctgaaggattttccaagtcaaacataaactgcaccattaaagagagcattgcccgttataatgacgttgctcttgctgcgaaagagaaagaaattcctgtccgagggtacgtttcttgtgtggttggatgcccagtagatggaccagtgccaccttcaaacgtagcttatgtagcgaaagaactttatgacatgggctgctatgaggtttcacttggtgataccattggagtcggtactccaggcaccgtggttccgatgcttgaggcagctatctccgtcgttcccgtggagaagctcgctgtccacttccacgacacctacggccagtccctctcgaacattctcatctctcttcagatgggagtaagcgtggtggactcctccgtcgccggcctcggtggctgcccgtacgcgaagggtgcgtcggggaatgtggcgacggaggacgtagtgtacatgctcaacgggctgggcgtcaagacgggcgtcgacctgggcaaggtgatggccgccggcgagttcatctgcaggcacctgggacgccagtctgggtccaaggcagcgaccgctctgagcaaagttaccgcgaacgcctccaaactctgacaatttaccatgatcccctactgcagataattgcagtaaaattagcgcatggtaataaatagactgaggctattcaaataaatacggcctcggagctagtagtgagtagatttttatttatgtccatctagctagcaaaataagcgcgacactgccaacactgccggtctagcaagcaaaatgagcaaatatgtgaccacctctacgggaaagattcccccaacactctcagcaaacggaagtggtgcatcagttcgttccagcttccagtcatcacatgttcactcagcaaac

SEQ ID NO: 20904 - DNA, 871 bp, Zea mays
  Clone ID: LIB3245-460-A3_FLI
ccatgggcagtcagaatggagtatgagatctacaaagcggcaaattccatacatggctattgtaaggtgggagagctgaaacctgagaagtcgatccctgattcaattctcagacaagcaaaagggcttgcaatcatcactgaggtaaaggttggagtgatgcttacatacaaaatcggtactggattggttgttgctcggagaggtgatggttcttggtcccctccttcagccatctctacttgtggtcttggatatggagttcaggctggaggtgagttggctgactacatcattgttcttaggaacaaagatgccatcaaaacttttagtggaaatgcacatatgtcaattggggctggtgttagtgcttctgctggtcattttggacgagtggcagaggctgatttccgtgctggtgatggtggttatgctgcctgttacacatacagttgtagcaaaggtgcctttgtgggctgtgcgctcaatggaagtgtggtgtccactcgagactcggtaaatgcccggttttacggtggtccgattaaggcctcagaaatccttcttgggtcgctgccaaaaccgcctgctgccgcaactctatacaaggctttatctgtattatttgataagatcgagaagtgaatctcctgatccttctctttagtttgcgacacgcagggtagcatggtgaattgaattatttatgggtcattggttcgctctatttaccttatcctagttggtgatgatgcaagtgtacacctgacgatccactgttttccatcaaactgaggtatttggaaccacaaaccactctgtaaattttgtagacaattctcgttagaaatgaaaaggaaaccattttttc

SEQ ID NO: 20905 - DNA, 1487 bp, Zea mays
  Clone ID: LIB3245-460-C7_FLI
tatctaccaaggaagcaagtggaggccttcaacggtgtgcagattatgttggtatgccaacagctcccagtgaatctaacaaggagccaaggcctgaagagtgtgtaaatgaactgggcattaaacaaccagtacagcatgttgcttccgaggagcaggaaggagttcaagatgatgccaaggcagatgcaaatgttatgaatgtttcttttggtaagggaaaatcagaagattcttttggcacaattaatggtaccaacagtggagataaaatagaatctcctagtggtttagcagaaagaacattgactcagcctaccactaagggttgcagtaagcagcgtggccgtagttctaatggtagaggaaacaggactaaaaaaatagaagaggggaatgcgtctggactaattgctgtggctcccgagtcagaagatgatgatgatgccccatttatagatggaaaccaagcagagggtggtgcactgtgggatatttttcgacgggaagatgtgagcaaactgcatgattatctaatgaagcatgctgatgagtttagacattgcaactttgagccagtgaagcaggttactcatcctatacatgatcagtgtttttatctaacaattgagcacaagagaaagcttaaggaagaatatggagtcgagccttggacatttgaacagaagctaggtgaggcagtatttatcccggcaggatgtccccaccaggttagaaatttgaagtcttgcataaaggttgcactagattttgtttctccggaaaatgtccgagagtgcatcaggttaacagaaggtttccgtctgctgccgaagtggcataaggtgaatgaagataaactcgaggttaagaagatagctcttcatgcattcaatcaagctattaaagatatcactgatgaatcatctaatagcaatgaaagaatgaagccaaatggttacacttggagcagggctcacaaaatattgatgtgctggtgaacaaaggtgtagggttttctccaagatgtcggatttgacactgaagaagattgagtattggaagaggtccgattgaacatttggcactgacattcaccaacttgttcaaatagaggaaaaggatatggaaatggagaaagagcgcatgtatgcatgtgtaggtcagggagtggctcggatcagccttgagtcaatttccactgcgttttcttcggttatggatgagcacgaggagtaaaagaaacagaagaaggctgagtgtgattctcatatgcttattttcttgtcctgtgtaatggatgtgtgtatgtgaaccatatgcgaacttaaacgtctttgtttgtaccggtcaggccattctgagtgagggttccgtctcttctttttaggactccactgcgaggtgtcggtgtgtgagaaatggtgcaaacaagtttctgagaaatggtgcaaacgtgtgtatgaaactctacgaggcatactctt

SEQ ID NO: 20906 - DNA, 949 bp, Zea mays
  Clone ID: LIB3245-460-D8_FLI
tggacctgactaccctttatggaaagattgagagtgcagaatattcattcccagcctggttttcaggtggtgcaaaatcactgattcgtagaattcttgacccaaatccagagacacgaatcaggatagaagagatcagaagcgatgaatggtttcagaaaaattatgaacctatcaaagaaatagaaaatgaggaagtcaatctcgatgatgtcaatgcagcttttgatgatcctgaggacgataatgaggatgctttcgaagatgaaacaggtcctctaacacttaatgcattcgacctaatcattctttcgcaaggattgaatcttgcagcgctctttgaccgcagacaggactgtgacaagcttcaaaatagattcttatcacgcaatccagcaaaggttatcttgtcaagcatggaggttgttgcgcaatcaatgggatttaagacacacattcgcaattataagatgagggtggaaggtctaaatgccgacaagactagtcatctctcagttatggttgaagttttcgaagttgctccatcaatcttcatggtagaactacaaagagcagcaggagatacttcagagtataacacgttcgtaaataactactgcggcaaattagatgatatcatctggaaatttccaactgagaagggaaaatcaaggataccccggttatcaaagtctcattcataatctagtgctgtgtgttatcaattactatggacttaagtggatatatttgcagagtgtatcgcaattggattatgatattctaagtgtagctcttcgagtagtatatgtttgtatattcagagtccccatgtacaaagaggccgttttaattgaggtttccgtacctcgattccctgtgcaaagttttcatcgatgttttagactgcacatctgtatattttgtcgagagcatcagtttcttagac

SEQ ID NO: 20907 - DNA, 1450 bp, Zea mays
  Clone ID: LIB3245-463-E8_FLI
ccgggagatgcagcagcaagggagattcactgatgccacaacagaagacggcatcgctgggacagatgaagagccggtggtgccgaacaacgtcacactcatgaccctgctccctggctgcgcgatgctggcggcgccagcgaaggggaaggagatccatggctatgcgatgcgccacgccttggactcggacatcgccgtcgggagcgcgctggtggacatgtacgccaagtgcggctgcctggcgctgtcgagggccgtgttcgaccggctgccgaagaggaacgtcatcacctggaacgttctcatcatggcctacggcatgcatgggctcggtgatgaggccatcgctctgttcgaccgaatggtgatgagcaacgaggctaagccgaacgaggtcaccttcatcgccgcactagcagcctgcagccactccggcatggtcgaccgcggcatggagctattccatagcatgaagaggaaccatggggtccagccaacaccagatcttcacgcctgcgctgttgacattctcggtcgggctggcaggctggatgaggcctacagtatcatcacctcaatggagccaggagagcagcaggtgtccgcgtggagcagcttccttggagcatgccggctgcaccggaacgtccctcttggcgagattgctgccgagcggctgttccagctggagcccgacgaggcgagccattacgtgctcctgtgcaacatttactccgctgccggcctatgggagaaatcatcagaggtgcggaacaggatgcggcagaggggcgtcagcaaggaacccggctgcagctggatcgaactcgacggcgtcatccacaggttcatggctggcgagtctgcgcacccagagagcacgctggtgcacgcgcacatggacgcactctgggagcggatgaggaaccaggggtacacgccagacacgtcgtctgtgcttcacgacattgaggagagcgagaaggcggcgatcctccggtaccacagcgagaagctcgccattgccttcgggctgctgcggacgccacctggcgcaaccatcagggtggccaagaacctgagggtgtgcaacgactgccatgaggctgctaaattcatctccaggatggtggggagggaaattgtgctgagggacgtgagaaggtttcaccatttcgtggacggggcctgctcctgtggggattactggtagaagaaacgtcatagtgtttcaattaaaaatcaaacatttaatttcaattaaatatataaaaaacattaatacttgttttaaataataagtattattatataaattactgaatatatttttataatggatttatttagaaatatcaggttcaaagtttgatgtctagggtaattcgaactgttaggacaaatttaatattttaaaatagatatgtataaaatttgatattaatct

SEQ ID NO: 20908 - DNA, 1316 bp, Zea mays
  Clone ID: LIB3245-463-F5_FLI
gcggcattcagggggaaatgggtgagttccaagctcttcctctcatcaacttcttcccgttccacgcagaccaaccagacattaagaattgagatcctgcaaccgcaacaatggcggccatggcgaacacctctcgtctccccaccccctgcagcctcccaaccatcagcatcggcgctaagagcaggaggctagctgtggcggccgtcagatgcggtcccggcggcagcaggagccaccggaggagccttggggtcttgctgtgtcgatcctcgtccacggccggagcccaagggagcacgaggatggaggactataacaccgccatgaagcggatgatgcgtaacccctacgagtaccatcacgatctcggcatgaactatgctgtcataagtgagagcttgattgttggctcacagcctcagaagcctgaagatatcaatcacttgaaaaatgaagagcgagtagcatatattctttgcttacagcaggacaaggacattgaatattggggcattgacttccaatccattgtcaataggtgcaaagaacttggcattcagcacatcaggagaccggccgtggattttgatccagactcactgaggtcgcaactgccgaaagcagtttcggcgctagaatgggctacgtcgcagcgcaaagggcgggtttatgtccactgcaccgctgggcttgggagagcacctgcggttgcaatcgcttacatgttttggtttgagaacatggatcttaacacggcttatcagaagctaacctccataaggccctgtggacccagcaagagagccatccgcgccgcaacctatgatctagctaagaacgatccatccaaagagccttttgagaaccttccggagcacgcttttgagggcgttgcagactgggagaggaagttgattcatgaccgggtgcgtgctcttcacgaagcatgagcagaagaaactttctccacgcgtcaagaaggggaactaagcttcctaatgaggcaatggctgtgcttcggcaccagatcattagatgtcgaaacgataaagtttgttctcaataaagcgtatacgacgccatatttgttgctgggtagtttgtaatagtcactaataggaaggaaataaagagggccttgcatgagattccagctggtgtcttcacctttgtggtgactgcaaatgagatgcccatccattaatggcatggcgcattgtaggtatattgtgtaaataaacctgtggatcttcatttgaggaacatcacttctgtaaaagtttatttgaagatacggccagctttgcaaatct

SEQ ID NO: 20909 - DNA, 1660 bp, Zea mays
  Clone ID: LIB3245-464-A3_FLI
gccactcgacgcgcagccaaccccaaacccttcctccctcccgacgggcgacggcgatggccgccgcgacagagaagacggctgaggacatccgccgcgagctccaggagctccagcgccagcaccgcgagatcaccgagcgcctgcgcgacccccgtggccttcgccgcggagcccctggtcctggacctgggcccccccgcccgctccgcggcttcgtgagaccccatgtgggtgcggaagtggcggatcaggctccgcagaagcgtcggctgttatcggccgtagttaaggttgatggcgctgaaaataatgaagaaggcacaaaggatgccaatggggaggggcaagaggcgggttcaggtgccactgaaggcagtgacaggaggactttcaacactggcgggttcagaagggacgggagcctgtggatgcagaggagggtggactataattcgctgccagagccagccccaagggagcttcccaggaatgaggacccaagtttggtgaggaggaataagaggatgctggggcagcttcttgtcggtacattagagaaatttcaacaagaggataaaaagctatccaactctgaggcttttctgcgcagatcagagactcagcgaaaggctgagcaaaaggttcgtgaagaaagtgaaaggctgcgacagcaggaacgtgagcaaattgcagagaagcgtaagcgtgatatgacgctccgcgctcgtgtagctgctaaggcagaagagaagaggttggagctgttgtacattcagtggactgagcatcataaaaggctgtccaatttcttaaggttatttttatttctggtccaaaagtgtccatattgacaattaaattgagggaagatacattctaattgtatgcagacctgatgtttgataactattagtgtatctgtttacgttgtatactaatgaacaatatttgttccatgtttgactcttatctcattacccccttacgtttggcaggacaaaagctgagccacctatttattacatgccaactaaaccaattattgatgatccagccattgttgagcagaacaaggaaaaggtattcgaagaatggaaatctatgcgcagggctgagctgactcagtttcaaaagcaagttgaggagcaatatctctcaaatgtggagaggcaattggagaggatccagaatgcccggaacgctcggaaggcgaacgggcctggtaacatgcaagaaatggacaaggagctggacacccacagggcggagcatggtccaaagcctcggcgagttcccgaggagggcggcaatgatgatgacgaagatgcagaggacatggctgcggaagacgagctgatggatgaagttttgggcatcaatgatgcaatcaatgaggacccatccaagccgtccgaagaagctactactgaaggtcagccagcacccgaggaagcacaataggattctttgttcatacaaggtaggcgtaccattccggcattccgtatgcttagttgccgtcttgttgggtgctgcttgtgcgtgtatttttgttagacgtcccccaatggttagactgtgttttaatattgttgttttggccttttgatgttgagaccatacaactgtcaattattatcttataattgttgtaagc

SEQ ID NO: 20910 - DNA, 1512 bp, Zea mays
  Clone ID: LIB3245-465-A8_FLI
tcaccaaacgggagggcgaggggcaacaggacacacacactgacctagcaccagctcgatctcacaggatggttacgctatgccatccgattcggatccgagcaagcgggagcaccgcgagctggcggaggagaaatgcggcggcggcggcgaaggtcctctgctccgtgcagcaaatgccgccgccgccgccggcggccacggctgcccagagcacgatcaaggtcgttatcgttggggcaacgaaagagatcgggaggacggccgtcgttgcggtgagcaaggccaggggaatggagctcgcgggcgcgatcgactcgcagtgcattggcgaggacgcgggacagataagtggcatggacgagccgctggagatccctgtgctgaacgacctcaccatggttctgggctccatagcgcagtcgagagcaaccggcgtggtggtcgacttcagcgagccttcagctgtttacgacaatgtcaagcaggcagcggcgtttggtctgagcagcgtcgtctacgttccgaaaatcgagctagagacagtgactgaactgtcagcgttctgcgagaaggcaagcgtgggctgcttggttgcgccaacgctgtcgattgggtccgtgctccttcagcaagcggctatacaggcctcgttccactacagcaacgttgagattgtggaatcgagaccaaacccatcggatcttccatcgcaagatgcaatccagattgcaaacaacatatcagaccttggtcagatatacaacagggaagatatggattccagcagtccagccagaggccagctgctcggggaagacggagtgcgcgtgcacagcatggttctccctggtctcgtctccagcacgtcgatcaacttctctggcccaggagagatgtacaccttacggcatgacgttgcgaatgttcagtgcctgatgccaggactgatcctggcgatacggaaggtggtgcggttcaagaacttgatttatgggctagagaagttcttgtagtgaacaacaaacaaccaatgcaaaacatcgacaggcaacaggcaaggcagatatcatctgacgtcgcaacaaccaaaacgacagagatttggaaaataaaggctgcacagaagacgtctggggttttgtgtgcaccaggctgcgcagagaacgtctgtcattttgtgtgcaccactacggcactacctgctgagcgcgatttttataaaaaaggcatgggagggagatcatacacaggaaaagtcacgaaggaaaaaggggtcacatggacatacaggtattggtagcataaccaaaacaatggatctgattctgcgattcggttccatcggcatatgcttgttcagaagaaagttgcatcgggacttgaagaaaaggagggtctagtttgcgttttgtaaccgagactgcgtaattcggcatgcgtatggcaatccaaattgcgccagactaatccagattcaattttataaaatggataaaacataaaaaagac

SEQ ID NO: 20911 - DNA, 1495 bp, Zea mays
  Clone ID: LIB3245-465-E11_FLI
cgttgcagaaacgaagggacaggatcaaccagaagatgaaaacgctgcagaagctcgtcccgaactcgaacaaggtgagacgatcgaacgcgactcatctgacaacggaaccgatatatatatatgtatgatctgtgagcgggaagatccgacaccgttgctgctcttgttgccgtgcccctgaacctgaagcagacagacaaggcgtcgatgctggacgaggtgatcgactacctgaagcagctgcaggcgcaggtgcagctgatgagccggatgggaagcatgatgatgcccatggcgatgccgcagctccagatgtcgatgatggcccagatggcacagatggcgcagatggcgcagatggcccagatgaacatgggctccctcggccagccgggctacgcaggcctcacgccgcccatgatgcacccgccccccttcgtccccgtgtcctgggacaccaccgcaccgcaccacctcctcgccccgcaggccggcagcggcacggtgccagcggacgccttctccgccttcctagcttgccaagcgcagcagaacgggcagcaaccgggtagcatggaggcgtacaatagaatggtggcgctgtaccagaagatgaaccaaacgcagcagagcgcgcccagcaacccgtccaagcagtgagcatgacgtacgtacagctgctttcttgtacattgtttgttcagttttgtttagatttttttggctcattttatcgcatttgttcagattctttcctctcaattgatgaggcctggaactgtgtaacagaggtgtgaaacccgtcgacgcggtacctgtagcatcatgtatttgttttggttcttgaccactctatccttgtatataaggagaccagacgttgcgcaaccgttgagcggagaccaactccagcagactctctctccgtatccgtatttagcacggccaacagtttctctctcctctccgtatccgtctccgtttctagcagactccgtatttacactccgcatgcagtctatgacagctggggcccgcgagcaggaggtggcgcatgcagtcttctgcagagaggagagagaaatcgtggaaaaagggagtgcaggtacacggtgtctgttttgcggagacagatgtggaggctgctggagagcgaaatagtgactcagagcgtgtataatgcggatgcggagtgggatggggagtgtagctggagttggtcccagaagcaccggaagtcgaacaggtgatgaaggcgatgtcacgcaagtagtagtagtgtgtacggtactaaagactttatttatttctgctggcaaatgagtgcagattagataaatcaacccaagcacgattgaagaccattatctgattgcttaacttgtcaatcattaatcctacatctcaatttttagggaaccgtttgtctgcctagaatattgtcacacccggcttttagaagaaacacaatacatatgtatgtgttcccagt

SEQ ID NO: 20912 - DNA, 1201 bp, Zea mays
  Clone ID: LIB3245-467-A4_FLI
accggaaagaggcgctcagcatcttgcgtgacatgcgcggcgcaggttgcggccccaatgtcgtgacttacaacacgctcgtcgcggcgttcttcagagccggggaggtggatggcgcggagaggctggtcggcatgatgcttgagggcggcttgaagcccaacctggtgactttcaattcaatggtgaatgggatgtgcaaggctgggaagatggaggacgcacgcaaggtgttcgatgaaatgatgagggagggtttggcgccggatggggtcagttacaacaccttagtgggtgggtattgcaaggcagggtgctcgcatgaggcattgtctgtgtttgcagagatgacacagaaagggatcatgccagacgtcgtgacatttacgtcattgatccatgtaatgtgcaaggctgggaacttggagcgggcagtgacattggtgaggcagatgagggagaggggcctccagatgaatgaggtcacttttacagccttgatagatgggttctgcaagaagggattcttggatgatgcattgcttgcagtaagggggatgaggcaatgcagaataaagccttcagtggtgtgttataatgcacttattaatggttattgtatggtaggaagaatggatgaagcaagagagttactccatgaaatggaagctaaaggactgaagcctgacgttgtgacatacagtacgattatcagtgcgtactgtaagaattgtgatacacattctgcattcgaattgaaccaacagatgcttgagaagggtgttcttccagatgcaatcacctactcatcactcataagggttctttgtgaggagaaacgactcagtgacgctcatgtgctcttcaaaaatatgattaagcttggcctacaacctgatgaatttacatacacatctcttattgatggccactgcaaggagggtaatgtggagagggctctttctctgcacgataaaatggtaaaggcaggagttcttcctgatgttgtgacttacagtgtgcttattaatgggcttagtaaatcagcacgtgctatggaagcacaacagttgctcttcaaattgtaccatgaagagccaattccagcaaatactaaatatgatgccctgatgcattgttgtagaaaagctgagcttaagagtgtgttagctctcttgaagggattttgcatgaaaggttt

SEQ ID NO: 20913 - DNA, 1774 bp, Zea mays
  Clone ID: LIB3245-467-G6_FLI
ccgccgctgaaacaatctgcacccccacgcacaagcacgaagcagtcagcagtggagtacaaatcctcgcctgcttcctggttttctctccccgccactccagcggaacggcggcgagggagtgagtgacggcagcgaggcaagatggcgaggaggaggccgatggactacgaggagctgaacgagaaagtcaagaaggcgcagtacgcggtgcgcggggagctgtacctccgcgcctccgagctccagaaggagggcaagaagatcatcttcaccaacgtcggcaacccgcacgccctcggccagaagccgctcaccttcccgcgccaggtggtggcgctgtgccaggctccgttcctcctcgatgaccccaatgtcggcctcatgttcccgcccgatgccatcgtgcgggccaagcgctatctcgccatggcgccgggaggtctaggtgcgtacagtgatgcccgtggtatccccggaatcaggaaggaagttgctgacttcatccacaagcgtgatggatatccgagtgatccagaactcatttacctcacagacggcgccagcaaaggtgtgatgcaaatgctgaatgccatcattagaaacgagagggatgggatcttggttcctgttcctcagtacccactttattctgctatcatttccctctttggggggtctctggtcccatactacttggaagaagaggctaactggaaccttgactttgcaaacatccgacaagcagtggccgaggcacgttcgaagggaatcactgttcgagcgacggtgattataaatccaggaaatcccactggccagtgccttagtgaagcaaatataagggaacttgtgcgatattgctaccatgaaaacttagttctgcttgcagacgaagtgtatcagcagaacgtttatcaagatgagcgcccatttataagcgcaagaaaggttatgttcgacatgggtccgccaataagcagggaggttcagcttgtttctttccacactgtgtccaaagggtactggggagagtgtggacaacgtggtggatacttcgaaatgacaaatcttcctccaaagacagtagatgagatctacaaggttgcatcaatagtactgagtccgaatgttcccgggcaaatctttatgggagtgatggttaaccctcctaaacctggagatatctcatacccgaagttcactgccgaaagcaagtccatcctcgaatctttgaggaggagagcgcgcatgatgacagacggtttcaacagctgccgaaatgtggtgtgcaatttcacagaaggagctatgtactctttcccccaaatacagctgccagcaagagccatcgaggcggcaaagagagccggcaaagcagcagacgttttctactgcctcaagctcctggaggcaacggggatttccactgttccgggatctggttttgggcagaaggaaggggtgttccaccttcggacaactatccttccagccgaggaagacttccctaccatcatgtcgagcttcaagaagttcaacgactcattcatggagcaatacgagggctactccaggatgtgatgtcaacatgaaaagaagcgaccgcgccaccattttgcttctactgcccatactagtagaacagtgatcggtgcactatgtgatatttgctgctgctgctgaactgcggccttttctcactcaacactctgcttagtctgctatgtatgtgttgcctgttctgaaagagtaaagaagcgaccgataatgt

SEQ ID NO: 20914 - DNA, 1391 bp, Zea mays
  Clone ID: LIB3245-467-G9_FLI
gcggccagcagacactgccatgaggactctactaccggtggccgccggccgcgggaccgtcgcctgcgcggccacgcccgtcccccggaggtcgctgctcctctccaccgctgccgcaggtgcggcgctgcagccggagcaggtggctggaacgaggccgttgaggctgaccaggagcgaggccagcgccgtggcaaagcccaggaccttggccgacgaggccatctcgtgggcgaagaaagacaaccgccgcctcctccacgtcgtctaccgggtcggcgacctcgacaagacgatcaagttctacaccgagtgcctggggatgaagctgctcaggaagagggacattccagaggagaagtacagcaacgcgttcctcgggtacgggcccgaggaatcgcatttcgtcgtcgagctcacttacaattacggggttgacaaatatgacataggcgaagggttcggccatttcggcatcgcagtcgaggacgtggccaagacggtagagctcataagagcaaaggctggaaaggtcatcagggaagccggtcctgtgaagggcggcgagaccgtcatcgccttcgtggaggaccccgacggctacaagtttgagatcatcgagaggcctggaactccggaacccttgtgccaggtgatgctccgcgtcggcgaccttgaccgtgccataagcttctatgaaaaggcctgcggcatggaactgctccggaagcgagatagccctgagtacaagtacacagtggcaatgatgggtttcggccctgaagacaaggacgcggtgctggagctgacctacaactatggtgtcaccgagtatgccaaggggaatgcatatgcccagatcgccattggcaccgacgatgtctacaggaccgcggaggcggcgaagctgtccggaggccaggtggtgcgggagccggggcccttgccagggatcaacaccaagatcacagccatcctggaccctgatggctggaaattggtcttcgtcgacaacatggacttcgccaaggaactggagtagccacgccaacgacctcagacgccttgcaacaggattaactcgcactgctgttggtccgtaattaaaatgaaagctactagtgaaaccgcgaggtctgtttcgtgctcaattagcagtgcgcttttttttccgctcccggtcggtcgggccggcgtcctcgttcacgtgaacgatgacgatcagcctatggttgggagcgtttgcagcactttttctgggggcgctagagaacggggatgaatactgccgcgcctttgtaatctcgctttttgctcgatgcaacttaaaatcctgtccctgtctgtctatcacggaattaagaagcacgtgcgggagccgcaatttctgg

SEQ ID NO: 20915 - DNA, 2130 bp, Zea mays
  Clone ID: LIB3245-468-D9_FLI
attctggaagcaccccactccaatccactctacatgtcccacgctcagacccgggtccctcaccgccgtctctcgcgctccggtaaccgcctccacctccgcacctgacccctccgcctccgcctccttgaaaattccttttgctgctccaacctgcgaagctagttcactgtactcttgcttgcttataacgtagcgtgcggtggacggggtttgccagcgacttcaagaaaggtagatataatttgatgggaagatgaatggtgcagaggaggaggagccgcctcacgtcagcagcatgcccaagacacaagacggtgttaccaagcccagtctagggaaagagcccatcccagggagcgagctctggacggatgggctcatctgtgcttttgagctggtcaagagtcacaggaagcctgttcagcacaaatcatggctggcaactgagcagatacaggagaagggccccactatgtgcacgaggaagcactcaagaaggaatgggcaccagatcactgagccgaaagtggatgagagcattgtgttggaaaacccccagcagactgatttcagtaacgatccttcagtgctcaaagataggccattgtatgctggggagattttggatcataaatgggtgcctattggatggaataggatcgccgagctggtcctgagggttcagtcagactccagctgggagaatgagttgatggagatgagtgatagcgaggatgattacaccgtggctgatcttgcagctccatactggcagcgccctgtgggacctacttggtggtgtcatgtcaccgcaggccatccttcaatagatgcatggttgaatagcgctcactggatgcatcctgccatcagaattgcactgagagatgagagcaaactgataagcgaccggatgaagtacctgctctacgaggtcccagttagagttgcaggagggctgttatttgagcttcttggccagtcaataggagacccaaatcatgaagaggaagatatacctattgtgcttaggtcttggcaagcacaaaattttcttgttacaacaatgcatgtcaaaggcccttcatccaatataaatgtgttaggagtgactgaagtgcaggagttgcttcttgctggtggaagccaaacacctagatcagtgcatgaagtaattgcacatttggtcagccgtctttcacgttgggatgacagattattccggaaatatgtatttggggaagcagatgaaattgaattgaaatttgtgaataggagaaatcatgaagatcttaatcttgttagcatcatactgaatcaggaaatcagaaggttagcaacacaggtaatcagggttaaatggtcacttcatgcaagggaagagatattaattgagcttctcagacatttgaggggtaatgccacaagagctattctagagagtattagaaagtgtacgagggacatgttggaagagcaggaagctgtgcgcgggcgcttgttcactattcaggatgttatgcagagcactgtccgtgcatggctacaagatagaagcctcagagttacacataatctggcaatttttggcggcggtggcatggttttatccataatcactggccttttcggaatcaacgtcgatggcatacctggagcgcagaacaccccctacgcttttggtttgttcgcgggacttctcttctttgtagggatcgtcctaatcggcatggggatgctgtatcttgggttacagaatccagttaacagtgagaaggtgaaggtgaggaagctggagctccagcacctggtttcgatgttccagcacgaagcggagcagcatggcaaggtcagggaaggtgttagccggcatggcgcctcgccgagttcatccacggcctctgatgaagggtacattcttatctcctgagatgggagatttatttgctgacgtgcaaggtcttgttttgaaaggctggaactgaagagaagtcgggtaaatggtatacttacacgtgtcttaagaattgtaattgggggatttgacatcgaaacgttggatatgataattgtagcagcagattggctttcctctgttgcttgagatcgcggctgtgatcgtttctt

SEQ ID NO: 20916 - DNA, 901 bp, Zea mays
  Clone ID: LIB3245-469-C2_FLI
cagggagctcgatcgccatggtcgccgcaccgattacgccagtattgcaaaacacttggagtctgctaatacaatgttctccttcatatggtggataatcggattttattggatatctgctgggggtgaagaggttatccgggacgcacctcagctttactggctctgcatagtcttcctggcatttgatgtgttttttgttgtattctgtgttgctctggcttgtatcattggtattgctgtctgttgttgccttccttgtatcatagcaattctctatgcagtatctgatcaggaaggagcatctgaagatgacattcgtcaaatcccaagatacaaatttcggcggaccgatgagcctgaaaagcaagatgttgaccccatgggtccttttggtggaataatgacagagtgtggcaccaatcaacctattgagaaagtgcttgcagctgaagatgcagagtgttgtatttgcctatctgcttatgatgatggtgcagagttgcgggaactcccttgtgggcaccatttccactgcacctgcatcgataagtggcttcacatcaatgcaacatgccccctgtgcaagtacaacattcggaaaagcaacagtagcagtggaagtgaagaagtatgaatgcaaccgcttgacaatgccaatctgtttaaacttcgtgcctgtgtcgttgctaatgtaactccagggcttgagcagtgtaaatttttgtactaaaagaagtgctgatagagtcaattatgtattaaagttactcaaagtgctgtctatatgtcgtataagttaataaatagttgggtgtgcatctgtatttactgtcaggaatgattagttgcactgtaacttgtattctttcgagtgattcgggcgttttcctgctgggct

SEQ ID NO: 20917 - DNA, 1528 bp, Zea mays
  Clone ID: LIB3245-471-D12_FLI
tcagcctgtaaattctgataatcatgccaaatatgaagatggagatgaaagtgaaagtgtggaagcacggaacacccgacatcatcaacaatatgaatcgctaaataaaaaatcaagtttgaagaggcgaaaggataataatagaagcaacagctttcatgagctacacaaggacaatgttgacattgactgcaggtttgatacagacggcactgaaaacacctcaataggtgactgggataatagtccaccacaagggggtgatgtcaaagcagtgaaatctggtgctcgattgctaggcactaagaggtttagcaaggagaagggaagtaatggtttgtcaaatgtaaacaagaaattggtaaagatgggtaagaaaattagtactaagaagcaaaagaatgacaaaacaaataggcagtttcaagaaaatcacaaaaaagctgacattgtggatttgcttcatgaagatgatggagatgaaggcacatacatagactgtaatgaaattcgaaaacaaaaaacagatgacgtgagagtaaaatctagaggcaaaatgcaaagtggcaagaaaaaagtcagcagatgtcaggcaagtgatggttcgcacaatggaggcaaggaaatgaaattatcaagtgacatagaagtgtgcaacagaagaggagatggaacaacggcagccaattttgaagaaattccaaaagaaaaggccgatgctgtgaaagtgaaacccaagatgcaaggtgacaagaaaaaaaccagtaaacatcaggcaggcgatggagataaaggagcaaaattttcttgcgatatagaagggtgtgacatgagtttcagcacccagcatgacctgtcgctgcacaagagagacatctgtcctgtcaaaggatgcaagaagaagttcttctgccataaatacttgctccagcaccgcaaagtgcacctggatgaaaggccgctcatgtgctcattcccaggctgcgcgaagacattcaagtggccatgggcgaggacagagcacatgagggtgcatacaggggtgcgcccgtacgcatgcacggaacctggctgcacccagacgttccggtttgtgtcggacttcagccgccacaagaggaagactggcactcgtgtgacaagaaaaagaaacgcggcctttgactgctcgtgcacaagtacaggtttcttctctgacggcgagcgatcagaaggggatggatgctaatcgaataattgcgccaggttccattgtttgcagaattaatctgcattaggagtctaattcatttcattgtttattaccgctgcaacataacagctcattcactgtcgctttaggtccaactgacctgctggtgactgagattgtaccatgtcaattgtatcgttctttcgttcatacttagaaatcgggaagtttctgttgacaggaacgttggatttagtgtacggcgcctgttattaacatgcgtgtaattctgtactgaagtgctcctttcttatttttacattttttaaaatctgg

SEQ ID NO: 20918 - DNA, 578 bp, Zea mays
  Clone ID: LIB3245-471-G1_FLI
atcaggcagcacctagctagcagcagccaatgacgaagccttcgcaggtgctgttggcggcgctcgccgcctgggcggtggtcctgctgctgctgtgcgccgccgcgccgcggggcgccgacgcggcgacggcgtgcgacgccacgcagctgacgccgtgcgccggcgccatcatcatcgggaggtcgcccagcgcggcgtgctgcagtaggctcaaggagcagcagccgtgcctgtgcacgtacgcgcgcgaccccaatcttcagcgctacgtcaactcgcccaacggcaagaaggccatggccgcgtgcaaggtgcccgtgccgtcgtgctagttaacttctgtttgcgccgccgccgcgtacgtgtcgtgtcgtgcctgtgtcagtagcagcaaggcccactggacagggacagagtatggcgtcactttctgtttccgtacatacgtacctggatcgtgccgtgtatgcgtgttccctggtggtactcgatccgctgcctgttgtgtctaccgagctctttggacagctacgcgtgcgtatgaataaatgatataccagatcgtttgtgctgag

SEQ ID NO: 20919 - DNA, 871 bp, Zea mays
  Clone ID: LIB3245-472-E7_FLI
gacggctatcggtggaggaagtacgggcagaaggtggtgaagggaaatccaaacccaaggagctactacaagtgcacgacggtcgggtgccccgtgcgcaagcacgtggagcgcgcgtcccacgacctgcgcgccgtgatcaccacgtacgagggcaagcacaaccacgacgtgcccgccgcgcggggcagcgccgcgctctaccggcccgcgccgccgaccgcggacaccgccggccaccactacctcgccgcggctcggccgggcgtggcctaccagacggggcagcagtacgggttcggtgaccagctgggctcgttcggcctcagcggcgccccggcgcagagcggcggcggcggcttcgcgttctcctccggcttcgacaacccgatgggctcgtacatgagccagcaccagcagcagcagaggcagaacgacgccatgcacgcgtcgagggccaaggaggagccccgggaggacatgtttttcccgacgtcgttgctgtacactgactgaaggacaaggacggcaggacatggcgtggtgtggtgtccataaactgttcctttggcacacggattgttgttgttgttgttgttgttgttgtatctaggataggttgaacagatttctttatttgtttggaggcctccatgttggcagtggcagatgcttgccgtgccgcaggggtgtctcccttaacacgtgaaaggggggaaagaaagggatttaggatactagagtctaggacacgtggcaattacacagaaggggtaaagaagttttgttcctcaaagacaaattcacacatgagacttgttgtagtcaggattggacataatttcatgtcacagaacatttgttaagattc

SEQ ID NO: 20920 - DNA, 550 bp, Zea mays
  Clone ID: LIB3245-473-C7_FLI
acgggacacacacgcagatccgagctaaccaccatcgacgagcgccagccgccagcagccgagccggagcgaccttttcttttttcttttacacagcgggacagagaaaggagtcaggcagccaaagccacccaccgcttttaccgatcggcgttgccgccaccgctagcattgtcggcttcagctccatccaaatccaccgccagcaagcaagccggcgccatgggtctgccgatgaggagggagagggacgcggaggcggagctgaacctgccgccggggttccggttccaccccacggacgacgagctggtggagcactacctgtgccgcaaggcggcggggcagcgcctccccgtgcccatcatcgccgaggtggacctgtacaggttcgacccctgggacctgccggagcgcgcgctcttcggggcccgcgagtggtacttcttcacgcccagggaccgcaagtaccccaacggctcccgccccaaccgcgccgccggcaacgggtactggaaggccaccggcgccgacaagcccgtcgcgccgc

SEQ ID NO: 20921 - DNA, 728 bp, Zea mays
  Clone ID: LIB3245-474-D9_FLI
cacaggttgaacgactcaaaggtgaaaacgcaacactgttccagcaactttcagatgccaaccaacagttcagtactgcagtcacagacaacagaatcctcaaatccgatgtagaagcgttaagaattaaggtaaagatggcagaggatatggtagcgagaagtgctgtatcgtgtggcctaggcgaccttggcctggcaccatacgtgaactcaaggaagatgtgccaagctttgaatgtgctcacagggttggatttactagggagtgatgcgttcaggggtccaaccgcaggtacacgagtacagaactcaccagtacagagcactgcaagcctagagagtctggataaccgaaagtccaacgaggtgaccagttgcgcggcggacatttggccttgagcttcaagccattgatctgattcaaagcttgctccaccctcaaaaaaaggaccagagtttgtcaactcaaatagctggtggcttgagcagagcttctggcacgagttctcttgaaccatatttccacataagctttataggatgcatcactcttttgatgtcacttagtttcaagtataaaatgaagctgtctttgtacaaagctgcaaatgagaagtaaatgaaacgtcctggacaaacttgtgaagtaggaatgatacataggctctatttccaggtcagatgagacagttatgtttacaacaaaaagcaatacatgttgtttag

SEQ ID NO: 20922 - DNA, 976 bp, Zea mays
  Clone ID: LIB3245-475-C3_FLI
gctaggcacaaggaggagctgcaagaagcagcagaacacagggacctgcttgagaaggaccttgaaagggaaaaggctgccagggcagaaattgagaaaacatcttcccgtgaagcgcctaaagctccacttcccgatcaaacaagaaatgcccctctcagaaagctgtctagttctggcagtataaatagtctagaagaaagccattttcttcaagcatcgttggatttatctgacaatgcttcattagagaggcgaatgtcttcagaaagtaatatgtcgtattatctgaagaccatgactccaagtgcttttgaatcagcacttcgtcaaaaagatggagagctggcttcttacatgtcacgcttggcctcattggaatctattcggaattcactagcagaggagttggtaaaactgacagaacaatgtgaaaagttacggactgaagccactgctgtgcctggcttaagggctgaattggaagctctgaaacaaaggcactttcaagctctagaactcatgggggaacgtgatgaagagttggaggagctaagaaatgatattgttgacttaaaagagatgtacagagagcaggtggatcttcttgttagccagctccagtcattgggtgctcgtgtatagcgctgcctgcgctggtatgaatttgtcataccatctaattctcgtccagtgcatcgcggccaggccaagataccaggtccgtgacttgagcatgttttgtttcaaattttgtaacaccatacaacggcactgaatgttttcgtttgtatacatcggaacacagttgttgggtttaggaggatacgttgttgtatactagtaggttgagtagtttcacagctttacgtgtattctttgtgatttgtttccgttgaaatgtatcaaatttgaatccatttgcaagtgtacctcagaggaatgcaatcaataatatcgagagctccttttgtcc

SEQ ID NO: 20923 - DNA, 515 bp, Zea mays
  Clone ID: LIB3245-475-E2_FLI
ggtgccccgacctcaacctggacctctgcatcagcccgccgtgccagcatgaggacgacggcgaggaggaggaggaggagctggacctcatcaagcccgccgtcgtcaagcgggaggcgctgcaggccggccacggccacggccacggcctctgcctcggctgcggcctgggcggacagaagggagcggccgggtgcagctgcagcaacggccaccacttcctggggctcaggaccagcgtgctcgacttcagaggcctggagatgaagtgaacgaaacgaagcccacacgtcctttcttctccttttgttgtcggttgtagtcttggcttgttggatttggatagagctagttggttactagttgttagttagaagatagtgcaggatgatcactagctactggctacctcgacacagtagctgctcccttctcttccattctatgtaaaaaagaaacaaaaatacttagggggtgtttggtttctagggactaatgtttagtccctacatttt

SEQ ID NO: 20924 - DNA, 1190 bp, Zea mays
  Clone ID: LIB3245-475-F12_FLI
gcacgccttccgttttgggaaggcgaggagaggggaaccccggcccagggagagttgtggggaggggatcggcggcggaggagatggaggagcgggagaagctcgtgtgcctggccaagcttgccgagcaggcggagcggtacgacgatatggtggaattcatgaagaatcttgctaggatggacgtggatatgagtgctgaagaaaggcatttgttctcagttggtttcaagaacactattggagcaaagagggcatcatggagaatcatttgttcacatgagcaaaaggtcgcagctgatcgtcagactggtgtgatgatagatgcctataagaagaaagtagaagaggaactaaggaaggtttgcaatgaagtattgtcagtcattgctattcattgccttcccttggccagtacgggtgaaaatatcgtattcttttataagatgaaaggtgactactaccgttacttggctgaatttagcactggaactgaaaagaaagctgcctctgatcagtcacttatggcctatcagcatgccatggttgtcgcctccagtgagctctcacctgctcaccaaatccggcttggccttgccctcaatttgtcggtcttcttttatgagataatgaactctcatgagagagcttgccaagtggcaaaacaagcatttgatgaggctcttactgagataaattctggtgagggaggttacaaggatagcacacttatgatgcagcttctgaaggacaacttagcattgtggacatcagaactaactggaggtgaagcatccaagggtaacgacgatgtcgacatggagggttgatacattctccatgttttaaggaaacacagaaagcacgcaaaaatatccaggctgtgatgctagcgaacctgggtcctcaagttttttctgcatcggaactcagaggagccttgtgtatttttctgaagtttctgtccgtctcgggttttttttttgaggtctgtttgttcctctcttttggccatcgtttggtcctggagtcagtcactcactaccaagtgtttcagaggtctgaactggtgagcatctagatctgttgttgctttttttttcttcttctgtgcttcagaggcatctttgtacaccgatggaaaactgtttctcttatcaacgcatagactgtcagtgctgttactaatc

SEQ ID NO: 20925 - DNA, 2084 bp, Zea mays
  Clone ID: LIB3245-475-H10_FLI
cacaaagctgctgcactcgtttagattctctgaccctgctcccgagaactcatcgacgccgtccatgctgtcctcctctccggcgccgtcacaagagggcgccgccgttccctcctcctgggcggaagctgcgtcctcggcggcgctccggcactaccgctcactggccaagaaagggaagccgcaggggcgcgagtccacggtcctcgccgccatcctcctctctgccccgcaggactcgcacagcctcactgtgctctccatgggcaccggcaccaagtgcctcggtgcctcgatgctcagcgcacgtggggacctcgttcacgacgcgcacgctgaggtcatcgctcgccgcgcgctgctccgcctcgtctactccgagatcggccgtggcgccccgcctgattggctggttgcttccggggatgctgggagatggaggctgagggatgggcactgccttcatctttacatcacacaactcccatgtggagtcatgccagtaccaccatcgcagtctgatttgccaagaaaacagctgaacagtatgaatgtcgaaattggctttgttcaaaggaaaccagggcgtggtgatacaacatcgtccatgagctgctttgacaaaatcacccgctggagcgttgtaggaattcaaggtgcattgctgtcacatatactggaacccttgtatttgtccaccattactattggacaattacctgatggtactcctgaacggttctctattaaaaataatatcaagaaggccctggatgctcgtctgtcctctctacccaccgaattgccgcctcctttcaaaatgcagaagccaaaggtttttgaggcgcctgtcccaccaacagagtttcaacagattcctggagacgtacgcctcttgacatgcgggtagtatatggtactcgatttgttggaataaatccggtttgcatgaagttgtcttaggcacaactggtaggaaacaaggaacctcatcaaaggcagcacacttaccctccaccgagtcactggtctgcaagagaagactactagaagcatttttgtcccttgagcatcctttggtgaggcaactaaaatgcgaggagctatcttaccgggcacttaaggatacggctcatgaataccatcacgcgcttgagctcctcaggaaggccccattttttggctgctggcgagctaagcctacatttgttgattcgtttgcagtttcacggtgatgtctcgtgaactggtgaatgccatctccctgtttctttttgtctgttgaaaaaacatactatctccgtcccaaaatatagttctttctagcctatttttttccgatccatattaataaacgtataaatagtgtagaatgaattatattttaggaccgagggagtaggtctgatccagctttgttctgtgtgaaattgtatatgttggtggtccatgaatgaatcaaactgaacttatgcgcgcgtgctgctgtcacttgattccaagcactccctcccggcctccccgcgccaggtatctatattttaatatttgatctgcttaacttccctcctctgcctctgagcacacgttaatggcagagagttcaagttctgaataatggtaggatttcaagttcttttactcaagaatcgagatgtgaaatttatcgcgcgcgtgactgcgtgagcaccgaacaactaatgcctttctgctcgctcgcttcaatttcctggacgagcctcaccgaggttatcaagttccgttccaaacccaaggagacaaacgcgcgcacactgagcactgacacagcacatgctccgcacttccgcaggtccaggtcgtttttgaggttcatcggcgtcaagccgtcagccgctgccggtccatttgttctcgacggatggatcctggaatcccgcccgactcccgagactggaggacaagagactccggagaccggatcacaagcaagcaacatgttcgtttggtttggctttaatttgtaacgaattttattgtttttacaggattttgtatctatagtttacagctgactttaatctgaagcaaacagcataatacat

SEQ ID NO: 20926 - DNA, 1050 bp, Zea mays
  Clone ID: LIB3245-476-H11_FLI
gcagaacgagtggtacttcttcagccacaaggacaagaagtacccgacgggcacccgcacaaaccgggcgaccaccgccggattctggaaggcgacgggtcgcgacaagcccatctacaccaagagctgcctcgtcggcatgaggaagacgctcgtcttctacaggggccgcgcgcccaacggccacaagtccgactggatcatgcacgagtaccgcctagagaccaccgagaacgtgaccgccgcccctgaggaaggatgggtggtctgcagggtgttcatcaagaagcgagtggaggccgtgcggcggatggccgacggcgcgccgccgtggttcgatggccacgtccccggcggcttcatggcgcccgcgggccttggctcgccgaggcagctgatgcatcaccacccaaacccggcagcagcagcgccactgctgtacagcggccagcagctctaccactgcaagcccgagctggagtaccatcaccttctgcagccgagccaagaggccctgttgcagcagctccctcagttggtggagagccccaagcctcctcctcccgccttcatcgaccaaggcagctgcagcctccagtcccccgacgaggcttctgggtacaacaccaccccgcagcaaccgccgcccatgacgacggaggccgcctacatggacgacgactcggtcaccgactggagagtgctcgacaagttcgtcgcgtctcagctcttcagccacggcgacggcatggcgaaagaggatggttaccccaacccggggcaggcattatttcaggctgagaacaagcagccggaagaagcactggactacgcctccacgtctgcgtctggtggcggcggcggcgaggcgaacatgtggaaatagcgtatgccgtatacaattcatctgcgagtttaccatatatatgcctcccaaacctgatttagtgtacaaatatatagcgtgcaatataatgcttgtcatgctgacacatgataatatacacatgcatgcatgataataaacacgtaaccgaagtggttatttat

SEQ ID NO: 20927 - DNA, 614 bp, Zea mays
  Clone ID: LIB3245-481-H7_FLI
gtatactcgcagtgcagacaccgtaaggtgttcatgttgcaacacagtgaaccttgttagaccagtgaataatatagctcatgtgaactgcggccagtgccggacaactttgatgtatccatacggcgcaccttcagtaaaatgtgccgtatgcaattatgtcacagctactggagtaaatactgtggcacccaccccatctgcgaggccaacatcagatgggtcttcatatagtggctcatctacttctgctcctaaatctcaatctcagaatgtaactgttgttgttgagaaccctatgacagttgatgacaagggaaaacttgtcagcagcgttgtagttggagtcacagctgggaaagagtgattttattgacacttcgtacatcattgttgtgttttctatacacgaagttggaaaataccatgtagcatccaatgatgggttgcttggacttccttgaagaacagagatacaccacgaaatatttgtaggaccttcctaatgaaaccatggtcggacgttgtgtattgattcttttgtgtgtataatatgagctccgttagacttgtgtaatcagatatttgggggaaatacagcatagtttcgctgt

SEQ ID NO: 20928 - DNA, 496 bp, Zea mays
  Clone ID: LIB3245-482-E1_FLI
gcgacctcatgctcgtcggagacgtgccgttcgagatgttcgctagcacctgcaagaagctgaggatcatgaagagatctgaagccacaggcctggggtcgtcgtcagcgaggcagcaatgaagatgatcccatctgatcgagaggacctgcatgcccggcaacgttgaacaacatgtcgatcgaacgtcatggtggccttattaattgtttctttcttttcttttcttccttttgtttaattatttttgctgttctggttggcgccgccgtggatcggagggatccccaagccgaaggatgagcttggctggcgcatcgaagcgcatgcaacggatgtgtgcggctttggttctgtaataggacaaccagtggtccttttttcgatctattagcggcacaaaaggagctagatgcatgctgaggttgtttcagttcactctccatgtgtgtctgtacaaacgaaacaatacagttatattgatcgttgatccctt

SEQ ID NO: 20929 - DNA, 729 bp, Zea mays; identical to SEQ ID NO: 1503
  Clone ID: LIB3245-483-D5_FLI

SEQ ID NO: 20930 - DNA, 1435 bp, Zea mays
  Clone ID: LIB3245-483-H5_FLI
cgccgccgccccctggtcctccaaaaaacggctgaaccctaaaccctccctagctcccgccgcctcgcttaaccgcgcccatggccgccgccgctcgcgccgccctcccgcggccccacctctctcttttttcgtcctcccaccgcagcccccatctgtccctcacgccctcctccgcccctcgcctgcgcagcggcgctgccacctcccctgcgctgcagcagcaccaccaggtcaccacgcgcctgggcgacgtgatcgaggcgcagcagttcgaccgggacgcgctgaacgagatcttcgaggtggcgcgggagatggaggccgtggagaggggttcccacggcgcccccagccgcgtcctcgaggggtacctcatggccacgcttttctacgagccctccacgcgcacgcgcctctccttcgaggctgctatgcggaggctcggcggggaggtcgtcaccaccgagaatgcgcgcgagttctcttccgccgccaagggggagacactcgaagataccataagaaccgttgagggttattccgatattattgtactgagacattttgaaagtggagctgcaaggaaagcagcagatactgcaaatattcctgttattaatgcaggtgatggaccagggcaacatccaacccaggctttgttggatgtgtacacaataaagagagaaattggcacactagatggaattaaacttggtttggttggtgaccttgctaatgggaggacagttcgttctctggcttacttgattgctaagtaccagaacattaagatatactttgtatctcctgatgttgttaaaatgaaggatgatatcaagaactacttaaattccaaaggtgttgaatgggaagaaagttcagatttgttggaggtggcatccaagtgtgatgttatttatcaaacacgtattcaaaaagaaagatttggtgagaggattgacctttatgaagctgctcgtggcaagtacatcgtggataaaaaggtcttagatgtgctgccaaaacatgctgtcatcatgcatccccttccaaggcttgatgagatcacagtagaagttgatagtgatccaagagctgcatattttaggcaggctaagaatggcctctacataaggatggcattgctcaaacttctgcttgttggtcactgacatttcggctagtgctttagcttgtgctgcgtcaagggattagaaggtattattcttaatataatgatcgaggctgtcttacccacgcaggtcgagtttttagaaacatgtactaataatcagcagcttgtgtcaaaattcaatgttcgctgttgcaggtaataaaagtctgcatccatgcgaatgtgcagcgatgtttggcagagtttggtgttctcatgtgctgtgagaacatggaacataattaattttgcctgcac

SEQ ID NO: 20931 - DNA, 809 bp, Zea mays
  Clone ID: LIB3245-484-B6_FLI
cggttcgcgtagagccagtccgcggatccacacgaaactgcacacgacgcaggcactcggcctgccgtgtgtccctttcggccttcataggcgcacttctccctcccgctctcgcgccgccgccctcgtgcgtttgagcgagatccatacatccccatcccattttgcacccggattggcttcttcttctactactgtacagcacttcttttgtgtggctgcaaagttctgtaattctagaggagcaagatggatattattatcatcatctcacttgtcattcttttggcactaggagctctctttgtgatcccaaagtcacaaaataaaggtaaatcaaagagaaacgacttaggagctggaacgacatctaggagctttacgacagaagagatctctaaacattccacaaggaaggactgttggatcattatcaaggacaaggtctatgatgtcactccttatgtagaggaacatccaggcggagatgccattctaaataatgctgggggtgattccacggagggcttttttgggccacagcatggcactagggtcttcgatatcatcgaggatttctgcatcggtcagttgaaggcttcatgatgatgacaggatagtttgtattgaatttattacgggacataaatttgtgagaagctacattttatctatgtttgagcattgcgaccatcgagcatatgaatgccagtataattgttccacaactgttattaggcctgccctgagctgtgatgtaggagatcgtttttttttccctctgatggggcaatgtgagctgttcgacc

SEQ ID NO: 20932 - DNA, 2123 bp, Zea mays
  Clone ID: LIB3245-484-F8_FLI
cgcgtgacatggcggacggcgcgggctcggcgtctggtctggtggagaagctcgcggagctttcaacgggcggcgccgggcagaatcctccgccggcgggtgaaggcggagaggagctgcagctctcgaagaacgcgaagaagagagaggagaagaggaagaagctggaagaggagcggaggctcaaggaggaagagaaaaagaacaaggctgctgctgctgctagtggaaagcctcagaaggcatctgctgctgacgatgatgacatggatcccactcaatactacgagaataggctcaagactcttgattcactcaaggccgcaggtgtaaacccctatccacataagtttccagttggcatctctgtagtggaatacattgagaagtacaagaccttgaacaacggggagaagcttacagatgcgacagaatgtttagctgggaggatcatgaacaagagaacatcatcatctaagctattcttttatgatctttatggtggtggcatgaaggttcaagtgatggctgatgccaggacctcagagttggatgaagctgaattctctaagtaccactcaagtgtgaagcggggtgatattgttggcatatgtggttatccaggaaaaagcaaccgtggggagcttagcgtgttcccgaagaaatttgccgtgctctctccatgtcttcatatgatgcctcgacagaaaggtgaaggaagttcggtgcctgtaccgtggactccaggaatgggtaggaatatcgaaaattatgttttgagggatcaggaaactcggtatcgtcagagatatcttgatctaatggtaaaccatgaagtgaggcatatcttcaagacacgatctaaagttgtctcatttatccggaagtttcttgatgaccgtgaatttttggaggtggagactccgatgatgaacatgattgctggtggagcagctgcaaggccttttattacacaccacaatgaattaaacatgaggctttttatgcgcattgctcctgaattatatctgaaggaattggttgtcggtggattggaccgtgtttatgaaattggaaaacaattcaggaatgaaggaattgatttaacacacaatcctgaattcacaacttgtgagttttatatggcttatgccgattataatgatttgatggagcttactgaaaccatgttgtcagggatggttaaggagctgacaggtggctataagataaaatatcatgcaaatggagttacgaactcaccaatagaaattgatttcacacctcccttcagaaggattgatatgattaaagatttggaggctatggccaatctcaatataccaaaagatctagcaagtgatgaagcgaatcgttacttgatagaagcatgtgctaaatatgatgtgaaatgtccacctccccaaacgacgtcacggttgcttgacaagttagttgggcatttcttggaggagacatgtgtgaatccaacatttatcatcaatcatccagagataatgagtccattggcaaagtggcataggtctcgacctggattgactgagaggtttgagctatttgttaacaaacatgaggtgtgcaatgcatacacagagttaaacgatcctgttgtgcagagacaacggtttgaggagcaactaaaggatcgtcaatctggtgatgatgaagctatggccttggacgaaacattctgtgctgcccttgagtatggtctaccaccaacaggtggttggggcttgggaattgatcgcctcacgatgttgcttacagattctcagaacattaaggaagttcttctatttccggctatgaagcctcaagagtagctatccgcatagccaaaagccacaaaatggcctcacagccaaaggccacaaaaggttcaaagcaaacatgatgctgcataggcgctggagggtatatcttagctcttggatctgtattgaacgatacatccttttgcccctgtgctcgggagctttccatttttttcattattttttgtaaactaccgcgtatttgctggcagcaggttattaaccagaaactgtaacgtcacagaaagttcagtttaacttcgaatggagttttttggaggttgc

SEQ ID NO: 20933 - DNA, 975 bp, Zea mays
  Clone ID: LIB3245-486-A8_FLI
tataaatcgaaatacactgaaaaatggaccggtttccgtttcccggtactcccgatcagtacaggaaacggtaaattttaccggttccagtaaataccggacgagaagttcgtccctgcatcaattagatcatttagttttgtctaaaaaaattagctttatcgtagtagctcggtagccccctctgatctgtttctagatctgccactgtgcggaaccgctgctgctcggcccgttctatcacagatccatggcggagaaggaggcggcggctatgtggggcggcggcgacaagctcattctgcgcggccttcagttccatggcttccacggtgtccttcaggaggagaagacgttgggacagatgttcgtggttgacatcgacgtctggatggacctcgccgctgccggcgagtccgactgcatcgctgacactgtcagctacaccgatatctacagcattgcaaaggatgttgtcgagggcacgccacgcaacctcttggagtcggtagctcactcgatcgcagaggccacactgctcaagttccctcagatctccgcagtccgagtgaaggttggcaagcctcacgtcgcggtgcgaggcgttctggactacctgggcgtggagataacgaggcacagaaagaaagaatgagatgctgtacacatgtggtgatggggagccagttcaatgctgatggcactgcggccataaccataatccacgcacgcttgttggcaactaggcatatccctttcacctctgaactgttggaatatcgggaatctgttcccctagttgctttattacgaattcagaatttcagatcatatctgggtagtaagatcaaccttcttctggtctgtaacatctttttttttgtccatgttgctagtcgttgctcttcataccaactcatttcttgcacaaccattgagcctcagtttattgctagtaccaacaaattcgtaacc

SEQ ID NO: 20934 - DNA, 1141 bp, Zea mays
  Clone ID: LIB3245-487-A2_FLI
ctcgtttcaggcctgacgtccgtctccaactcgactactatactaccgccgcgctctgctcctgcaccagccgggtcagctgaactgagcatcatatcatggagggaggagccgttcccaagccatcggagaagagggtggccctcgtcacgggcgggaaccggggcatggggttcgagatatgccggcagctggcgtccagcggcctcaccgtcgtcctcaccgcgcggagcgagacgcggggcgccgaggcggcccgcgagcttcacggcttcggcctgcctgacgtcgtgtcccaccagctggacgtcacggagcccaccagcgctgctcgtctggctgatttcgtcaggaccaagttcggcaagctcgatgtgttggtcaacaacgcgggaatcatgggggtgacgatggaggttggcgacgacgaggcagccgtcaaagaaatgatggtaggcaaggaccagaacgagattgcagagtggctgaagcagcggaccacgcagagcgccgagcaagcggaggaatgcgtcaggatcaactaccacggcaccaaaaccgtcacggaagcgctcctcccactcgtgcagtcgtcctcctcctcctcctccggcgggaggatcgtcaacgtcacttcatccttcggcctactcaggtttttcagcggcgaggagctccggcaggagctgagcagcgtcgacacgctgaccacgcagcgcctggacgagctgtcggcgctgttcctggaggactacaggagcggccggctggagccccgcggatggccgaccgaccgggtgtacgcggcgtaccaggtgtccaaggcgctcgtctccgcctacgccagggtcctcgccagggacaaccccgcgctgcgggtcaactgcgtgcacccgggctacgtccagacggagatgaaccgcaacaccggggacctcacggccgcggaaggcgccagggtctccgtcgccgtcgctctcgccgaccagggcggcgtcaccggcgcttacttcgatcgcactcaaatagcttcgttcgtgtaatcctcgagtgctacgcacgcgtagagaagaacacgcaccacgtttaccatgtatttctaccgcaaataatagagctctatgcttgatgcttcacattc

SEQ ID NO: 20935 - DNA, 652 bp, Zea mays
  Clone ID: LIB3245-487-D2_FLI
acggggcagacctgctccaccttcgacgctgtcacggcggtggtgttcaagtgccgcgcgctggcgatggcgctccccgacgacgccgaggtccggctcggcttcgccgccagcacgcggcacctcctccacggcgtgctgccgtcggtggacggctactacggcaattgcgtgtaccccgtgggcatcacccggaccagcaaggcgatccgtgaggcgtcgcttccggaggtggtcggcgtgatgcgggaggccaaggaggcgctcaccacgcggttcacggactggatgcgcggcggcgccaaggacgaccactacaacgtgccgctggactacggcacggtgacggtgtcggactggagccgcgtcgggttcaacgaggtggactacggcttcggcgaaccggggtacgtcttcacgctcaacgacgacgtcaacatcgtcgcgtcggtgatctacctcaaaccgcccgcgcccaagcgcggcatccggctcatgcttcgctgcgtcgaggaacctcatgctgcggcgttcgccgaggagctcgccaaattcgcgtagatggttgtttagtcttgctttatctatacttcattggtgtcggacactcggacctcatcttttacaatattatctatacttcattggtgtc

SEQ ID NO: 20936 - DNA, 692 bp, Zea mays
  Clone ID: LIB3245-487-F7_FLI
attgagggtgatacagaagggggggctgatggtgggaataaaagctccaaatatatcaatgatatcgtaataaaaccacttgaccgtcacaatcttctacgcccagagactgtggaatcactatttgttttgtatagaatcacagaggattccaagtatagggagtggggttggcagatctttcaggcttttgagaagtacacaaaagttgattctggtggttacacatcattggatgatgtcacaagcctacctccttccacgagagataaaatggaaactttctttcttggagaaacattgaagtatttgtatttactgtttgatgaaaacaataccctccccctagataagtatgtgttcaatacagaggcccatcctcttccagttatgcggtctgcagaacaggcttcacattctgtgtagtttcccaagtttatagctgttgtactatggtgagaagtacaaatctgtgacaaatatacttgacaacatagttgagaggaatgagaaattgagaatcccttgcatgactgttcttggaggcaagctcatggttctggaatctagatgcttgatttgaggatttgggggttttacttgtatttactggaaggccatacaacctttgtactctgtactgtctgtagtctttactgcctaacttcaaattttgaaatcggctagcaatt

SEQ ID NO: 20937 - DNA, 820 bp, Zea mays
  Clone ID: LIB3245-487-G1_FLI
taaaaacagacccacttcctctgatcctcttcaacccacccaccgtgggttcgtccagccttccggccttcccccccggtggtcatcacatctcccccaattcgccgccccctccgacctcgccgtactcctctcgctccgttgaagtagcctcttcatctgctcgccgcagttcgtccgttgcccatggcggatgaggaggtaactgatccaaaggcgttcctagaggaacgttcaaaggctaagtgtgtgtcgcagtggtatgaatatcagaaatgtgttaagaggattgagaatgacgagactgggcacaaacactgtaccggccagtactttgattactggaaatgtgttgacaagaatgttgcagaaaaactctttgagatgttaaaatgacaagaaaagttttccctacttcagttatccacccaaagttggtaataattgtatcacttgtgtggcctatagactattaaggcgctcaatatttgttagagaagttttgccacttgggtaacacaaattttccactgccagtttgcatttcatttctgctactagtattgaaccagcaggtttcctcctgcattgttggataaaaaatccatcgaatatttacaagattgtggctgattattaaatgctgtaatacaccttaattgcttttacggtgtattttgaggagcacatagcaaatcatttgggtcctaaacttggatgtgtcggaataacatttgtacatcacttctagctggtggaaatgattcatcatgagcagaagtttgtagtactgcactggaatgaaacattggcccagcat

SEQ ID NO: 20938 - DNA, 2628 bp, Zea mays
  Clone ID: LIB3245-489-H6_FLI
aaccgtgagtgatgatgatgttgtacttgaaactacagcaccaaggctgtacagcatcaatgatggccaattgaagctggaagaaacagctcttacaaaagccgtgcttgaaaataccaaatgtttcttacttgactgtggggctgaaatatatgtatgggttggccgggtaacacaaatggaggatagaaaatctgccactaaagcagttgaggaatttcttattaatcaaaagcgtccaaagacaacgagggtaactcaagtgattcaaggttatgagagtcatgctttcaagtccaagtttgaatcatggccagtgggtaatgctactgggagccctggcgcagaggaagggcggggaaaagttgcagctttattgaagcaacaaggtgttgatctcaaaggagctgcaaaaagcaccactccagtaaatgaggaagttcctcctttgcttgaaggcggtggaaagcttgaggtatggtgtgttgatggcaacgctaagactgctctgccaaaagaggatattggaaagttttacagtggagactgttatatcattctctatacgtatcattcgggcgacaagaaagaagaatactatctcagctactggattgggaaggatagcttggtggacgatcaagtgtcggcatctcaaataactaatacagtgtggaattcattgaaaggacggccagttctgggtcgtatatactaagggaaggagccaccacagtttgttgcacttttccagcccatgattatcttgaagggtggaattggatctggatacaagaagctcatagaagaaaagggtgcgacgggtgagacttatactactgaaggcatagctctaattcgagtatctgggacatctatccacaacaacaagactcttcaagtcgatacggtggcaacatctttaagctcaatggagtgtttcatactgcaatctggaaatgctatgtttacatggtttggcaattctagcacacatgagcaacagcagtgggcagcaaaagttgctgaatttttgaagcctggcgttgcagtgaagcactgcaaggaggggacagagagttcaggtttctggtttgctcttggaggaaaacagagttatacaaataaaaatgctcctcaggatattattactagagagcctcacttgtatgcattctcattcaagaacgggagactggaggtaactgagatcttcaacttttcccaagatgatttgttaactgaagacatgatgatacttgacacacatggtgaggttttcatttggattggtcagtgcgtggaatcaaaagagaaacagaaggcatttgatattggccagaaatacgtggagcatgcaaattctattgatgatctttctccatatgcaccactatataaagttatggaagggaatgagccatgcttcttcaagacatatttctcttgggataacacaaaatctttggttcatggaaattccttccagaagaaactctcactgctttttggattgcgttctgagggtgcatctaggagctctggtaatggtggaccaactcaaagggcatctgcattagcagctctatcatctgcattcaatccatcgtctcaacaaaggctctctaatgagaggcctaaaagcacaggcgatggacccactcaacgcgcctcagcactggctgccctatctaatgcattcaattcatccttaaaacccaaaacaccacctccatctcgctcaggtcaaggttcccaaagagcagctgccgtagctgcactatcctctgtgctgactgctgagcaatctggatcttcagaaaatctacgagccaaagctagcagcacaggagataagactgatgtcgataggcctgtcataactccagctggaccatctggtccatcttctcctcagtctgaagctggggagtccaatgtgtttcgccaggaaaaagatgctgcagtagatggggcaccatctgacactgatggagcagtggctgagacccgagaggaagaaacgacagagaatgttggtgaagcgacatttagctatgaccgcttgatatctaaatctaccgatccagtccgtgggatagattacaaacgcagagaggcatatttatctgatagtgagttccaaagtgtttttggcatgaccaaggatgcattctaccgacagccaaattggaagcaagaactacagaagcgaaaagcagatctcttctaaagagaacacgccttgtctcaagcgcctgctagaaaatgcgaccctctcgtcgtgaatggtcggtcccatgagagtaagtctcaatatattgctggttatttctgaggacgggctactggtggctttgctcggttgttttttttttgcaaccaattttataggccgattcttttatttgtacatggcctgggttgtgctgcttgcgaggtcctaagatgctcatagctttgtgttgtgactgtccatatgtgtatatcgttttttttcatcagtttgttacgtatgggcatatcctggtaggttgtcaattgtattgtcattcagatgtattgcacacgaaatacttgtgctgtctgtttgttgttgatggttggcagttgttttgtttgggattt

SEQ ID NO: 20939 - DNA, 1078 bp, Zea mays
  Clone ID: LIB3245-490-B4_FLI
ccttttcctttccgccgcggcaaaagtgaggagcgcgcgggcgagttgggggagacgaacccgtcataactccctcgcttaatcgcgtctcgtgctcctgcctcctgcgtatataaacgcggcaatcgggacgcccgggaggcgttcgttctccatcccacgcgcgcgcaggccaaggccggatcggcggcctctcagatctcgccggccgccgtgagacagagaccgaagggggggttgaccggtgctcgggaggaagatgtttagcgggacgcagcagaagtgcaaggtgtgcaccaagacggtgtacccgatggaccagctctccaccgacggcgtcgtcttccaccgctcctgcttcaagtgccagcactgcaagtctaccctctcactgagcaactattcctcgttcgaaggagtgccgtactgcaagacccatttcgagcagctgttcaaggagaccgggagttacaacaagagcttccaatcacagtcacctgcaaagattactccggaaaagttggcccctgagctgaccagatcaccaagcaaagctgcaaggatgttttcaggaacacaagacaagtgtgcgacttgtggtaaaactgcgtatcctcttgagaaggtaacagtcgaagagaagtcctaccataagtcatgcttcaaatgctcccacgggggctgcgcgattacaccttccaactatgcagccttggagggcatcctctactgcaaacaccatttctcccaacttttcaaggagaagggaagctacaaccccttgatcaagtgcgcgtccgtcaagcgcgctgctgaagcacagccagaacaaccggcctctgattcctcctcctgaccacgccatttaaacagtgggggtttggaggcgagagagttgggaagcctcctgtttctacttaaaaccgcgtgatgtatgttattccatctatgccccgaggatactagactactctatttcggtatcctctgctgtgctagctggatcatatcagcgaaccatggaattgctgtcattttcaatgaaactgttgtgcatcaagtagtgaaatcttcactg

SEQ ID NO: 20940 - DNA, 1675 bp, Zea mays
  Clone ID: LIB3245-490-C9_FLI
atttagtactcttcagtggagataacaccaaataaaggcagtatactttccaagattatttctgttactgtgaggaccattcagaaagatgctgaggaaaagaaagcttcatttaatccccgaccatacttccgattgtttataaattggctctatgaccttactactactgatggccatcatgatggttctaattttcaggttttgactgcatttgccaatgcattccacttgctacaacccttgagagttcctgcctggagctttgcttggcttgagctggtgagtcataggagcttcatgccaaaattgctgatgtccaattcacagaaaggttggccgttttttcagcggttgcttgttgctcttttcaaattcatggaaccatatctgagaaatgctgaactcccagaggcggtggaccttttatacaaaggaactatgagagttttgcttgtattactgcatgactttcctgaatttatttgtgattaccacttcagtttctgtgatgtgattccttcaagttgcattcaaatgcgcaatgtcattcttagtgcttttccacgtaacatgagactgccagacccttctactcctaatctaaagattgatttgttggctgaaatttcaatagcaccacgaatcatgtcagatgttgatggtaccctcaaatcaaagcagttgaagactgagtttgatgaatatctcaagaggccggaaggctcttcctttctaagtgtcctgaagcaaaatttgctgctgcctcagaatgaagcagctgttgctgggacacgctacaatgtgcctctgatcaattcacttgttctttatgttggcatccaagctgtgcaacaactgcaacagaacaaggctaatgcatctgcatcagtgcagcagattaaacatacgcctacgatggacagtttccagattgaaacagctaccgagatgttcacaaatctcataacaagttttgatacagagggccgctaccttctgttgaatgcaattgcaaaccaactgcgctatccaaatagccatacacactactactccttcatcattctgcatctatttgctgaggctacccagcaggagattatccaggagcaaataacaagggttcttctggagcgtctaatagtgaaccgcccccatccttgggggttacttattacttccattgaattgataaagaatccgcgttacaacttttggaaccggtcttttacacatagtgcacctgagattgagaaactgtttgagtcagtggctaggtcctgcggcgcaaaagctgtagatgaaggaatcagtgtgcaggatggcagtcactaataaagtaatttgctttgttagtgctgtttttgtgctatttcgcactgtaaattgtgtgctaccctatctgggcttgtacagaccacggaaatacatagtgcgtcacgtcagctatttgggtgcctgtgctttgcctggtagctaggaattactattgatcgccagatgctccaggtgcaaatttttccgtggactggttcacttatttgattcaactatgtcagaatggtagatggtgcgaacttcagcttagatagtgagttgagttgcaggcatgtttgtaaattatatttttgatgccattctgttttctcatagaacggaacatttcaagatc

SEQ ID NO: 20941 - DNA, 988 bp, Zea mays
  Clone ID: LIB3245-491-B12_FLI
caaagcccaacacctctcctagcctccttccgtcccgccgccactcccgtcatgggcgattccgcggcgggcgcgccggagccgagcaggttcggcaggatctgcgtcttctgcggcagcaaccccggcaatcgcgccgtctacggggacgcagcgctcgacctcggcaaagagctggtggcgaaggggatcgatttggtctacggcggcgggagcgtcgggctcatgggcctgatcgcagacggtccttggtggcggctgcagtgtcctcggagtgattccgagagcactcatgccgcttgagatatctggtgctagcgttggagaagttaaggttgtctccgacatgcacgagaggaaagctgagatggcacggcaagctgatgccttcatagctcttcctggagggtacggaacaatggaagaactgttagagatgataacgtggtcacagctcggaattcatgacaaaccagtcggtttgctgaacgttgatggctactacgacccgctgctcatgctgtttgatagaggggcaacggaaggctttatcaagctagattgcagagatataattgtttcagcgccaactgcccatgagttactgaagaagatggagcactacactcggtcgcaccaggaggtcgccccacggacgagctgggagatgtcagagctgggctatggaaaagcgtcggagtcatagcgtacccttagtgcttaccaagatgaaatcgtccctggagtacgtttttcgtctagcatctagttgttactcgactgcaggcatcggcattcaagcatcatctttagatctactcttttagctgtcactcatgttaattgttattgttacttcatctggtgaacaagagtataagaatttgtatatgttcttccacgtcaacggtgctggcaaaagcatattacaaacagtacttttgttcaccgtggttacaaataatacagtttgtacgatgaagggatt

SEQ ID NO: 20942 - DNA, 992 bp, Zea mays
  Clone ID: LIB3245-491-F1_FLI
ccgcttcgacccctgggacctgccggagcgcgccctcttcggccgccgcgagtggtacttcttcacgccgcgggaccgcaagtaccccaacggctcccgccccaaccgcgccgccgggtcgggctactggaaggccacgggcgcggacaagcccgtggagcacgggggccggacggcggggatcaagaaggcgctcgtgttctaccacggcaagccgccgcgcggggtcaagacggagtggatcatgcacgagtaccgcctcgccggcgacgcgaagaagtccggcgccggcacgctcaggctggatgactgggtgctgtgccgcctgtacaacaagaagaacgagtgggagaagatgcagcagcagaaggagaaggagaagaaggcgatggagtcggaggcgtcgctctcgctctcgcactcccactccgacacgcggacgccggagtcggagatcgacgacgacccgttcccggagctgggctctctgccggcgttcgacgacatgggcccaggcgcagccccagcccctgccggcgtcgtcctgcccaaggaggaggtggaggacttcggcgacctcggcggcgacgactggctcgcgggcatcaacctcgacgacctgcagatgccgggggacgccgccgatttctacggctccatgctcgtctcgccgatggccgccaagatggagccggacggcggcttccccttcttctgagatccttcggcgactccggggaccggatgcagcgcaacgcaaactgtgtatagttcagattttcttcatggaaccaacaacaacaaaaaagttctgctaatatcttgttctagtggtgtagtggtgtagtgcagaagtagcagcaggcatgattgaagttccattgtagtgctgatgttcatcgccacttgatctgtgacaagtgacggcattctttcgtttcttggctgcaaattcttcgttgttcagaatataatttcagatgggtaatgcc

SEQ ID NO: 20943 - DNA, 550 bp, Zea mays
  Clone ID: LIB3245-491-G2_FLI
atggcaggtacaaggactccataacgaagagcacgcgcgggtggaaggagaggtggttcgcgcagagcagcgccatgtcgaatcttggctcggagatgaggagggaggtcggtgctgggatcgccgccgtttcccgcatgatcgagaagcagctggagacacggccggatgggagtgggacagcgccgtcgcctgctaccgcttcgtatccagctcacgcccaccctggttcggatgcaagtagtcagggtcagggagctgctgttcccgctacacctgcagccgctctgaataacgctacgcctgcagctgctgctgctctgaatgacgcctcgtcgtcttcgacagcttgaacgcgcgccaggatcatgttcagtgagtttgcactaggtgtggttttcaagtgctttagatgcttgcaatgcaatgcgtcgcgtgtatagtcagtttgtcaattagcctcattggtagccagtgaaacagatagtggatgccaagctactgttcgatcagtgaatgtttcagaataaagttggatacttggatgcgc

SEQ ID NO: 20944 - DNA, 857 bp, Zea mays
  Clone ID: LIB3245-492-A11_FLI
atctctgtatggatgatgaacgtagaaagtgacccacttgacagccatactataagcaagtctgagttgcaattaattctagctggaagagctggatctaaagtccaaggcagtaataaattcccatcccttagggaattgttctcaaggactgaattcttggctgtcactttggccaatgtggtcaacaactggggctattttgtcctattgtcgtggatgcctgtgtacttcaaaacggtttataacgtcaatctgaaacaagcagcgtggttcagcgccataccttgggcagtcatggctatgtccggctatgttgcaggagcctctgcagatttcctgatcaaatctggtttccccataggactagttcggaaaattatgcagtccattggttttatggggccttgcgtggcattgctatgcttaaggtttgcccaaactccatcagttgctgcagttctcatgaccattgccctgagcttgagttctttcagccaagccggatacttttgcaatatacaggacattgctcccaaatacgctggatctttgcatgggatgacgaacggcatagggacggtggccgccatagttagtaccatcgggaccggctacttcgtccagtggctagggtccttccaggcattcctcaccctcacggctgcgctctacttcagcgccaccgtcttctacaacgtctacgcaaccggagacctgatttttgactgagacaagacatgctaatgctaggattctttcgtgtagacgcagaatcccaaagtgtaccaatatttattatttatttgtacctcccaaggatggaataaaatagaggctgattgtttgccaagctt

SEQ ID NO: 20945 - DNA, 396 bp, Zea mays
  Clone ID: LIB3245-492-C8_FLI
ttcagcagcactcagggcgccggagaggtgggcggctacgtcgtgcagtacaagggcaaggagaagggcagcctcagcctggtcaccgtcagaggagccgggcacgaggtgcccagctaccagccaaggcgagcgctcgtgcttgtccagggtttccttgcaggcaaaacgcttcctgactgcaaaacgtgcgagtcagcttagcggttggcagcactacagcaacatgtatctgagagagagagggagagaaagcgaaagggaatcaagctattagaaacacacgcaccttgcggatcatgtaactgcaggtctgcaaaaaaaagaaaaaaggcaattatacagtcatagtcacaggcagagaaatctgtacacgaaataagtaagtaggttatg

SEQ ID NO: 20946 - DNA, 1121 bp, Zea mays; identical to SEQ ID NO: 2848
  Clone ID: LIB3245-492-F2_FLI

SEQ ID NO: 20947 - DNA, 1832 bp, Zea mays; identical to SEQ ID NO: 2852
  Clone ID: LIB3245-492-F6_FLI

SEQ ID NO: 20948 - DNA, 2322 bp, Zea mays
  Clone ID: LIB3245-493-A3_FLI
tttatgccatatatttgggtcatgctggtttcgtttggtcaaacatggaccaaaataaatgactccatgtattctctctccgaaaatcacgccataaagactctcctctccgacgactgaccgttccccgactctctctccacatcagttttggtcccaaattcagcctgagagctgcagcagcgaagagccgaagaaagccagcctcgccttccccctctccccatactaatcatcatcaagggcctgcgattccaagttgcgtttcctgtctggggattcagggtggaaggagatgaaatcgccattgcgcaggttccggggcttcgcccttcatcaccaccaccaccacagggagaggaaggaccaccgcccgccgtccgccaagctcgacgagctcgtctacgccgcccaggaaatggaagatatgaggaactgttacgatagcttgctttcagctgcagccgcaacgacaaatagtgtatatgagtttgcggaagccatgggtgaaatgggaacttgcttgcttgaaaaagctgcattgaattatgatgatgatgaaagtggtaaagtgctgatgaagctagggaaggcccaatttgaactacaaaagtttgtggatgactatcgtacaaatattataaatacaatcacaaatccatcagagtcccttctgaaagagctacaagtcgtagaggaaatgaaagaccaatgtgatcaaaaaagagtggaatatgaagccatgcgagcagcctatggggagaaaggagggcgattgaggcacctaaaaaatgaatcattctcattgggacaactgcaaacttcatttcttgagtaccaagaggaggcggcattgtttatttttcgcttgaaatcactaaagcaaggtcaatttttaagtattttgacacaggctgctcgtcatcatgcttctcagttgagttttttcaggaaagggctgaagcatctagaggctttggagccttgtgtcaaagcagttgctgagaagcagcacattgattaccacttcagtggactggataataacagtgatattgatgattacagctcttaccaggataatcatagtgatggcagtgagttaagttttaactatgagataaatgacagggacaaggacctccccactttcagaagtccaatggatatggatcaagctcatccagtgagttccccaagacctctgaaggaacagcaggaaaatgctgaagaaataaaggcgactttaggagttcctcatatgaagcctgagattggtacccaatcagcaccaatttttgctgagaatgttcctgatccatctatgagattccggaaaatgaacttgttaaccagaactgttcactcctacaaactcccaacgccagctgatgacaagaaccctgcttcagtaattgccaacaaatcgcctcattcagatcaacccgagagtaaatctcacgtggcagtaaatttgtggcattcctctccactggctaaagattttatgccgaattccatgcacagtggacctgttaagatgccatcaagtaacgaaggggtatcactagcttattcctactccacgacagattttaagaaagtgaagagggaagctttttctggcccaatcccaagcaaggtaggattgagcacccccctgatttctgcgactgatcgcaaaccgtcagggaagcggccttcctatgtgttgccaacaaggcctcctggcccaggttggcagtcatctgtgcctccaaaagctacgcccagggtgacctcgctcccaacaacgactcccaggataagcgagctgcatgagctgccccggcctccagcaaatgctggtttggttggatattctggccctctggtttcaaggcggccgatgcctactgctgtatccaccacccgtgtctcacccccatcacatacggcgtcgccactcccacgaccacctgctgccatgactcgtagctactccataccttcaaacagtcaacggactcctattattaccgtgaacaaattgttggaggctaggcatagcagggagagtagcgaagtttcctcccccccagtaacacctatatcactggcagacgtttcccgcagaccaacaacagaagcagctgtttgacaagaaaaggataaaggaatccttgtgagcagttgcgcaactgaacatgttgataatcttaggaaattttgtatgtggttgactgtattctatgattccctccataatctctcgtgttccctgcgaaaggaaaaaaatgtaaataaggttccattatgttatcgccttgatatgcttgtccg

SEQ ID NO: 20949 - DNA, 1437 bp, Zea mays
  Clone ID: LIB3245-493-A7_FLI
gcggggctgaacccgcaggagaaggtgaagctggagaaggagcccatggcgctgttcatggagggcggcatccaggacctggccagggtccccatggagcagatcgacgccgccaagctcaccaaggacgacgtcgacgtccgcctcaagtggctcggcctcttccaccgccgcaagcaccagtacgggcggttcatgatgcggctgaagctgcccaacggcgtgacgacgagcgagcagacgcggtacctggcgagcgtcatcgaggcgtacggcgcggacgggtgcgcggacgtgaccacccggcagaactggcagatccgcggggtgacgctcccggacgtcccggccatcctggacggcctccgcgccgtcggcctcaccagcctgcagagcggcatggacaacgtgcgcaaccccgtcggcaacccgctcgccggcgtcgacccccacgagatcgtcgacacgcgcccatacaccaacctgctctcctcctacgtcaccaacaactcccaggggaaccccaccatcaccaacctgccgaggaaatggaacgtctgcgtcatcggctcgcacgacctgtacgagcacccgcacatcaacgacctcgcgtacatgccggccgtcaaggacggcgagttcggcttcaaccttctggtgggcgggttcatcagccccaagaggtgggccgaggcgttgccgctcgacgcctgggtcgccggggacgacgtcgtccccgtgtgcaaggccatcctcgaggcgtaccgggacctcggctccaggggcaaccggcagaagacgcgcatgatgtggctcatcgacgagctcgggatggaggtgttccggtcggaggtggagaagaggatgccgaacggggtgctggagcgcgccgcgccggaggacctcgtcgacaagcgctgggagcggcgggactacctcggcgtgcacccgcagaagcaagaaggcctgtcgtacgtgggcctgcacgtgcccgtgggccggctgcaggccgcggacatgttcgagctggcgcgcctcgccgacgagtacggcaccggcgagctccggctcacggtggagcagaacatcgtgctccccaacgtcagcaacgagaggctcgacgcgctgctggcggagccgctgctgcaggagcagcggctctcgccgcggccgtccatgctgctcaggggcctggtggcgtgcacgggcaaccagttctgcgggcaggccatcatcgagaccaaggcgcgggcgctgcaggtggcgcgggaggtggagaagcgcgtggccgtgccgcggccggtccgcatgcactggaccggatgccccaacagctgcggccaggtgcaggtggcggacatcggcttcatgggctgcctcaccaaggacagcgacggcaagatcgtcgaggccgcggacatcttcgtgggcggccgc

SEQ ID NO: 20950 - DNA, 1613 bp, Zea mays
  Clone ID: LIB3245-493-D6_FLI
ggaacaagggcctcctgtctgctctcacttcctcagtcctcgtccgtctctgctccgatccctcctctctctacctagctagctagccagccttcctgtagcgcggcagatatggctgcctccaccacggcggcggcggcggcgtcgctgctgctgctgctgctcgtgtcgctcgccgcggcggcggacatgtcgatcgtgtcctacggggagcgcagcgacgaggaggcgcggcggatgtacgcggagtggatggcggcgcacggccggacctacaacgccgtcggcgaggaggagcggcggtaccaggtgttccgggacaacctccgctacatcgacgcgcacaacgccgccgccgacgcgggcgtccactccttccgcctcggcctcaaccgcttcgccgacctcaccaacgacgagtaccgcgccacctacctcggcgccaggaccaggccgcagagggagaggaagctcggcgccaggtaccacgccgccgacaacgaggacctgccggagtccgtcgactggagggccaagggcgccgtcgccgaggtcaaggaccagggcagctgcgggagctgttgggctttctcaacaatagcagctgtggaaggcatcaaccagattgttacaggcgacttgatctccttgtctgaacaagagcttgtcgactgtgacacttcgtacaatcaggggtgcaatggaggtctgatggactatgcatttgagttcatcatcaacaatggcggaatcgacaccgagaaggattacccttacaagggcacggacggacggtgtgatgtcaacaggaaaaacgcgaaggttgtcactattgacagctacgaagatgtaccagcgaacgatgagaagagtctgcagaaggcagttgcaaaccagcctgtcagtgtcgcaattgaggctgctggcacagcatttcagctctacagctcgggtatcttcactggaagctgtggaacagcgctggaccatggtgtcacggccgtcggctacgggacagagaacggcaaggactactggatcgtgaagaactcatggggcagcagctggggcgagtccgggtacgtgaggatggagcgcaacatcaaggcgtccagcggcaagtgcggtatcgcggttgagccgtcatacccgttgaaggagggcgccaacccgccgaaccctggccccagcccgccgtccccgaccccggcgcccgccgtgtgcgacaactactactcgtgccctgacagcaccacctgctgctgcatctacgagtacggcaagtactgcttcgcctggggctgctgcccgctcgagggcgccacctgctgcgacgatcactacagctgctgcccccatgactaccccatctgcaacgtcaggcagggaacctgcctcatgggcaaggacagcccactgctttcagtgaaggctacgaagcgaaccctggccaagccgcactgggctttctccggcaacacagctgacggaatgaagagcagcgcatgagaaaacgcagcgtggcattaggtcgtcagcagcctgggtgatcgattagagcccctgcgtgggaaatggtcacctggccccctgattgacgacggaagcatggc

SEQ ID NO: 20951 - DNA, 1284 bp, Zea mays
  Clone ID: LIB3245-494-E8_FLI
accccaaaagcatcatctctcttcagcgagataccaaacatacgagtagtaacaatcatccgatgatggggtggtgcgaggtaggcatgatgaaggttctcgtcctcagcctcgtggccggcgccgtcgccgccgtgcggccgagcaagctgctgccggcggcggtgcctgcggtgtacgtgttcggggactcgacgctggacgtcggcaacaacaactatttgcccgggaaggatgtgcccagggctgacaagccctactacggcatcgacttgccgggctccggcaagcccaccggaaggttcagcaatggctacaacaccgccgacttcgtcgcccaagctctgggattcaagaagagcccccttgcttatctggagctgaaagcgcggaagatgctaatcccgagcgctgtcacgagaggagtaagctatgcatcggcaggagctgggattctggattccactaacgccggaaacaacatcccgctgtcgcagcaggtgcggctgttcgagtcgaccaaggccgagatggaggccgcggtgggccagcgcgcggtgcgcaagctgctttccgcttccttcttcctcgtcagcgccggcagcaacgacttcttcgcgttcgcgacggcaatggcggagcggaacaggacggcgacgcagggcgacgtcacggccttctacggcagcctcctctccaactactctgccaccatcaccgagctgtacaagctgggcgccaggaaggtgggcatcgtcaacgtgggcccggtcggctgcgtgcctcgcgtgcgcgtgctgaacgccaccggcgcgtgcgccgacggcctgaaccagctggccggcggcttcgacggcgcgctcaggtccgccgtggccgcgctcgccgcggaccagctgccggggctggcctactccgtggccgacagcttcgggttcacgcaggcgtcgctggccgacccgctggggctggggttcgcgagcgccgacagcgcgtgctgcgggagcgggcggctgggcgcgcagggcgactgcacgcccgcggccacgctctgcgccgaccgtgaccgctacgtcttctgggactccgtgcacccgtcgcagcgggccgccatgctgggcgcgcaggcctactatgatggcccggcccagtacacctcgcccgtcagcttcaagcagctggcccgcatgaggataggctgatttctcattttttgttgtattcttgtggcccatatagcggcaataacggtaataaagtcagtgtaacaagtgaaaaaggatt

SEQ ID NO: 20952 - DNA, 872 bp, Zea mays
  Clone ID: LIB3245-495-A6_FLI
gttttgtcccgctcgttatactcctgctagttggggccaagctggaggttgtcatcatggagatggccaaggagatacaggacaaggcgacggtcatcaagggggcgcctgtggtggagccaagtgacaggttcttctggtttaaccgccctggctgggtcctcttcctcatccacctcacgctcttccagaacgccttccagatggcgcatttcgtttggacactgctcaccccagacctgaagaaatgctaccacgagaggctgggcctgagcatcatgaaagttgcggtgggcctggctctccagttcctctgcagctacatcaccttcccgctctacgcgctcgtcacgcagatggggtcgcacatgaagaagaccatcttcgaggagcagacggccaaggcggtcatgaagtggcgcaagacggccaaggataaggtgcggcagcgggaggcggcaggcttcctcgacgtgctgacgagcgccgacaccacgccgagccagccgcgcgacgtcgccgagccggggcaactcgccggtgcacttgctccacaagtacaggggcaggtcggaggagccgcagagcgcgccggcgtcgccggggcgggagctcggggacatgtacccggtggccgaccagcatcgcctgcacaggctggaccccgagaggatgaggcccgcctcgtccaccgccgtcaacattgacatcgctgatgccgatttttcttttagcatgcggtgaccttgaacaaattctgtgtccttactcttgtatagggaagcaaaagcatagacggagaacataatgacacgttacgttagggaaagtttcgtttattcatcataaaatagaatacgtaataaactagt

SEQ ID NO: 20953 - DNA, 2055 bp, Zea mays
  Clone ID: LIB3245-495-B7_FLI
gttgtcgaacacttgcctgctcttgagctcaagctatcatcagctgcgtcttgtgcacagcaacagcttcccaaccgcgcgcaactgtaccagcgaaactaccaactgccatatggaggcccagaacgtggaggttgctgccctggtgaagaagatcgcggacctccacgccgacatcaccaagctgccgtcgctgagcccgtcccccgacgtcaacgcgctattcaccagcctcgtcatggcctgcgtcccgccgagcactgtcgacgtgaccaagctcagcccggactcccagaggatgcaggaggagctcattcgcctctgctccgacgccgagggccacctcgaggcgcactacgccgacatgctggccgccttcgacaacccgctcgaccatctcggccgcttcccatactttagcaactacatcaacctgagcaagctggaatacgacctcttggtccgctacatcccgggtctcgcgccttcccgcgtcgccttcgtcgggtcaggccccttgccgttcagctcgctcgtgctcgccgcccgccacctgcccaacacgacgttcgacaactacgaccggtgcgccgccgccaacgaccgtgcgcggaagctggtccgcgcggacaaggacctgaacgcgcgcatgtccttccacacggtggacgtagccaacctgacggatgacctcggcaagtacgacgtcgtcttccttgccgcgctcgtcggcatggcggccgaggacaaggccaaggtggtcgcgcaccttggtaggcacatggcggacggagcggctctcgtcgtgcggagcgcgcacggggctcgcgggttcctatacccgatcgtggatcccgaggacatccgtcgtggcgggtttgacgttctgacggtgtaccacccgaacgatgaggtgatcaactctgtcatcatcgcacgcaagatcgacgcccatgcaaacacggaggtttctgccctggtgcagaagataaccggcctccacgccgccatcaacaagctgccatcgctgagcccatcccccgacgtcgacgcgctgttcaccgagctcgtcatggcctgcgtcccaccgagccccgtcgacgtgaccaagctcggcacggacgcgcagaggatgcgggaggagctcatccgcctctgctccgatgccgagggccaccttgaggcgcactatgccgacatgctcgccgccttcgacaacccgcttgaccatctcggtcgcttcccttacttcaacaactacgtcaacctgagcaagttggagtacgacctcctggtccgctatgtcccgggcatcgcaccttccagaatcgccttcgtcgggtccggccccctgccgttcagctcgctcgtgctcgcctcccgccacctgccgaacgtgatgttagacaactatgaccggtgcgccgctgccaacgaccgtgcacggaagctggtccgcgcggacgagggcctgcgcaagcgaatgttcttccacaccgtcgacgtcgccaacctcacggacgagctccgcaagtacgacgtggtcttcctggccgcgctcgtcggcatggcggccgaggacaaggccaaggtggttgcgcaccttggcaggcacatggcggatggagcggctctcgtcgtgcggagcgcccacggggctcgagggttcctgtacccgatcgtcgatcctgaggacatccgtcgcggcggcttcgacgtgcttgccgtgtaccacccggacgacgaagtcattaactccgtcatcgtcgcgcgcaagatcaacgcccacgtgaaggggcttcaggatggacacgcgcatgcgcgcggtgcggtgccgatagtgagcccgccatgcaagtgctgcaagatggaggcgaacacgctccaccaaaagagggaggagatggcgacggcgtaggtgtccatctgatgcatggaacttttgaggacccgcgccatgtggtaacaataattacgaatcgctgtttcaatctctcgtgtaactgttgttgtcatgccttgtgtgtaagtttttaataatgacgtgattttcct

SEQ ID NO: 20954 - DNA, 934 bp, Zea mays
  Clone ID: LIB3245-496-C3_FLI
gcagtctaaggcacgggagagcgtggccatcagtctctcgcccaccgttggtggtgggggatacaatgctgcctccgccaacggagtgatggtgcagaagccgtccaactggaagacaaggatctgtaacaagtgggagatgactggatactgcccatttgggagcaaatgccactttgctcatggttctaccgaacttcacaagtacggagggggcctcgtggacatcgacggcagggacatcttgtccactcctgattcgaagcaagccggtggctctgctaaagctcctctagagtctgctgctgcgtccactgcgttgccccctcatgcagacgtgtaccatctcggcatccagtcgcagcgctcggccatcgccagccagaggtctggacagctgcaaaggcccatccagaaatggaagggccctgacaagatcagcaggatctatggagactggatagatgagaacgaatagaagaaggatcttctacggtgggccgaagggaagctgttacttggtatccgtccgactccacatcagctggtggaagctttacctggcttagaagatctcgttagcgctgcaaaaccagagtcaagatcatctttgcaagacctgtattggggagataaactgctggaacatagtgccgctttcttccgttgaactcagtagcattgctatgcttgtgtaatttgtgtgttggatggaggagcataatagcatatagcgagtcatggtgcaccctgtacagggtggctgagctgcatcctgaaggctggttgttcaggtgcgtccgtgactgtctgttggttcttgttttcgggctattattattgggccggatatttctagccttactctttggcccattgagcagtgcgctgtgtaccaagcagttaagcccaataaacagggtattttttcccc

SEQ ID NO: 20955 - DNA, 887 bp, Zea mays
  Clone ID: LIB3245-496-D10_FLI
cttccgtcggacttcaaaccctagcggcgatggcgtccgcggcggcgggcacaccgaagcgctgctactacgaggtcctgggcctatctcgcgactgctccccgacggacatcaagcttgctttccgccgcctcgcgctctcgctccaccccgacaagcagccccccggctccgacctcgccgccgccaccgccgccttccaggagctgtactgtgtggcgtgcaataaaaagttcaaatcggacaaacagtggaagaaccacgagcagtcgaagaagcatagggataaggtttctgaactgaggatggcctttagggaggaggagtctttgaaagaggcagaggagggggaaggtgattggaatgaagttgatgtggggtttgattttaagcctacacaggagtcagatgatgagagtgcattttcagatgctgcagaagagttagctgaagaatttgaggaaggtttggaggtgcatgataaagagaacggtgataaggatttcgatagtgcagagcaggaggttgggtcatatgatgaggcaagtgtattggaggcaatgctatcaagctgcaagaacagaaagggtggttatgtggctcctccagaggaggctttgtctggtactgctgaggatgacgatcatcatagaagttctgaagttaataatgcaaaaaggaaaggacgcaggcgacgggcagcaaagaaggagcaagatgaaagtaattatgctggcaatgagcatcatggtaaatgtgaggttcagcctgagggttcggtccatggtaatgatgttgatgatatcatggaagggccatcctcttctaatgtcaacaatggttcagtaagcaaaggagataagcagaatggtgaaaacacgaatcct

SEQ ID NO: 20956 - DNA, 1082 bp, Zea mays
  Clone ID: LIB3245-496-F10_FLI
cacaagtctagatgactatcttccaatgcgaagcactgaagtgaaaaatcggacattaactggtgatatcacaagcctcagactaatcactgcagtgaaaaccccttatttgccagatggaagatttgatctggaagcatatgattctttgataaacatgcagatagagggtggttctgaaggcgtaatagttggtggaacaacaggagagggtcacctaatgagctgggatgaacacattatgcttattgggcataccgttaactgctttggcactagaattaaagtgataggcaacacaggaagtaattctaccagagaggctgttcacgcaacagagcagggatttgctgttggcatgcatgcagctctccacatcaacccctactatgggaaggtatcaactgaaggattgatctctcattttgaggctgttctgccgatgggtccaaccatcatttacaatgtgccatccaggagtggccaggatattcctcctcaagttatcgagacactctcaggttatccaaacatggcaggagtgaaagaatgtgtcggacatgagagggtcaagtgctacaccgacaaaggtataacagtatggagcggtaacgatgatgagtgccatgattctaggtggaaatatggtgccactggagttatttctgtagcaagcaaccttgttcctggcctcatgcgtagtctcatgtatgaaggcgagaatgcattgctaaatgagaagctgttgcctctgacgaaatggttgttctgtctgccgaatcccatcgcactcaacactgctctggctcagcttggggtggcaaggcctgttttcaggttgccgtatgttcctcttcctcttgagaagaggattgagtttgtccggatagttgaagctattggacggggaaactttgtgggacagcaagaggcacgtgttctcgacgatgatgattttgttttgatcagtaggtattagtaagcgagcttgtttactttggtgaataaaataaaatagcttcatgttatgaggatttttcagtcttttgtaaagaaataaaacagctaatcctgatttggct

SEQ ID NO: 20957 - DNA, 668 bp, Zea mays
  Clone ID: LIB3245-498-A8_FLI
gagtgacaatgacagtgctgctggcgaaggctgcagccatggctcttgcacagcaccctgttgtcaatgctagctgcagggatggaaagagcttcacatacaacagtaacatcaacattgcagtggctgtggcaattgatggtggccttattacacctgttcttcaggacgctgacaagctggatatatatttgctctcgcaaaattggaaggatctagtgaagaaagcacgagcaaaacagctccaaccaaatgagtacagctctgggacttttacactgtccaacctgggtatgtttggtgtagatcggtttgatgcaatccttccacctggccagggagctattatggctgttggagcctcgaaacctacagttgtggctgataaagatggtttctttagcgtcaagagcaaaatgctggtcaatgtcactgctgatcacaggattgtatatggggctgatttggcagcattcctacaaacttttgcaaaggttattgaggatcctgagagcttaactttgtgagatctcttgaagagttatgatcttatctatatgcccataaatagtctggttgcagttggagttctgttgttgatctccagtttttgtatctttgaacattcgacatgatttatctgatctttttgtgctggtttgtatcag

SEQ ID NO: 20958 - DNA, 489 bp, Zea mays
  Clone ID: LIB3245-498-F9_FLI
ccggcagcgacgtgtcacgctcgtcggcgaccggggcggtggacctagagtccgtggcggtgcacgagatcggccacctcctggggctcggccactcctcggtgccggacgccatcatgtacccgacgatccggacggggacgaggaaggtggagctggaggccgacgacgtccaggggatacagagcctgtacgggagcaaccccaacttcaagggcgcgaccccgacttcgccggcgacgagcagccgcgagatggacagtagcgccggcgcgggatgccgaccagatagagtcttcgtcggagtagttgcggcagttggcctgctcctcctagtcctctagtgccgtagacctctagtgtttgccattttttttcggccacgtccttccttgtatcgatttgttgctcgattagctgattcttggatagattcttgtgtacataatatggttatcactattacagaataatataatatctgatacc

SEQ ID NO: 20959 - DNA, 1169 bp, Zea mays
  Clone ID: LIB3245-499-E2_FLI
ttctggccgaagtcgccgtcctggaggaggaggtcgtccggctggaggagcaggtcgtcaatttccggcaaggactgtaccgggaggccgtcatcaccacctccatggcggcgaagagcgcgtacttcccggacggttaccggagcacgccggcacggcacaagccatctgcaaaaccgcagagttcagagctgtccacctcgacgcgccaaggctccgatcaagatgccgctgattggccgccatctttgaggcgatccaccaatgcgatgcggacaccaagaaggcccggcctttccctgagccaaggcgactgtccggggaaggagaaccagtcgttcggcagtggcactaactcgtgcagagagttcggcctggcgcccttgagtaacgtgccaggatgcagggtacaggtaggcgccgagacacgcgcgggttttcagacaaccagtgcagtggaagaccacaaagctgttgagggcagcaatggcactggtcaaggcaaggcctcgacggcggcgaacgaagtctcggaggagctactggcgtgcctgctgggcatcttctcgcagaagagcgcatccagcggccaggacgaggagcagttgtcgccgccgtcggtctctggctcctgcggaagcagctcagcagacccctacggtgtcccagaattcgggtggcgggacattggccggtacaagcagtttcagtcagtcgacacgaacatttctgccggtgacgactccgctcttgaccagagactgaagtgagttttcattgatcgggcgctgctctggaagctctccttggttgacctagcgggcctctcccaccagcataataggctggcgttctggatcaacacctactactcctgcatgatgaacgtaagctgcccctaataaccgaggcatcctcttgcttctcacctcagcatccatgattgatccatagctttatacctcacgtcccttccctgtcgatgggggagactcatgttggtaggaacttcagttacagatttctgggaccatttggaactggaactcgtgagcaggagtgtaacctttctctcaaatttcgctgaaatttcatgaacttcagtaattttgtggaatttcgtaccacagtggtgcatgtgctttattattaatactttgttttggtct

SEQ ID NO: 20960 - DNA, 912 bp, Zea mays
  Clone ID: LIB3245-499-E4_FLI
ctctcaacttgctttttgttgtttgatatcctcattcttacatacctttttgatcaattgtgtattcattgtcacttatttaacaagtaaaaatggcttctactcgtttcccacaaatcggtaaaccagctcctgaatttggcggtcaagctgttgtcgacggtcaatttaagaatatcaatttgtctgattacaaaaacaaatatgttgttcttttcttctatccactcgatttcacttttgtttgtccaacagaaatcattgctttcagcgaagctgctgagcagttccgtgctatcaacaccgaattgattgcttgttcaaatgattctcacttttctcatttggcttgggtgaatcttccacgcaaacaaggtggtttgggaaaaatggaaattcctttgttggccgataaatccggaaaaattgcccgtgattacggagtctacattgaagaagaaggtattagcttccgtggattgttcattattgacggaaacggtgttttgcgtcaaatcactatcaatgatttgccagttggtcgttctgtagaagagactttgcgtttggttcaagccttccaatttactgatgaacacggtgaagtgtgcccagctaactggaaaccaggcaaaaaaacaatcaaaccatctgttgaaaacagcaaagactttttccaagacagcgcttaaattaatttttaaaataaaataattttttaaattttcgcaatatttgttttttgcaaatttgtaaaacgcaatagcttatcaaatctttgtttatgatttgttaaaagtatttcatttatttttgttaatagaacaagcattatatgatttgcgcaactttaattcaatctaaaattaaattgtttaaattgtataattaaataaacgttatttaaatttt

SEQ ID NO: 20961 - DNA, 1074 bp, Zea mays; identical to SEQ ID NO: 3101
  Clone ID: LIB3245-499-H10_FLI

SEQ ID NO: 20962 - DNA, 1075 bp, Zea mays; identical to SEQ ID NO: 20713
  Clone ID: LIB3245-499-H2_FLI

SEQ ID NO: 20963 - DNA, 708 bp, Zea mays
  Clone ID: LIB3245-499-H7_FLI
gactttgtgatcgatattgatcaccactggctcttgcagggatggaaaggccgcatcctctatgccatctcgacatgggtggcaaatgatgccccctcttacttttagctgtttttttgtgactcacttgtctacaactttaggggccagtttggtacggcgcgtgcggcgccacggcgcgcctaagctgcggcgcccgaatcggccgccacacctgcggcgggaaaactatggcgcgccgtggcggcttagtccacgcaccaaacaacccctaggtttaggtatgtcatctagatatatctagtgacaagcgtgttcttggcccagttaatagccatggttacttggactctgcagtatgcctagtgccctagtgagaattcaacatgtacctgttctttccaagggtacattcagcttctgtggaacatgagtgacacacgggggatccagaagtcagaaggcataccgaaatctgtcctttgatttaatgtggattatatagatgctcatcactcagtcatgctgttgcatggtgctaaatatgatctagatctaggtcctggtctggataatgctctccacagcatctgctgtgcgtgtgacctgtgatcagttcagtcagttgatcaggttgtaaatgacacttgttcctctgtttccggcgcttactgcgctgtttcagacttaaccatggctattatgaag

SEQ ID NO: 20964 - DNA, 1483 bp, Zea mays
  Clone ID: LIB3245-500-B3_FLI
ggagcagagagcaaggagcagcagaacgaaggcgtgctcccccggggcccccgaagcagctgccggtgctaggcaacctgctccagataggcagccggccgcaccgctacttccaggcggtcgcgcggcggtacggccccatcgtggaggtgcagctcgggcgcgtgcgcacggtcgtcgtctcctcgccggatgctgccaaggaggtcctccggaccaacgacctgcactgctgcagtcgccccaactcaccaggtccccggatgcttagctacgacttcctggacgtggccttcagcccctacagcgactactggcgcgagatgcggaagcttttcatcctggaactcctcagcatgcggcgcgtgcagtccttcgcctacgcccgggctgccgaggtcgaccgcctcgtctcctccctcgccagcacccctccgggtgccgccgtcgacctcagcgagaagctgtacgcgctctccgacggcgtcgtgggcacggtggcgttcgggaagatgtacgggtcagcgcagttcgagcggagcagctttcagcgggtgatggacgagacgctgcgggtgcttgggagcttcacgttcgaggacttcttcccggcgtccaggctcgcgcggttcgccgacgtcctcaccggagccgccggccggaggagccgcatattccgccagatcgatcgtttcttcgattcggttatcgataagcacctcgagccggagaggctgcaggccggcgtgcaggaagacatggtcgacgcactcgtgaagatgtggagggaggagcaggcggatggttatgaggctcctcatggattaacgcgtgatcatatcaagggaatcctcatgaacacatttgcaggtggcatcgacacctgtgctgtaacaatgatctggatcatggccgagctcatgaggaaccctagggtcatgcagaaagcgcaagccgaggtccgcaccttggtgggaaacaaaccaagggtggacgaagaagacgtcaagagcctcagctacctgaagatggtggtgaaagagaacttcaggatccacccaccggggaccttgttgattccacgggagaccatgaggagctgcgtcattggcggctacgacgtgctgccaggcacaaggattttcgtgaacgtttgggcaatgggaagggatcctagcatctgggatcgcccggaggagttcagtcccgagaggttcgagggaagtcatgtcgactttagaggctccagttttgagctcctcccgttcggctcaggacgaaggtcatgccctgccatcgccatgggtgtcgccaatgtggagcttgtcttggccaacctgttacattgctttgattggcagctccctgaagggatggtggaggaggacatcgatatggaagaaacagggcagcttgcttttaggaagatggtgcctctttgtcttgtgcctattaagagagtataaatgtataattgcactgg

SEQ ID NO: 20965 - DNA, 246 bp, Zea mays
  Clone ID: LIB3245-501-F4_FLI
ggaaaaagaaagggcatcttcttcaagtagtttgtagttgtagcagtattactacgtagtgtcatggcaggttgactgtatctgttacctatgttttcgcggttcatgtatttagaaggaaagagcaagttgtctgcgtgcttatgtaaagttccgattcaattcgattagattcaattggcactgtacccagttttttgtttgtttttgttctgttgtagggagggatgaattcattttccaatt

SEQ ID NO: 20966 - DNA, 1221 bp, Zea mays
  Clone ID: LIB3245-503-A10_FLI
aaatctcttcacatcgtcaatccctcttccacagtttctgaaatcagaagggaaacacaggaacgacaggcaattcgaggctggcaatctaatcgtctgccatcccgtctcatcgttctcccaaatctgagagcgttcccaggacctagggttcttgagatccagccccaggatggatccgaaccctagagctcccctcctcctcgccatcgtcgttctcgcgcttggcgtatccgtggtggccagcgccgaggacgacgcgtcgggggtctctctgggccgccgcgccggggggttcttgcacggcctgaagaaggatgcactggcggagggcgatcatggggtggcactagacgaggttggaccggggctgttcgacgcactctttgccagcctctccatgatactagtcagtgagattggagatgagacattcatcattgctgcgctgatggcgatgcggcaccccaagtcaattgtgttgtctggtgcactatctgcgctttatgtgatgacagtattgtcaactggacttggcagaatagtgcccaacttgatatcaaggaagcacactaatagtgctgctacagttttgtacttattctttggactacggctgctgtatattgcatggaaatctgacccaaagggatcccagaagaaggaaatggaagaagtagaagagaagcttgagtcgggtcaagggaaatcaaccatccgtaggttctttgcaagattctgtacaccaatctttttggaggctttcatcttaaccttcttagctgaatggggcgaccggagccaaatagcgacaatcgcgctggcaacacacaagaacgcaatcggagtcgcagtgggagcgtcactggggcacacggtgtgcacatctctcgccgtggtaggagggagcatgctggcgtccaagatctcgcagcgaactgtagcgacgatcggaggcgttctcttcctagggttttctgtttcgtcctacttctaccctccgttgtgatgaaaaggtactcgcaaccgctcccacttggatggtatggtagtcttgagttgtctcatgtcctgccgtaagaaacgttgtgacttccccgcaggctgctgatcgaaacatagatggcgtaacaacccagatcgtaacagcacgcctcgagtcgcgggcttcgtgtaatgtacagacacattcgaacattcctgacaacaatgttctctgcc

SEQ ID NO: 20967 - DNA, 1138 bp, Zea mays; identical to SEQ ID NO: 3198
  Clone ID: LIB3245-504-D6_FLI

SEQ ID NO: 20968 - DNA, 1403 bp, Zea mays
  Clone ID: LIB3245-505-A9_FLI
cgagcaagcaagtaatatggcttggtcttgtgctcgtccgatgagcatcgccctcgctgccgtcctcctgctgtgcggcggcgcgtggctgcagcaggcggcggaggcgcgcccccaccacatggacgacgacagcagcatcgacatggaccgcggcagcgacgacttcttctccatcgtggggtactcgccggaggacctgacgcagcacgaccggctcgtcaggctgttcgaggagtgggtggccaagtaccgcaaggcgtacggcagcttcgaggagaagctgcgccggttcgaggtgttcaaggacaacctgcaccacatcgacgaggccaacaggaaggaggtcaccagctactggctgggcctcaacgccttcgccgacctcacgcacgacgagttcaaggccacctacctgggcctcctgccgaagaggaccagcggtggccggttcaggtacggcggcgtgggcgacggcggcgacgaggtgcccgcgtccgtggactggcggaagaagggcgccgtgacggaggtcaagaaccaggggcagtgcggcagctgctgggccttctccacggtggcggccgtggaagggatcaaccagatcgtgacgggcaacctcacgtcgctgtcggagcagcagctggtcgactgcagcaccgacgggaacaacgggtgcagcggcggcgtcatggacaacgccttctcgttcatcgccaccggcgccgggctccgctccgaggaggcgtacccgtacctcatggaggaaggggactgcgacgacagggcccgcgacggcgaggtgctcgtcactatatccgggtacgaggacgtgccggccaacgacgagcaggcgctcgtcaaggccctcgcccaccagcccgtcagcgtcgccatcgaggcgtccgggaggcacttccagttctacagcgggggcgtgttcgatggaccgtgcgggtcggagctggaccacggcgtggcggcggtgggctacggcagcagcaaggggcaggactacatcatcgtcaagaactcgtggggcacccactggggcgagaagggctacatccgcatgaagaggggcaccggcaagccggagggcctctgcggcatcaacaagatggcatcctacccgaccaaggaccattgatggatcatggacgacggagatcatatctatcttcccttccctttcatccgactctttcgatttccatcgtttgcccccttttcctgaatgtgtgtgttttttttatatattactgtgtcaagtaatttctcgatggatcgatcgaggaagaacgacaaacatgcactcaagcacgagcgcagcaatgtcatctttctcttcatttggtgcgttgaaatgacgaatatcaaataaagtggtttattttttgtct

SEQ ID NO: 20969 - DNA, 1600 bp, Zea mays; identical to SEQ ID NO: 2597
  Clone ID: LIB3245-505-C3_FLI

SEQ ID NO: 20970 - DNA, 1649 bp, Zea mays
  Clone ID: LIB3245-505-H11_FLI
ctaagtatctgaaggcagcacaggagttgcttgatgagattgtcagtgtttggaagagtgttaaacagaaaacagataaaggcccttctgaagcaggaaagtcagatggaaaagagactgatggggggactaaaagtgagggagtatcttttgatccacaagagtctggtgccaatacagcagctgagctttcaactgctgagaaacaagagctccagaataagatggcgaaacttatgacaatgttggatgaggtggatcggaagtacaaacactattatcatcggatgcaacttgtaatgtcatcgtttgatatggttgctggttctggagctgccaagccttatactgcagttgccctccagacaatctcacggcatttccgatgtctaaaggatgctatcaatgatcaaattagtgttatcaggaagaaacttggagaggatgacgatgcatctggcaaagagggcaaactaattcgccttcgttatatcgatcagcaaataaggcaacagcgagctttccaacagtatggtatgctacagcaaaatgcttggaggccacagagggggctacctgaaaattcagtctcgattctccgggcttggctttttgaacacttccttcacccgtatccaaaagactctgaaaagctaatgttatcgagacaaactgggttaacaagaagtcagatttcaaattggttcatcaatgcccgtgtccggctgtggaagccaatgatcgaagacatgtacaaagaagagataggtgaggcagagctagactccaactcttcctctgacaatgtgcagcggaacaaggacaagccgccatcttccgaagaaaaggaggaccataagacctcaacgagccaggtttgccaaaccaggcagcttggcgaatccaaagccaacattggtggattgatgagctttagtggagcgccagcctgcggcttccacaacgatgtcaaccccgatgacagcttcatgagcctgatgctgaaggcccagagaccgggcgaaaccgatggcagcggtctcctccatgatgccgtcgctcatcactccgatgagagcgcgcggttcatggcgtaccacctgacagagtttgggaggtatgggaacaacgtctcactgactctggggttgcagcacgccgagaacacccagccaggcttccccggcgtcagagaccaagacatctacaactccacagctcctctcaacgtcacctccacatcttcagagtatgattcggcgagccaaatagatcaacaacaacggcagcggtttgaggtgtcacctctgatgcatgatttcgtggcctgaatttcagctgacgcactggaaaacgtggggaagtgacttgtcatttgtagtgccaggacgaacaatatgcctggactgaattttcaggcgtggaaatgtagctgtagttgtaattggggtacagaatggacgaggtacatagcataaatgttatgtaaatttagtgggggcaggggtgatagtggtaaagaaatcctgtaaagatggaatacattttatacgtgtaaaatacgagtatttaagggccacgctgtaaaaatagatttacctgtaactgtaacgagtgtttgtaatgagtgtaaagaactgccacatgcc

SEQ ID NO: 20971 - DNA, 2730 bp, Zea mays
  Clone ID: LIB3245-506-A7_FLI
ctgctggtgctggagcgatggagaacggcgatgtaaatgaggatgagagaaatggaaagaagatcagggtgcaaggaggcggctcaagtgggccggcatgccaggttgagggctgcggagcagatctgactgcagcaaaggattatcaccgtcggcacaaggtctgcgagatgcatgctaaggccaccaccgccgtggtcggaaacactgtccagaggttctgccagcaatgcagtagatttcaccttcttcaagaatttgatgaagggaagcgaagttgccggcgacgcttagcaggccacaataaacggaggaggaaaacccgccctgatactgcaagttgtgggactgcttcaattgaggacaaaatcagcaattatctactgttgagccttattggaatctgtgctaatttgaactctgataatgttcagcattcaaatggccaggagttgctatccactcttttgaagaacctagggtctgttgccaaatcactggagccaaaagaactatgtaaactcctggaggcataccaaagcctgcaaaatggatcaaatgctggaacctctggaacagctaatgccacagaagaggctgcagggccatctaactctaagttgcctttcgtgaatggtagtcattgtggacatgcatcatcatctgttgtgccagtacagtcgaaggctaccatagtggtaactccagagcccgcatcatgcaagcttaaggattttgatctgaatgacacttgtaatgatatggaaggctttgaggatcgacaagaaggttcacctacacctgcctttaagacagctgactctcctaattgtgcatcatggatgcagcaagattctactcaaagtccaccgcagactagtggcaactcagattcaacatcaacacaatcattgtcaagctcaaatggagacgctcagtgccgaactgataagattgtcttcaagctttttgacaaagttcccagtgatttacccccagttttgcggtcacagattcttggttggttgtcaagtagccctactgatatagagagccatattagacctgggtgtattattctaacaatatatctacggttagttgagtctgcatggcaagagctttctgagaatatgagcctgcacctggataagcttttgagtagctccactgacaacttttgggcatctggcttggtatttgtgatggttcggcgtcgcttagcttttatgctcaatggtcaaattatgttggacagacccctggcacccagttctcatcattactgcaagattttatgtgtcaaacctgttgctgcaccttattctgcaacaataaatttcagagtcaaaggatctaatctactcagtacttcctcaaggctaatttgttcatttgaaggacgttgtatattccaggaagacacagactctgtagcagaaaatgatgagtatgaggatagggccatcgaatgcctcagtttttgttgttccgttcctggtccaagaggaagaggatttatagaggttgaagatagtggttttagcaatggcttcttccccttcataattgctgagaaagacatatgctttgaggtttctgagctggagagcatatttgagtcctccagtatcgaacatgcagatgctaacgataatgccagggaacaagctctggagtttctaaatgagctgggttggcttcttcacagagcgaacagaatgtctaaagagaatgtaactgatacatctgtagctacctttagcatgtggagattcaggaatcttggtgtatttgccatggagcgggagtggtgtgctgtgatcaaaatgctattagatttcttatttattggccttgtcgatgtgggatcccgatctccagaagaggtggtgctttcagaaaatttgttgcatgctgctgtacggaggaagtctgttaacatggttagatttctgctgagatacagaccaaacaaaaactccaagggaactgcacagacatacttatttagacctgatgctctgggcccatcaatgattacccccctccatatagcagctgccactagtgatgcagaggatgtgttggatgtgctgaccgatgatcctggactgattggaattagtgcttggagcaatgcacgggacggaacaggttttaccccagaagactatgctcggcagagaggcaatgatgcttacctgaatctggtccaaaagaagattgataagcatcttggcaaaggccgtgttgtcctcggtgttccgagcagtatatgctctgtaataactgatggtgttaagcctggcgatgttagcctcgagatctgcatgccaatgtctgcatcagtgccaggttgcctcctctgcagccgtaaggcacgggtgtatccgaattctacatcgaggaccttcctttacaggccagcgatgttgactgtgatgggagttgctgtggtctgtgtctgcgtgggcatactcctccatacctttcccagggtttatgccgcgcccacattcagatgggagttgctggagcgtggacccatgtaagttttaggatgagccttagctgttgtttgtaacttgtaagttgagagttttagcgttgtggctaagatcaaaggaacatgattaccgtgtgaagaagttcatctgtgtttaacgcaagatgctgttgcggctgtaagctttatatacatcgtcgatttcaactatatttacagcc

SEQ ID NO: 20972 - DNA, 2272 bp, Zea mays
  Clone ID: LIB3245-507-A9_FLI
gcaaagcaaagcttgagaggcttttctcaaaaacgcgccgtcgccgtttcttccccctttttctttgagaaaattcgcccgcgagatctttagtttcagaccccgtgtggattagtcgctgtcacgatcgaggcggggcgccaattgcggtggccaccacctccaatccactccccgcggtggcctcgccgagctgttcttgctccgtcctccctccaactccaagatttgtttcgcacccgattcctgagcttccgcggcgcttcttgctgaaaagaaagctccgagttcttcagttctggatcgatagagaggcggttcctttgcgggctctgaggttcagctctcgctcttgatttgtctcatcgacgcatcagttgggctgcaggcttagagctggaaggaataatttgactagagaaatggggcagtgttgtagcagagctcccgccccggactctggacggggaggcaccaatggttatggctattctaaccaggcaaagccagcgcaaacaccttcgagttacaaccctcctcagcagccggccgaggtgaggtacacgccgccggcgacgaaccctccggtagtcccacctgtgcctgtgcctgtgccaccgaagcccacggcggacacgattcttggcaaacagtacgaggacgtacgctctgtctactccctcggaaaggagcttggccggggccagttcggggtgacatacctctgcacagaggttgcctctggtaagcagtacgcctgcaagtccatctccaagcgcaagcttaccagcaaggcagacagggaggacattcgaagagagatccagatcatgcagcatctgtctggacagccaaacattgttgagttccggggagcatacgaggacaagagcaatgtccatgtggtgatggagctctgcgcaggtggggagctcttcgatcgcatcattgccaaggggcactacacagagcgtgcagctgctacaatctgcagagcagttgtgaatgttgtcaacatttgccacttcatgggtgtgatgcaccgtgacctgaaaccggagaacttcttgcttgcgagcaaggaggagaatgcaatgctcaaggccactgattttgggctttccgtcttcatcgaagaaggaaagatgtacagggacatcgttggaagtgcttattatgttgcgcctgaagtccttaagcggagctatggaaaagagatagatgtttggagcgcaggtgttattttgtacattcttctcagtggtgtgcctccattttgggctgaaactgaaaaggggatatttgatgctattctgcatgaggagattgactttgaaagtcaaccttggccatcaatttctgagagtgctaaagacttggttagaaagatgttgacacgagatccaaagaaaagactgacttcagctcaagttcttcaacattcatggctcagagaaggtggaggtgcatctgataagcctatcgacagtgctgttctttctagaatgaagcagttcagagcaatggataagctgaaaaagatggccctaaaggttattgcctcaaaccttaacgaggaagagatcaaggggctaaagcaaatgttcatgaacatggacacagacaatagtggcacaatcacgtatgaagaactcaaagcaggactagccaaacttggatcaaagctgtcggaagctgaagtaaagcagttgatggaggctgctgatgttgatgggaatggatccatcgactatgttgagttcatcactgccacaatgcatagacacaagctcgaaagagacgagtatttgtttaaggcattccagtacttcgataaagataacagcggtttcatcacaagagatgagctggagtctgctttgatcgagcatgagatgggtgacacgagtacaataaaggagatcatatcagaagtggacacagacaatgatgggaggattaactatgaggagttctgcgcaatgatgagaggagggatgcagcagccaatgaggctcaagtagcctgttcccttagtagaaatggtgtaccgttagttactgttcttcactctttttcccccttcgtatttggtactcttggtagccggattaagcttacaatgggcgtcgctcttttgcattgtcaagagatgattgtgtatatctttttcttttgctcgtgtttgttgcattgtagtatcctgaacgtcccttccttttgtaagtttgtttatacacaagcacatccaatagaaagtgcaatttgtgtc

SEQ ID NO: 20973 - DNA, 904 bp, Zea mays; identical to SEQ ID NO: 922
  Clone ID: LIB3245-507-B11_FLI

SEQ ID NO: 20974 - DNA, 1786 bp, Zea mays
  Clone ID: LIB3245-507-E4_FLI
cgcacatcgtatcatggctataggttctgtggccgcggctggtggccaacaagctcttccggaagacctcgggcagccacgctttcgtcgccgacttcccggccgccgatgacgatgacgatatcgtctttggaacggaggccgacggcggcggcgggtgcagccccgacgcggacgccagccgctgcgtgaagcgggcgcggccccacgagcgcaacaagatcctaaagtacaggctgttcgcgagcacgtggaacgtgggcggcgtggcgccaccggacgggctggacctgtcggactggctggacggcggcgacgacgggccctacgacatgtacgtgctggggttccaggaggtggtgccgctgcgcgcgcgcaacgtgctgggcgccgacaagaagcgggtagggatgcggtgggtcgagctcatccgcgccgcgctgaaccggtcgcattcgcagcgcagcaggggcggcggctcaggcgacggcggcggcggcggcaagcagaaggtgcacccggtgcgggacggctgtggcggcgagctgggcagggagtaccggtgcgtggtgagcaagcagatggtgggcatcctgctcacggtgtgggtgcgctccgacctccgccgcttcgtccgccgccccagcgtctcctgcgtcggatgcggcgtcatgggctgcctcggcaacaaggtgagtatatatagtcctgtacttggttactcccgaatatggtggccgccccggcatctagctaagctaagctaagcaaacgatcgagaaacgaatggcagggtggcgtgtccgtccggttctggctgcacgacacgagcttctgcttcgtctgctgccacctcgcgtcgggcgggcgcgagggcgacgaggcgcaccgcaacgccgacgccatggagatcctttcccggacgacattcccgcgggggcacgcgctcaacttgccgttgccgcagaatattctagaccacgaccgggtgatcctgctcggggacctcaactacaggatctccctgccggaggccaagacgaggctgctggtggagcgccaggactggaagacgctgctggagaacgaccagctgcgcgccgaggtgtgccgcggcggcgcgttccagggctggagcgaggggcccatcggcttctctccgacgtacaagtaccaccccaactccgacgcctactacggctgcgccaccgccgcccgcggccggaacaagcggcgcgcgccggcatggtgcgaccgcgtcctgtggcgcggcgcgggcctcgcgcagacccgctacgaccgctgcgagtcccggctgtcggaccaccgccccgtccgcgccgtcttcgcggtggaggtggatgcgcccggggacctcaactcgctcaggagcttcttcatgtccgagaggttcgacagggaccagatgctgctccgcaaggatgacgtcaacagcgccagattcggcgacactctttgagacacgcgtgttgagagggtgaagttgtcagtccagttctccgactgcaattgtactacgcaggcaaaagtgtgatgcagagcagagtacatatatggatgtttttcatttctgagtcagtcagtgttcatacggtcgtatctactgcaggcagctaggaaggatacagagatggggttttatttgtctgtctgtttccaccctgttccctacgttctgtaactacgtgtgtactcttcttgatccagttagggcttgttcggttagctctcaatccatatggattgagtgagattgggtgggttt

SEQ ID NO: 20975 - DNA, 1143 bp, Zea mays
  Clone ID: LIB3245-507-H10_FLI
ctgccgcctcgctcgcctagggagacaacttctactagcttcctcccctaccgcctgccgcccaatcagccatggcggatcccactgagagggaccagttcacggacgacgaggaggaagaagactacctggaggacggcgagcaaggccttggaagcgaggacgaggaaggaggaggagcggggggcaagaggaagcggctgggaaataccctgggtgggatcggcaagcgtggggtgtgctacctcagccgcgtcccgccgcacatgaacccgtcgcacatccgccagatgctttccaagtacggcgaggtgctcaggatttacctcgtgcccgaaggtcaaggtcatcacaagcatactagtgttaaagcgaaggcttactcggaagggtggattgaatttgcaaagaagagtgttgccaagagagtggctaatctgcttaatggtgaacaaataggcggtaagaagagatctccattttattatgacatttggaacattaaatacctcaggaagtttaaatgggatgatctggttggtgaaatggctgagaaaactcatatcagagagcagaaattaaccttggagatagcagcagcaaagaaacaacgcgatcactacctgtccaacattgaaaaatctcgcgcgttgaaacacattcaagagctcaggaaaaagaggcagaagacagaaggagcagaagccagtaatgtcccagaaacaaaaactgcccgttcaattcctcaaaagaaaccagttgtggagacagatgccaaaactaaatccacgctttcaaaagacattttggctggcgttttcgggggttcatcatgaccacctcctatctttcggcatggattggtgcatgccaaactgaatggagtgctgcaagatcatcgagttcatattctacttcgaatttttgtagatgaagtcagttttttttttcttgggggtaagtaggaactttcagaaacattttgttctgctgacattgccccggaagattttctgggacctgaccattttgatgtgaaaggactgttgattgccagcgctgtttgaacaggaatctttgtaaaactgaaacacatgttctcttctagttgaacaaatatcacgaggaactgccattggcgtt

SEQ ID NO: 20976 - DNA, 1323 bp, Zea mays
  Clone ID: LIB3245-512-B4_FLI
cgcggagatcgagagacaagagagggaaggcggcggcttgccggcttaagccttctctccctccgtcgtcgcctcctccttacgtccgcttcttcctcctgaatggagacgtcagcgccgcccaatgcccccgctccgccggcgcagccacggaggcggttgccggacttccagcagtcagtgcggctcaagtacgtgaagctggggtaccactacctcatatcccacgggatgtacctgctgctgtcgccgctgatggcgctcgtcgccgtgcagctctccaccgtctccccgcatgacctcgccgacctgtgggagcagctccgcttcaacctcctctccgtcgtcgcctgctccacgctgctcgtcttcctctccaccgtttacttcctcacccgcccgcgccccgtgtacctgctcgacttcgcctgctacaagccggagtcggagcgcaagtgcacgcgcgagaccttcatgcactgctccaagctcaccggatccttcacggacgagaacctcgagttccagcgcaagatcctcgagcgctccggcctcggcgaggacacctaccttccccccgccgtgctccgggtgccccctaacccgtgcatggacgaggcgcgtaaggaggcgcgcgccgtcatgttcggcgccatcgaccagctgctcgagaagaccggtgtcaggcccaaggacattggcgtcctagtggtcaactgcagcttgttcaacccgacgccgtcgctgtcagccatggtggtgaaccattacaagctgagggggaatattgtgagctacaacctcggcgggatgggctgcagcgccgggcttctgtccatcgacctcgccaaggatctgctgcaggtgcaccccaactcttacgccctggtgatcagcatggagaacatcacacttaattggtactttgggaacaaccggtccatgcttgtgtcgaattgcctgttccggatgggtggcgcggccatcctgctctcgaacaggcggtctgacaggcggaggtccaagtatgagctggtgcacacggtgcgcacgcacaagggcgccgacgacaagtgctttggctgcgtgacacaggaggaagatgagattggcaagattggcgtgtcactgtccaaggacctcatggcagtggccggagacgcacttaagaccaacatcaccacgctggggccgttggtgctcccattatcagagcaacttctcttcatgggcacattgattgccaagaaggtgctcaagatgaagatcaagccatacatccctgacttcaagctggctttcgagcacttctgcatccacgct

SEQ ID NO: 20977 - DNA, 1606 bp, Zea mays
  Clone ID: LIB3245-513-H1_FLI
cagaggcttcaatgatgctgtgagtggctttccagatgatggctggtcttgtttgttgaacaccgatggtgctgaggatattacagttacaatcaactcatctccaaataaacttgttgggtctcatgtcagcgcttccccattattttctgctatggggggtggaatcatgtgcgcaaaagcatcgatgctgctgcagaatgtgccacctgctctacttgtgcgatttttgagggagcatcggtctgaatgggctgatcctggcatcgatgcttattctgtcgcctctttgagggccaacccatacactgttccaggtttaagggctggtgggtttatgggcaaccaggttatactgccccttgcacgcaccttggagcatgaagagtccttggaggttattaggcttgaaggacatggctttagccatgaggaggtgcttatgtcccgggatatgtttcttctacagctgtgcagtggcgtcgacgaggatgcacctggtgcgtgtgcacagcttgtctttgctcctattgatgaatcttttgccgacgatgcaccgttgctgccctcaggcttccgtgtgataccgcttgatgctaagacggatgtgccaacggccaccacacgcacgcttgaccttgcctctgcgctcgaggttggatcaggtggaagcggcatgcgcgcttcatgcgatggttccggcacgtgcgccacgagatcggtcctgaccatcgccttccagttctcgttcgagaaccaccttcgcgagagcgtggcggcaatggccaagcagtacgtcaggggcgtgatggcctccgtgcagagggtggccatggcgatcgctccttctcgcctcggttcgcgtatcgaactgaagcatccgccgggctctcccgaggcacttgcactagctacgtggattggcaggagctacagggcgcacactggaacggagatccgctggtcggacaccgaaggcgcggactctccactgatgctgttctggaagcacagcgacgcgatactctgctgctctctgaagccgccggctttcacgctcaagttcgccaacagcgccggcttcgacatcctggagacgacgatggtgaacatccaggacctgccgctggaggcggtcctcgacgaggagggccagaaggccctgtccgcgcagctccccgcgatcatgcagcagggcctggcgtacctccccggtggcgtgtgcaggtcgagcatggggcggcaggcgtcgtacgagcaggcagtggcgtggaaggtggtgggtgacgacggcgccccgcagtgcctggcgctcatgctcgccaactggaccttcatctgaggctcgcaacatcgctcggcagcgccagaccggatgccgccttttgccctactacgtatcattagttgcttttccgttgtgccgcctgtgttaagaatttgtgtactgtgtggatgatcgagaactgactctgtttgtgtgtgtgcgtgacaaacaactacaacagctgtatgcgtgcctggtcgtggtctcgtctccccggcttgtcgccggcgacattgatcactgttgcaggttgcagtattactatttgctagttctgct

SEQ ID NO: 20978 - DNA, 953 bp, Zea mays
  Clone ID: LIB3245-514-C3_FLI
cagcagagcagttcctttcttgctctcctccgctagtccggtaccctcgacctcggcgtcccaccgaagacgacctcacgcggagctgggaatattccttcgcctccgtgctccctttagcaccaactgtcacggccgcttccagcacgcatcattctcgtctcccgtctcgagagattgcagggggcggcgctcgaagctggaggaagcggacgggttcgcgatggggtccgagggatcctcgggtccggtcgtcgttcccagaaactttaggctgctagaagaactagaacgtggtgagaagggcattggtgatggaactgtgagctatgggatggatgatgctgatgacatatatatgcggtcctggacaggaactatcattggtcctcccaatactgttcacgagggacgaatctaccaattaaagctgttttgtgatacggattatccagataaaccaccgacagtccgattccagactcggatcaatatgacatgcgtgaaccaagaaactggattggttgaaccaagtctatttcctatgcttggcaagtgggaaagggaacatacaatggaggacatcctggccagcttaaaaagggagatgtcaactcctcagaaccgcaggctgtaccaacctcatgaaggtaacgaagatcaaagagtagagcagaaagggctgtcccttagatgtgtcgtcatgtaataatgtacatttgaattgagcagcgagatgccgagcttgagcgaaccctcttagggcatgtttaggaacaatcccctccaattcccttgctttcaaagaagccctgtaggaaccctcctgtagctcaccttaatcgcaataaagtgtcgatgactgttaaattgcctgcacggctgcacaccatgtaacagcaaccgattcgattttctgtgaaggacaacgtgttcagtgtcggctgttccac

SEQ ID NO: 20979 - DNA, 975 bp, Zea mays
  Clone ID: LIB3245-514-F6_FLI
gtacttttgggatgtgcttctggatgcagacctagaaagtgatattcttggttggcagtacatatctgggagtttgcctgatggacatgagctcagtcgtcttgataatccagaggttcagtgtcaaaagtacgatccggacggtgaatatgtaagaacttggattcctgaacttgctagaatgccaacagaatggatccatagtccatgggctgcgccaaactctatattacaagttgctggagttgagctgggctttaactacccaaagcccatagtagaacttcatatggcgcgggaatgtttagatgacgccatctccacaatgtggcaattggacacagctgcaaaacttgctgaactagatggtgaagttgttgacgacaatctgaataatatcaggaattttgatatcccaaaggtggttttgaacaagaaattatcaccaagcacttcatccatggagcacagggtgttgtctactaatggcaaggacgaaaagtcgcagcctactgaagtgaaggccctgtacaaacagattattcgagatgatatgatgaatgactcaaacatggatgacacatgctctactgctaacttgaaagtgacaaggaaaagatctagcagtgatagtgcgttcaatgttccctcatgttcatcctcattagtcatggaatcacggattcatcataatgaacctagttctgttctgtattcaggctacttccagaagacagcagacagagatggcactagtaaggttgaagataatgacagtgaagatagtggtacgagcatctctaggccatccaagaaagctgcttagcattagcgcattgaagatgttgcaaatcttcaatgagaaatatttaccgtcacatgtaatttagttggtgcgtttgtagtgatcatgcaaaagctgttctgtgaattataattagttttacacggcctatccttattccgatagaaggc

SEQ ID NO: 20980 - DNA, 1257 bp, Zea mays
  Clone ID: LIB3245-516-D4_FLI
ggaaggcctgaaaagcaaaaccgtagaagatcactacttcactagctagggttttcatccgtgacgaagtggtctatataaaaggtcagaaccgaaaccttaaccttattcggcgactatggcggcggcaccggcaggcggcggccctcgggcattgtcccagcgggagcaggacatccagatgatgctcgccgccgatgtccacctcggcaccaagaactgcgacttccaggtggagcgctacgtgtacaagcgccgcactgatggtatctacattattaaccttggaaagacctgggacaagcttcagttggccgccagggtcatcgttgccattgagaatccgcaggacattatcgtgcagtctgctaggccctatggccagagggctgtcctcaagtttgcgcagtacactggtgcccatgccattgctggcaggcacactcctggtacattcaccaaccagttgcaaacctccttcagtgagccacgccttcttatcctgactgacccgaggactgatcatcagcccattaaggagtctgcccttggaaacattcccaccatcgccttctgtgatactgattcccctatgcgctatgttgatatcggcattcccgccaataacaaggggaaacagagcattggttgtctgttctggctgctcgcccgaatggtcctccagatgcgcggtacaattcttccaggacacaagtgggacatcatggtagatcttttcttctacagagacccagaggaagcgaagcagctggaggaagaagaggctctggttgcacctgactatggcgcggttgcagaatacactgcaccaggcgctgacaactggggcggtgaatggggtgctggcgaagctgcagctccagctgctagcattccagctgctggcgcagactgggctgctgctccagctcctcctgctgacggtgtctgggacgcagctgtggctccacctccagcagcagcccccggatgggaacaaggcgcggcccccgttgcggcgtcgacccctacctgggagtaattaataaagagtaaatgagcatggtggatggtttatactagtcatcagcggagcttgttggtaggcacttgctggagtagttgcttcgaacttctttttttcgtgttagatgaggtaaaaaaacaattttgtgttattgactctgctgtgagcgagtgaaccttgcacattttcgttatctcaaatggatagatctgttctacgcttgttttgtg

SEQ ID NO: 20981 - DNA, 1354 bp, Zea mays
  Clone ID: LIB3245-517-E11_FLI
ccctcttcctaccattagcagtagccacagccagaacaccagcagacagcagcatcagcagggaggaacacgatgagcggcgccggtccggatctgcagctgccaccggggttccggttccacccgacggacgaggagctggtgatgcactacctctgccgccgctgcgccggcctgcccatcgccgtccccatcatcgccgagatcgacctctacaagttcgacccatggcagctcccaaggatggcgctgtacggcgagaaggagtggtacttcttctccccgcgggaccgcaagtacccgaacgggtccaggcccaaccgcgccgccggggctgggtactggaaggccaccggcgctgacaagcccgtgggcacgcccaagccgctggccatcaagaaggcgctcgtcttctacgccggcaaggcgcccaagggcgagaagaccaactggatcatgcacgagtaccgcctcgccgacgtcgaccgctcggcgcgcaagaagaacagcctcaggttggatgactgggtcctgtgccgcatctacaacaagaagggcggcgggctggagaaggcggcggcgccggcggccggcggcgaccacaagcctgtgttcgccacggcggcggtgagctccccgccggagcagaagccgttcgtggcggcggcgggcgggctgcccccggcgttcccggagctggcggcgtactacgaccggccgtcggactcgatgccgcggctgcacgcggactactccagctgctcggagcaggtgctgtccccggagcagctggcgtgcgaccgggaggtgcagagccagcccaagatcagcgagtgggagcggaccttcgcctccgaccccgtgaaccccgcgggctccatgctcgaccccgtcgtcggccacgccggcggcgacccgctgctgcaggacatcctcatgtactggggcaagccgttctagacgacaccgcccatcatgtcctgaggggaggtgggggtggcgaagcatcctcggctgcggttggttggttgattgatctgtcttgggcagcgcaatgcaatgcaaccgcacggtgtgggctttgactcaggcgagccgccattgttgacttgcaaggaggatataatatgaaactatagctggattacatggagaggcggcaatgagaccgtctggccccgccggaagggagacggagacggagacggatggcgcagtgcatcgggtgtggtggatcgtgcgcggcatgtgtgtgtgtggctgtacatatacatactgtacatgattggttcagtgcagggtttctgttccttcattgattagttattatactaataagtactagtaattttgt

SEQ ID NO: 20982 - DNA, 862 bp, Zea mays
  Clone ID: LIB3245-518-C12_FLI
ctcctggtgggcgtgaagagggcgatgacgttcgtgccccgccgccggaagaagacggcggcgttgccgtcgtcggcggccctgaagaccggctgggtcatgcacgagtaccgcctcgccgcgccgctgcacaagaacggctgcagcctggctcaggcgcaaggagagtgggtcgtctgccgcatcttccagaagggcggcaacaggccgaggaggaggcagcgagaagcgtcgccgccgtccgctagcagcagctgcgtcacggatgcgtcgagctcggacctggacgaggtcagcagctagctagctagctagctagctagcagaaccgaccgtacgtgccggctggccacaacatgcagtcaagaacgtacgtacgtatgtataccgccaccagctcagctcgtcgcgcgcgcagctgtgctgcctgtgcatgccgtacgtgtgcggccggcctcgatctcgaagagaggatgtgaccaagctgagttacggataagggggaaacaacccatccacacgtacttctcctccgacccaacattatttgttgttaactagttttttcttttctttatctctttcttttgcactctgtacgtgtaatgtaatgcagtgtaatttaattagtgagagaagcatgacgccctactaccggccggattattagttaacagcaaattaattactacgtacctagctactactcgcgtcatcagcttctactgtacttgaggtttcagaagccaatatgtatattgtcaaatttgtaacctgcattatatgcagaggtcgtcgtacgtgtccttaattagtgtctttgtaatatctcttcatgaagcgaggaggaaggaaggaacca

SEQ ID NO: 20983 - DNA, 906 bp, Zea mays; identical to SEQ ID NO: 1174
  Clone ID: LIB3245-520-D1_FLI

SEQ ID NO: 20984 - DNA, 968 bp, Zea mays
  Clone ID: LIB3245-520-E11_FLI
gcaggtagtccgagccagcgcagcgaaccaactattcgtttgcttttcgtcttcgtcctctctttgcccagttgtcggtcgcccgcgccgtcgtctccgctccgccggccttcctgcgaaaccctagcgaggcgagcgagagagaaactagcggccatgttcggctacaggaaggctgacccggacctcgaggccggcgggtcctcgctgctgtacccgggaatgacggagagccccgagctgcggtgggcgttcgtccgcaagatctacgtcatcctagccgtccagctcgccatgacggccgcggtctccgccttcgtcgtcaaggtgcccgccgtctccaacttcttcgtctcctccaacgccgggctcgcactctacatcttcctcatcatcctgcctttcctcgtgctgtgccctctgcgctactaccaccagaagcatccggtcaatctgctgctgctcggcctcttcaccgtcgctatcagctttgccgtcggcatgacatgcgctttcactagcggaaaaatcattttggaggctgccattcttacagcagtggtggtgatcagcttaactgcgtacactttctgggctgcaaagaggggccatgacttcaacttcctcggtcccttcctatttgctgctatcatggtgctcatggtgttttcgctaatccagatctttttcccgctgggtaagatatctgtgatgatatacggtgggttggcatcgcttatcttctgtggatacatcatctatgacacggacaatgtcatcaagcgctacacctacgatgaatacatatgggctgctgtttcactctaccttgacgtcatcaacctgttcctgtctctgctgcagctgctgagggcagccgatagctgagctcgtcaagctttcacttggatcttgttctcacatacatttgtgtatatcacaaactctgtaatggtcatggatactcc

SEQ ID NO: 20985 - DNA, 1076 bp, Zea mays
  Clone ID: LIB3245-520-F12_FLI
cacggacaccgcgccgcccgcgcagcagctactgcaccagcactacccggcggtggcgccggaccagacggagtgcacctcgggcgagccgtgcaagcgcatccgggaggcggagtgcaagcccagggtgtcgaagctgcacgtgcacgccgacccggccgacctcagcctggtggtcaaggacgggtaccagtggcgcaagtacgggcagaaggttaccaaggacaacccctgcccgcgggcctacttccgctgctccttcgccccggcctgcccagtcaagaagaaggtgcagcgcagcgccgacgaccccaccatcctggtcgccacgtacgagggcgaccacaaccacggccagcccccgccacaggcgcaggcgccgcacgacggctccagccctggcgccagcaagaagccgccgtcgccgccgaggccggtcgccgccgctccggcgccgctccaccaccagcaggtccagcagcaccagcagcagcaggcggttggcgcggtgaaatgcgagccgcccgtggccgcggcggcgtcggagctcatccggcggaacctcgcggagcagatggccatgacgctgacgcgggaccccagcttcaaggcggcgttcgtcaccgcgctgtccggccggctcttcgagatgtcgccgaccaaggactgacggaacggatcggatggattgggagattggcatcgcaggagattctggatcagattgtcttcgagcgcacgccgcaatggtcaactgcgcagcgctggcttggctgtcagagcgaaacagcggtaacagagcaagacacgaggggtctgcactctgcagttgtgcaggaggaggaacagacacaaggggaggacggcgcgcggccggacatggcgtggaacagagatcgtcgtcaccgccggcgggggtgtggtcgacgacgcgacatgcgaaacactacgtgctagctagcataggaaaaaacaacatgaaatcgtacaaccaaccaatccctcgcactgttttagttgttagctgtaggcgaaactgttcatccaattgatcaaatgaaacttattttttccct

SEQ ID NO: 20986 - DNA, 474 bp, Zea mays
  Clone ID: LIB3245-520-G8_FLI
tggcctcggcggcggccctgatctcgccggcggctgtggtgcggtcgtggctgctgctggcgtgggtgagcacggtggcgggcaacctgtcgctgctgggatcggcggcgaacctgatcgtgtgcgagcaggctcgacgggcgcagcgcaacgcctacgacctcaccttctggaaccacatcgtcttcggcgtgccctccaccctcatcgtcaccgccatcggcatccccctcatcggaagatcaacatctgatcgtagctcatatatactacactacatgcataattgtatgcctcgatcgtatatgcacgtacttcttagcttaatttgttatataattgctcctgctcctgatcgatcggacacgtattaattgtggttttggagcgaggtgtgcatgcaatgcattcagtgtacctaattcataagcagtgcgctgtctgctgctccaacaatatatctctactactatt

SEQ ID NO: 20987 - DNA, 1275 bp, Zea mays
  Clone ID: LIB3245-524-A8_FLI
cgcttcttctgattccgaatctgatagtgaagatgttgatgagctccttggcactgttgcatctgtcaatgttattgaagctactggtgttgctataagtgaacacctctcaaagatgaaacttgatgatgacagccttgcagtgaagactaactcaagttgctcagcagcagaacagcatccagttgattcagtaaaagtacataacaatgcatctgttgtgctgaccaaaaaaatatctgatttatctcttgagtggcgatcagatttatcgaaaactgatgtctggtatgccagttttggatcaaacatgtggagaccaagatttctatgctatattcaaggagggaaggctgagggtatgaatataccatgctgcggatcacgtgacacaagctcaccaaagggaaccgtgtggaagactgtacctcacaggttgcttttcggtagatcgtctaccccttgttggggaactggtggtgtggcttttctcaaccctgagataaactacaatgagaagttgtatgtctgcatgtacaaaataacgttggagcagttcaatgacatcttgtttcaggagaatcgtttagtgctggaggatggcaaagacggaaacactgtgtatcctgactctcctttgattggttcatctgaaatcaagtttatatctacaaacagagctgttcatcttgaacctattaaggatagctggtactccaatgtactttatcttgggaatgaggatgaagttccaattctaactatgacgtgccccgcatcagatattgagaggtataaatctggtgagctgcgtttagcacctccatcagagacgtatgcggccactctgataaagggactagtggaaggcaagcaaatggatgcggacggagctgccagctacatcaacgctgctgctgcaagagccttgtgaaggctgcttcagcgtgtgcttttgtacagccagtaaggagtagtaaggatacactatctgttagcgtggcgacaccaggaaaccttcattgtccgcaaatggagaacttggatccaatttgaattgggcagcatgattcgagctcgccctagcttgattactggtgaacggtgatctcccctggctggttgattctgggagaaacactagctgtgtcggggtggagcaacactagttggcggttgcaacaggtgctctcactgcactggtatcgtgcttgtctgacataccgtagtatttgcatggcatgctggtgatgttatttgtgcaattactgcatt

SEQ ID NO: 20988 - DNA, 524 bp, Zea mays
  Clone ID: LIB3245-525-C3_FLI
gtggacttccggaggcccaaccgcggctgcgtcacggtggcgccggttgccggctgcggcggttcgcaccccccggcgcggctggtgtcgctgcccgggctggcctacttcaacgaccccgccaccagcctcagggcgctggagagggtgagcgacgccgcgtgcaggaaggcgtgcctggacgactgcgcctgcgcggcggcgcagttcgtctacggcaccgacgccggcgacggcttctgctacctgcagtcggaggtgctgtcgctggagacgtcgcggccggaggtggtgcactacaactccaccatgcatctcaaggtgcgggccacgcggcgtccgtcaccgtcagccagattttagttggattggaccactcacaaggacaaggtcacacacagccacacagagcagtacaccacttctatattatcagtctgttgtcttccaattttttttgtatcagtctacagtccaaacacttgttgatccaccgatgtcaaaatgaagtccttttctttttc

SEQ ID NO: 20989 - DNA, 591 bp, Zea mays
  Clone ID: LIB3245-537-A11_FLI
ccttgtttcaacaatcgccagccctatctttggtgcagtcattggtacaaaccatcagggcacagcagctgcagcaactcgtgctacctgtgatcaaccaagtagctctggcaaacctttctccctactctcagcaacaacaatttcttccattcaaccaactgtctacattgaaccgtgctgcttatttgcagcaacaactattaccattcagccagctagctactgcctactctcagcaacaacaacttcttccatttaaccaattggccgcactgaaccccgctgcttatttgcagcagcaaatactactaccatttagccagctagctgcagcaagccgtgcttccttcttgacacagcaacagttgctgcctttctaccagcagtttgcggctaaccccgcaaccctcttacaactacaacaattgttgccctttgtccaacttgctttgacaaacccagcagcctcctaccaacaacacatcattggtggtgccctcttttagattgcttattagttgtaattcaataataaagttttttggatgatgtatgtggccaaccagaaataagaagttacatttccag

SEQ ID NO: 20990 - DNA, 1639 bp, Zea mays; identical to SEQ ID NO: 14008
  Clone ID: LIB3245-539-H7_FLI

SEQ ID NO: 20991 - DNA, 1302 bp, Zea mays
  Clone ID: LIB3245-540-C3_FLI
ggtacgcagatggccatggagggtcgtcgtcgtcgtcgtctcgttctgtggctcgtgatatccgcgcaaacaatgctagttgccgccgcggccggcgccaagcggcaggcgccggtgatgttcgtgttcggcgactcgacgctggacgtcgggaacaacaacttcctgtcgggggcggccgtccccagggccaacaagccccactacggcgtcgacttccccggcggccatcccaccggaaggttcagcaatggcgacaacacggctgacttcgtcgcgaagagcatggggttgaagagtagccctccgccgtatctgtcgcttgcacccaacggctccagccctctgctcgcgcagactgctctcaccactggtgtcagctacgcttccgcagacgctggcgtcctcgactcaaccaacgagggcaagtgcatcccgttgtcgacgcaggtgcgctacttcaacggcaccaaggcgaagatggtcgccaagaagggcgccgccgcggtgagcaagctgctggccgactccgtcatcctcatgggcatcgccaacaacgacctgttcgtgttcgctgccgccgagctgttgcggggcaggtcggccgcggagcagaagagcgacgccgccgcgttcctcaccgacctgctgtccaactactcggccgccatcacggatctgcactccatcggcgcgaggaagttcgccatcatcaacgtggggctggtggggtgcgtgccggtggtgcgggtgctggacgcggacggcgggtgcgccgaggggctcaacaagctggctgaagccttcgacgtcgcgctggggccgctcctcgccggcctcgccgacaagctgccggggctgacctactcgctggccaactccttccgcctgacgcaggacgccttcgcggacccgaaggcgtcagggtacagcgacgtggccagcgcctgctgcgggagcgggcggctgctggcggaggcggactgcctgcccaactccaccgtgtgcagcgaccacgacagccacgtgttctgggaccgctaccacccggcccagcgcgcgtgcaacctcacggcccgtgcgttctacgacgggccggccaagtacacgacgcccatcaacttcatgaagctggcccaggccagttaatggtttctgtatggctgtccacgaatacttactagccacgaatacctgtgaaaacagcaaaacaaaaaatgggcaccgttggccattatacatggaaacttgttaatttcttaggaatgtcacgtggctcgatcgaggccaagccatgtacgt

SEQ ID NO: 20992 - DNA, 1456 bp, Zea mays
  Clone ID: LIB3245-548-F4_FLI
cattcatcagggttatatttggttgtcaaaaagtactgtacttaattcacatctttcacatttttcactagcaatagcagccccaaattgctttcctgactaggaacatattctttacaggtataagcatgccaactctaaactatatgaatccttttatattctcatttttaagtacttctctgtttctgctacttttgtactgtatattttcagcttctccatcagactgatgaccccatattcagtgtgctgcaagtgatttgacatatgtggcttatccttcaggtatgtctcatgttgtgacttcattgctgattgcttttgtaatggtactgttgagttcatttctggttacaatcagcctttactgctttatattgttctactaattttggcttgcacagccaggatgattggttttctgcatcaatcaatcttttttaggacaagatatttttgtatgctacacttcccaaattgcaattaatccagaagtctaccttgttttattctattagttctcagcaacagtgaatgaatatgaatcagtcatgctgatagatgttcatctggttattccaaacaatctgacatcgcatctctttctgcaagtgagatgaagaaaacctgaaatgctatcaccatttaaaacattggcttctggaagttcaggtgattagcaggagacgttctgacattgccattggcatgtacggtagtgatggcaggagacgttcttaaacagcagctgctccttcagcttgtaatgtctgattgtattgaccgagagcatccaccttgccttatggtactaactgaatgagctggtgacgctgactcatctgcataatggcagatgcttaaccatctttaggagctcatgtcatgattccagctgcaccgtgtgcaaatgtgaaggccctgcaagcgctttccaggccgcaccaatcctgcttgcttcttgaagatacacatggtgccacctaaataaaagccgtttctggttatgtctgtccttgacatgtcaacagattagtgttgggttgcaatcatgtggtgtttaagtcttggagaaggcgagaagtcattgctgccagcattgtgatcgtcaggcacagaagtactcaaaagtgagagcctacttgttgcgagcaaatggagggcgatataggttgataatcaatttcagttatctatatacaagcagcggattttgtttagagttagcttttgagatgcatcatttctttcacatctgattctgtgtgttgtaactcggagtcccgtagaagttagaatgctaactgaccttaattttcactgaataatttgctagcgtttttcagtatgaaatccttgtcttaaattttggaatgtacctgtcatgggtatattttgtctttagatacttgtcatgtttttaatcatttattacatatttatagttttgact

SEQ ID NO: 20993 - DNA, 858 bp, Zea mays
  Clone ID: LIB3245-549-F2_FLI
cttttcttgtgcgcagccgcagccgctgcttttcgttcgtcttcatcctacgcgagggcaaaacccacaaaccctctccctcccgtactccggcctacacatccaggggcgatgacgctgggtagctccggcgccggatcgagcgtcgtcgttccccgaaacttcaggctattagaggagctcgagcgtggagagaagggcattggtgatggaacagtgagctatggaatggatgatgccgatgacatctacatgcggtcatggactggtaccatcattggccctcacaatactgtacatgagggtcgcatctaccagctgaagttgttttgtgacaaggactatccggagaagccaccatctgtcagattccactcaagaatcaacatgacatgcgttaatcacgagacaggaatggttgatccaaggaagtttggtttgctagcgaactggcagcgggactacacgatggagaacatcctcacccagctcaagaaagagatggctgcctcgcagaatcgaaagttagtgcagcctccagaagggacattcttctaacgaagtgttcacttggcccgtcatgggatccaacagtaattgaaagttttatgggctaaaaaacagcgtctacatctggtgcccctgcctggctttgtgattttttatgacttttatgttcttgtatcgtgaaccgcagtgaacaacggttgttgcaagttccagggatatctttggaagtggtaaacaaatgcgtcttatttctatgtaatattagaccccgtgcgtgtgtggtttcgaggtacagctccctatcaactgttgccgtgcattccgtcgatttgcttgacgtctttcgtc

SEQ ID NO: 20994 - DNA, 1348 bp, Zea mays; identical to SEQ ID NO: 16083
  Clone ID: LIB3245-558-A1_FLI

SEQ ID NO: 20995 - DNA, 497 bp, Zea mays
  Clone ID: LIB3245-558-F6_FLI
gtttcgcggaagagattgttcggaaggccatgaaggacaatggggataatggagcagattcattagttgaacttcttcttacttactaggaactaggcaatgacctcaaagtggataacggcttcgcttctggttgtgccccccaaactgttgatgatagtgatgatgacgacattctagaaaactgggatgatgaggatgctggtggtgggagaagcaccggggttgctaactctattgatgattctgaagacgaggatttcttaaatgagatgtcacagaaggacaagaaagttgattccttagttaaaatggggtttcctgaagacgaggctgcactggctattactagatgcgggcaggatgcatctatttctgttctggtggattccatatatgcttcacagaccgcaggagatggttactgtggcaatttgtctgactatgagggtaattccaatggagggagaaacaaaagaaggttcatggatgggaac

SEQ ID NO: 20996 - DNA, 795 bp, Zea mays
  Clone ID: LIB3245-561-H5_FLI
tccatttctctttctgctgcttgtgatttgttcatgcggtttgtaacgaggacctcacatctggagcatgagaagtttgatgcagcaaaatcgcggctaattgagcgaggagaaaaatttggggagatatctttaaaggctcgcaagacaattgcaatgcttagtcaggattttatttatgatgggtgtactatacttgtccatgggtattccagagtagtactggaagttctaaagcttgctgcatccaatcgcaagctcttccgggtactatgcacagagggcaggccagacagaactggtttaaggatgtcaaatgaacttgcagcattagggatccctgttaaggttctaattgattcagctgttgcttattccattgatgaagttgacatggtttttgttggcgctgatggggttgttgagagcggaggaataatcaatatgatgggcacttatcagatagctcttgtggctcatactatggacaaacctgtttatgtggcagctgaaagctacaagtttgctcggctatatcccttggatcaaaaggacatgacgccagctcaccgaccaatagattttggagtcccaatacccattggtgtggaagtggagacatctgcaagagactacacacctccccaatatctcacactcctcctgaccgaccttggtgttctgacgccgtctgttgttagtgatgagctcatccaactgtatctatgatctttgcggcaggcgccgttgtttcattggcatgtaacatctacagttgagtccagggtttgccct

SEQ ID NO: 20997 - DNA, 744 bp, Zea mays
  Clone ID: LIB3245-563-D5_FLI
gcggccgcggcgccgagggggacaggtcccacagagaaaggccgtgcttgtcccggagggtgaccgtgcaggagcagatatcctcgtcattcatggactcgccgccgccgccgcacctcgatgcccccttattcggcgccgatctcatcccctccggccgcctccgccggatgcgcgggtggcgccactcccccggaggactcgaggaagagataaggatgtttcagacaagagtgttactgggaggaatgaacatgtatgatcgctaccaggattggcgccttgacgttgataacatgacatacgaggagttgctcgagcttggagacaaaattggatatgtcaacacagggttacgtgacgacgagattactcgcaaccttaggaagttcaagcacccatccttcagttccttacggttcgcaacagaaatggaaagaaaatgcagcatttgccaagaagaatttgaaacaaatgaagagatgggaaggctagactgtggccatagctaccatgtgtactgcatcaagcagtggctctcgcagaagaacatttgcccagtttgcaagactgccgtcagcaagaattgaaatccaaacttcagtcacgctgtctgtagatctgggtgaaaacagcaaattctgttgtcctgtacagcccgttatatatattattattgtatgaacacaatccattcgtttcatcttgcagaaagaaaatgccatgttttggtcatgttccatc

SEQ ID NO: 20998 - DNA, 836 bp, Zea mays
  Clone ID: LIB3245-566-E11_FLI
cccaatcgatcggcgctagccgctagcacgcctataaaatgccacttcattgaagtagatccatgcagcgccgagccatagccacagcccaccgcgcgagcaacgatgttcaggtgccccagcaatggctacggccaaccgcaccccaccgcgaactaccaccgcacccactccggcgaacacgtcaccaccaaggtcgcccagaaaccctgccatgccggcggcgccgtgcagcagcaccacgttgtccacaaggagtcgtcgttcaaggagctggacgggggtaaccgccgctgcttcgacaactatcccatgaacgctgctaacaacgcgaaccaccaccgctacgaggcctacgaggaaacctacgaggaaaccaactgcgaggaggagacgtacgcgtacggcgccggccgccaccatggtcacggcagcggcggcggcgggcgccgcttccagtaccagacccacgaggagacctacgaggaggaggaagaggaggtcgtcgtgggcgggggcgacggcgccggcgccggctgggcccagctcaggcgcccatcctgccgcgcatgagcagcaggcacctgctcgtacgtggaatgtgcggatgcgatgcgagtccggattggtggacgccacgcgttggttcatgggtacaattgcaaattctaataataacctgcaggtgacaacctagctaatctcgtacgtaaataaattgtactcctagtcccaatccccattaatccatcgatgctctgcatccaccgtatgtattccatgtatggctgtgagttgtgacacaagtaaaaccaaattgacaaaaaaagatcatg

SEQ ID NO: 20999 - DNA, 1311 bp, Zea mays
  Clone ID: LIB3245-568-G5_FLI
cgcctcctccctcctgctgtcactggtcctcgagctcgccgtcgcgctcgtctcagtgtcggcgcagcacaagttcgggatcaactacgggcagatcgcgaacgacctcccggacccggcgcaggtggcgacgctcctgcagtcgatgggcgtgaacaaggtgaagctgtacgacgcggacccccgggtgctgacggcgttcgccaacacgggcgtcggcttcaccatcgccgtgggcaacgaggacctgcaggcgatggcggccagcccggacgcggcgcgccgttgggtggcggcgaacgtgcagccctacgtcccggccacgcgcatcacctgcgtcaccgtcggcaacgaggtcctgtcgggcaacgacacggcggcgatggccagcctgctcccggccatgagggccgtgcacgccgcgctcggcgacgcgggcctcggccagccggtcgccgtctcgtcggcgcactccgtggacgtgctcgccaccagcttcccgccgtcgtcgggcgcgttccgggaggacctggcggggtacgtgcgccccatcctcgacttccacgcgcagacggggtcgccgttcctcgtcaacgcgtaccccttcttctcgtacaaggcgagcccggggccggggccggggggcgtgtcgctgccgtacgcgctgttccagcccaacccgggcgtgcgcgacccgggcaccggcctcacctacgacaacatgctgtacgcgcagatcgacgccgtgtacgccgccatgcaggccgcgggggggcgcgcggacgtgggcgtcacggtctcggagaccgggtggccgtccaggggcgacgacgacgagcccggcgccacggcgcagaacgccgcggcgtacaacggcaacctcatgcggagggtcgccgcgggccagggcacgccgctcaggcccgccgtgcccgtcgacgtgtacgtgttcgcgctcttcaacgaggacttgaagcccgggcccacgtcggagcggaactacggcctgctctaccccgacggctcgccggtgtacgcgctcgacgccggcggtccgggcccgggcggctcgctcaacccgtactacacgtccatgttctcctcctcctcctcgtccggatcggcggtgggcgtaacctttttgacggagaaagtggtactatcactgctgctgcaagcaattgtaatactccgacgatcacattcgtactgttagactgttagtcagtgccatatactcttgtaatcttgtatacgaaaaatatgcatttcaattcaaccatagggtaggcctagattcgggaattttgc

SEQ ID NO: 21000 - DNA, 913 bp, Zea mays
  Clone ID: LIB3245-571-F5_FLI
cgcaccgcctccccgtgtcccctccttctcgcccggcaccgtcgagctcggctgtggaaacagaacaaacccatcaaccatggcgaactcggcgtcggggatggccgtgagcgacgagtgcaagctcaagttccaggagctcaagtcgaagcgaagcttccggttcatcacgttcaagatcaacgagcagacgcagcaggtggtggtggacaggctggggcagccgggcgacacctacgacgacttcaccggctccatgcccgagagcgagtgccgctacgccgtcttcgacttcgacttcaccaccgacgagaactgccagaagagcaagatcttgttcatctcctggtccccggacacctcgagggtcaggagcaagatgctgtacgcgagctccaaggaccggttcaagagggagctggagggcatccagctggagctgcaggccaccgaccccagcgagatgagcatggacattgtcagggcgcgagctctctgaagaggaagacgcgcatccgctcgcgcgatcgccatgcatgccccggaacgacagaagctgtttgtcttgcatcgaccggcggcctctgcatgtacccgtgtgccgttttttgcaccgccggtgccagtgttctcttactccatgtaaactactctagacagtgctcggtgagtacagctgctcggtgagtacggtgtcacagtcactccgtgtaggcagtgccatttcgaagacaatattgcaaaatttaactaacttggttttacaatgcgtttggttggaagtattcctccgggtcactaataattcatgctttgtatatacatgacgtggtcgtggtctatggaatatagcttaaaccattactagtataatacgttgtaacaacacatcaatcatatttgatttatatct

SEQ ID NO: 21001 - DNA, 974 bp, Zea mays
  Clone ID: LIB3245-572-A10_FLI
cgggattgtgggcgagtgcgtgcgttcgtgcagccacagacaggcgtccgggcaccatgtctttcaccggcacgcaggacaagtgcacggcgtgcgacaagaccgtccacttcatcgacctcctcacggccgacggcgccatctaccataagacatgcttcaagtgcagccactgcaaaggggtcctctcgatgtgcagctactcctccatggacggtgtgctgtactgcaagacccacttcgagcagctcttcaaggagaccgggagcttctccaagaacttcacgccaggtggcaagtcatcagacaagggtgaactgacaagggccccaagcaagctgtcgtctgcattttctggtacccaggataagtgcgcagcatgccagaaaacagtgtacccgctggagaagttaactctggaaggcgagtcctaccacaagagctgcttcaagtgctcgcacggcggctgcatcctgaccacctcctcttatgccgcgctcaacggcgtcttgtactgcaagatccacttcgcgcagctgttcatggagaaggggagctacaaccacatgaacaagaagagcccgtcccaggaggttctgccggacgtggctgacgaggagcaaccgccggaaccagcgccaccgcaagatgagaaagaagaggacaactaggatcggagcgaccaacaaccacccatgcatatatatcacgcagactgaagtctacacgtttgccatatttctttacgacgacgacgcttctttattccctcctcccttttttttcctcttaatctctctgtgaacccggtttatcatcacgctgcaatcaagtgtgccagatgccttcgttacgtctgaggctcacgacaatggaaaatctgacatggacctgtcttagcctcgcggaaaaaaattgtaactttgtaagcagagccacttctttgaatatatgatcctaacaacgctgccctt

SEQ ID NO: 21002 - DNA, 1056 bp, Zea mays
  Clone ID: LIB3245-572-B10_FLI
cgagacccgtccttgaggggcacgtcctagatcggtggcgcctgcctctcgccgccgatacggtgcctctcgcggtctcgctccccctcgcaggtcttttggtttttttagttcctccctttgcttcttggaggtgtttgttgccgtctcacccgcagttcttgagacatgcagagccagatagtgtgccacgggtgcaggacccttctgttctacccaagaggtgctccgagcgtgtgttgtgcggtatgccatgtggtcaccaatgtgccgcctccagcaatggagatggctcgacttatatgtggtggctgccagacattattgatgtatgctcgcagtgcaacaactgtaagatgctcatgttgtgacacagtcaatcttgtcagaccagtgagtagcatagctcatgtgaactgtggccagtgccaaacagtgttgatgtatccatacggagcaccgtctgtcaaatgtgctgtttgcaacttcattacaaatgttggcggggtgactcccatgatacctttgccaccaccagcactacctgcatcaagtggaacttcatatatcatcccgtcaatttccgtgccgacgaatcaaccgcggaatgtaactgttgtcgttgaaaacccaatgacagtagatgacaagggaaaattggtgagcaatgttgtagtaggggttacgagcggcgggaaaaagtgacggcatatcacaaccgtgtgtagctttgtccaaactatctaaaaagggtttaagaatacataccttgtatcatactgctgtttggcgatcggctgctcgacggaggaatccccctccctggagagcgtagtggcaaagcagcgaggctttcgccactgcgaacgagccaaaaaaaaacgaagtgcgggtgtgcatactcagagtatatctgtagcttgttaccccttgattcttttgtatgtaatatgggctctgcctgactttcactgtgtgatcaaatttccaagcccgtgggcgctgttgctgcgtgccttgttattagtgaataacaaacattgcaaatggctcttg

SEQ ID NO: 21003 - DNA, 713 bp, Zea mays
  Clone ID: LIB3245-572-C10_FLI
cgcggtccgtgcaccggcagcgctaccgcatgggggtcggctacaaggtcgcgcccgacggcacgaccacggagaagtactgggagcccgtggaggaggacggcgagcagcaggcaggaagggcaggcaggacgaggaagccgtaccgcgtcgagctcgtcggcatcatctgcgacgcctacctcgccgtcgtcaggggcatcaggcgagctatcatatccgggagagccgtgcgggtgaactcgcagctcaagtcgcacaagcgcttcgccggcgcgttccgcaagtactgcgacctcgtggacaacgccaggctctacagcaccaataccatcgccggcgcaaagctgatcgggtggaaggacaaggacagccggctactggtggacgtggacgagatcgggctgctggaccgggtgagccggatcaatgatgacgccaactgcgtgcacgagctgtacccggacgggcaccccacgggcggcgccggctctgtgtgggatgagctgatggcgtcgcccgtgagggcttccatacagcgggagctcaaggaggccatcttggacagcgaggcgtgcttcccctccccgtagtagccacacgccgagacctgatttcctggactactagttgtgtaattaagctagttatataatctcttttggatctacccaagttttgaaccggaataagctagctaagagttatatact

SEQ ID NO: 21004 - DNA, 980 bp, Zea mays
  Clone ID: LIB3245-573-A8_FLI
gaaaaaggagacgaccgcgccggcgccgcccattaatttctccccttctatccgcgatcacctctcctcgctgccgcggcatcttcttctgggtcctggcccgtcctcgtcgcaccattccatggccgattcagccgcgctctccacctccctcccccgctctctggcgtccaggaggcccctctcgtcgcctctccacgccagaacccgggcccgctcccagcgccgctgccggctcggatcgcgctcgctccaccggttgcgtgctcgggcgggaaaggacgacccggaggacctctacgggccctacccctgggaccagcccttggatctcaccgctgggttcgacattcaatgggtgcctgaagacagagtcacgctattcacttctgatgggctgatccagattgggggttccttggttcctcgtcgagttgctgcttctgagaagaggcaacggaaactgaagagtggacaaaagttgcgccggtttcaggagagctcttacatggatccaaatcaaagtctttgccttggagcactatttaacatagcagcaacaaatggcctagacatgggcagaagattatgcatctttggcttttgccgttctattgaaatgttaagcgatgtagtggaagatacggtattggagcatggcggtgaggttgtcactgcagagaaggcaagcaataacggcctccaggagaagctaaccatgtctgtcgcagtaccattgctgtggggcgttcctccagcatcagagaccctccatgtcgcggtgcggagcggtggaggtattgtcgataagatctattggcagtgggacttattctagatgtccagcgttaacaaaattggttccaagatgtatatgtctctctaattttctgcacgcgttgtgcagcaactgtaaacttagtctctacctgtacagacccggtcacccttgtgcatatatataaaagaactttgggatc

SEQ ID NO: 21005 - DNA, 1707 bp, Zea mays
  Clone ID: LIB3245-573-D6_FLI
caggaagaactcgtggatggacgggatgccaggcacgcagtgccccatcgcgcccaacaccaacttcacgtacaagtggcagcccaaggaccagatcggcagcttcttctacttcccgtccatcggcatgcagcgggcggcgggcgggtacggcgccatcagcgtggtgagccgcctcctcatcccggtccccttcgaccagccgccgccggagagcgaccacgcggtgctcatcggcgactggtacaccaaggaccacgaggtgctggcgcgccagctcgacgccggcaagagcgtgggccgccccgcgggcgtgctcatcaacggcaagggaggcaaggacctggaggccgccgcgcccatgctcaccttcgaggcgggcaagacgtaccgcctccgcgtgtgcaacaccgggatcaaggcgtcgctcaacttccgcatccagggccacgacatgaagctcgtggagctggagggctcacataccctgcaggacgtgtacgactcgctggacgtgcacgtcggccactgcctctccgtgctggtcgacgccgaccaggcgcccggcgactactacatggtggcctccacgcggttcatccacgacgccaagtccgcctccgccgtcatccgctacgccggctccagcggcgccccgccggcgcccaacatgaccgagccaccggccggctgggcctggtccatcaaccaggccaggtcgttccgctggaacctgacggccagcgccgcgcgccccaacccgcagggctcctaccactacggccagatcaacatcacccgcaccatcaaggtcatggtctcccgcggccacatcgacggcaagctccgctacggcttcaacggcatctcccacagggacaccgagacccccctcaagctcgccgagtacttcaacgtcaccgacggggtgttcagctacaaccagatgggcgacgtgccccccgccgttaacgggccactccatgtcatccccaacgtcatcaccgccgagttccggaccttcatcgagatcgtcttcgagaaccccgagaagagcatagactccctccacctcgacggctacgccttcttcggcgtcgggatggggcctgggacgtggtcgccggagatgaggaagacgtacaacctactggacacggtgagccggcacacgatccaggtgtacccgcggtcatggacggcgatcatgctgacattcgacaacgcgggcatgtggagcgtccggtccaacgtctgggagcggtactacctcggggagcagttctacatcagcgtcatctcgccggcgcggtcgctgcgcgacgagtacaacatgcccgacaacgccctccgctgcggcaaggtcgtggggctgccgctgccgccatcctacgcccccgcgcgctaaagacgacgaaggcgccgttttcacctcgtgttctgaccatccagtctaactaatccattcctgtgctgctcggcgaaataaaatcatcaaaaagaacaaagacgaaggaagcctagggaagggagaagggacgttgggtgggggtgagccaaatgagaacgcacggatatatctattgatgtaatcttgagatgccctctcaaatcactgtaatggggtttaaaaaacaatcattgtaatgggagttatatatacttttatcttaacatttatttacaccagcaagtcctggtgtatgc

SEQ ID NO: 21006 - DNA, 630 bp, Zea mays
  Clone ID: LIB3245-574-D3_FLI
ggactcgctgtcgtcgtcgcccacagcgcccgacgtcgagctgccgcacgccaacttcaccgtggaccgcctcatccagatgttcggcgccaaggggttcacggtgcaggagctggtggcgctgtccggcgcccacacgctgggcttctcccactgcaaggagttcgccgaccgcctctacaacttccgcagccagggcgggaagccggagccgttcgaccccagcatgaacccgtcctacgccagggggctgcaggacgtgtgcaaggactacctcaaggaccccaccatcgccgcgttcaacgacatcatgactcccggcaagttcgacaacatgtacttcgtcaacctggagcgcggcctcggactgctcagcaccgacgaggagctgtggacggacccccgcaccaagcccctggtgcagctctacgcgtccaaccccactgccttcttcaccgacttcggccgcgccatggagaagctcagcttgttcggcgtcaagaccggcgccgacggcgaggtcaggcggcgttgcgacgcgtacaacagcggccccgacgttggcggcgccatgcctatggctatgcccatgcccaagatgtgacgctgcgcgcgctataagtacaacga

SEQ ID NO: 21007 - DNA, 1111 bp, Zea mays
  Clone ID: LIB3245-582-E2_FLI
cggatgggaatccatggtcatcctctggagatccaggctctgttctattctgctttacgctgtgcccgagaaatgattggggtaaccgatggatccaagaacttgatccgtgctattaacaacaggctcagtgctctgtcatttcacatcagggagtattattgggttgatatgaagaagataaatgagatttatcgctataagactgaggagtattcccatgatgctattaacaaattcaacatctacccagagcaaattccatcttggcttgcagactggattcctgtgaaaggcggttaccttataggcaatctgcagccagctcacatggatttcaggtttttctccctagggaatctgtgggcgattgtctcatctcttgctactcaaaggcaagcagagggtattctgaaccttattgaagccaaatgggatgacatagtagccaacatgcctcttaaaatatgttaccctgcactagagtatgaggaatggcgtatcatcactggcagtgatcccaaaaacacgccctggtcgtatcataatggtggatcttggcctacattgttatggcagttcaccttggcttgtatcaagatgggtaggcgtgacttggcacggagggcagttgaggtggcagaaaagaggctctcagatgacaagtggccagagtattatgacaccaggacaggaaggttcattgggaagcaatcacggctatatcaaacttggagcattgctggatatcttagctctaagatgttattggactgtccggagatggcatccatactagtatgcgatgaagacttcgagctgctggaaggttgtgcttgcagcttgaataagaatgctcgcaccaaatgctcacgtcgtgcggccaagtcgcaggttcttgtgtagttccatgcctgttcttgacccaaaagctgcaacgctccttcaacttgttgtaattgttcgtcacagaagctggcactagttactagttacttaagcagaatgatcacaaaccacctatgccgatttttttggcgagttcgtggttgatccatttatacaggagtatatgttgttgtctgtacattttatctaatggattttatgt

SEQ ID NO: 21008 - DNA, 1006 bp, Zea mays
  Clone ID: LIB3245-584-C1_FLI
ccgcccgcccgcccctcccctctctctgtctcgccgcccggggagaaggagggctccgccgctcccggggaagagcgcgccattgccgccgccgcgctgactggggaagatggttgtccaggagttcacagttgatctcaacaagccccttgttttccaggttggccatcttgaggaacggtaccaggaatgggttcaccaaccgatcgtcagcaaggagggtccacgctttttcggaaatgatgtcctggagttcttgactcgcacgaagtggtgggctgtgccaactatatggctgcctgttgtctgctgcctgctcgtgaaatctattctgatgggtcataccgttcaggacgtagctatgatggctctgtttgggatatttatttggacgctgatcgaatacactttgcaccgcttcctgttccacatcgagaccaagacctactggtggaacaccgcacattaccttcttcacgggtgccaccataagcaccccatggactcgctcaggcttgtgtttcctcctactgcaacagcaattttgtgtttcccgttctggaacctggtcgcgttcttcgcaactccgtctaccacacccgcactgttcggaggcggtctgttgggatatgtgatgtatgattgcactcactactacctgcaccatgggcaaccatccaaagacccagcaaaacatctcaagaggtatcacctcaaccatcacttcagaatccaggacaagggcttcggcatcacctcatcgctttgggacgctgtctttgggacattgcctccatccatgacgtctgggaagaagaactgacgcacgtaactcaattcttggcatgagagattctaggggacctgtaatatatattcaagctagggataatcctggatctgtcttcgtgcgatgggttgacatgttcattcagttctcaaagttcttgtagtgtactgattgtctgttgatctattctgaatgtgatgatagtacttcgctgcc

SEQ ID NO: 21009 - DNA, 748 bp, Zea mays
  Clone ID: LIB3245-584-C9_FLI
cccgacgagaccgtgagcacggcgaaccaccgggaccggatcctgaggctggtgaagggcctgtcgcccaaggtgctcacgctggtggagcaggagtccaacaccaacacggcccccttcgcgcagcggttcgcagagacgctggactactacacggccatcttcgagtccatcgacctggcgctgccgagggacgacagggagcggatcaacatcgagcagcactgcctggcccgggagatcgtgaacctggtggcctgcgagggcgaggagcgggtggagcggcacgaggtgttcggcaagtggaaggcgcggctgatgatggccggcttcagcccgtccccgctcagcgcgctggtgaacgccaccatcaagacgctgctgcagagctactcgccggactacaagctcgccgagagggacggcgtgctctacctcggctggaagaacaggcccctgatcgtctcatcggcatggcactagtgttgacttcagagaatgttgacctgatggagaatgtttcttgtaaccttcgaagtacctcttagtggtttagatatgtttggctggtcactggaactatctataggaagcctatggtgatagatactgagttgtagtagaacacatatagcctaaatgcctaatgctgtgatggcagtcactaccagcctagcctagaacaggttgatgatgtgtagtagtaagtttgggtatatgtttcagttaatcagttttgcttgggtgc

SEQ ID NO: 21010 - DNA, 1163 bp, Zea mays
  Clone ID: LIB3245-584-D10_FLI
ccagacagacccctttcccctccctcctcggcctcctcgaccactccgacgcccacagcgcctccggcgagctccacctctccaccggcggcagcgaggggcgagggggctgatactgtaggcggaggaggagccgagccgagccgatggggcagcagtcgctgatctacgcgttcgtggcgcggggcaccgtggtgctggccgagtacaccgagttcaccggcaacttcaccaccatcgccgcccagtgcctgcagaagctccccgccagcaacaacaagttcacctacaactgcgacggccacaccttcaactacctcgtcgaggacggattcacgtactgtgtagttgctgttgaatcagtcgggcgacaaatccccatagctttcctggacagagttaaggaagacttcaccaaaaagtatggaggcgggaaagcagctactgctgcagcgaacagcttgaagagggagtttggaccaaagcttaaagagcacatgcagtactgtgtggaccaccctgaggaggttagcaagcttgccaaggtgaaggcccaagtctccgaagtcaaaggagttatgatggaaaacattgagaaggttcttgaccgtggtgagaagattgagctgctagttgacaaaactgaaaacctgcgttctcaggcacaggatttcagacagcagggcaccaacgtgcggcgaaagatgtggctccaaaacatgaagatcaagctgatcgtcctgggcatcatcatcgcgctgatcctcatcatcatcctgtcggtgtgccacggcttcaagtgcggcagcaagtgaggaggggggcgtgacttacagatggttggtgtgccctggcaccggcgaggagaaagaccatggggagggagttttgctctttgtggtcgtcgtgttgttgagtcctgcgctgattattcttggtgatcgtcagagggagttattcctgatgtcggtgttgattgctgttggttgggaagtgacggtgaaccgggggaagggggaggggttgtgtcgtgtaattttggatgctactgttgtgcatgtatagcttgtctgctaccctgttccatgctgtttgttactccgatgccagtagatgttacgtactactacgtttgctccccagcttgctggcaactcttggat

SEQ ID NO: 21011 - DNA, 1352 bp, Zea mays
  Clone ID: LIB3245-584-F6_FLI
ccaccaccacctcctccggtccccaacccctgtcgcaccgcagccgccggccatggcctgcctcaccgacctcgtcaacctcaacctctcggacaacaccgagaagatcatcgcggaatacatatggatcggtggatctggcatggatctcaggagcaaagcaaggaccctctccggcccggtgaccgatcccagcaagctgcccaagtggaactacgacggctccagcacgggccaggcccccggcgaggacagcgaggtcatcctgtacccgcaggccatcttcaaggacccattcaggaggggcaacaacatccttgtgatgtgcgattgctacaccccagccggcgagccaatccccaccaacaagaggtacaacgccgccaagatcttcagcagccctgaggtcgccgccgaggagccgtggtatggtattgagcaggagtacaccctcctccagaaggacaccaactggccccttgggtggcccatcggtggcttccccggccctcagggtccttactactgtggaatcggcgccgaaaagtcgttcggccgcgacatcgtggacgcccactacaaggcctgcttgtatgcgggcatcaacatcagtggcatcaacggggaggtgatgccagggcagtgggagttccaagtcgggccttccgtgggtatttcttcaggcgaccaggtctgggtcgctcgctacattcttgagaggatcacggagatcgccggtgtggtggtgacgttcgacccgaagccgatcccgggcgactggaacggcgccggcgcgcacaccaactacagcacggagtcgatgaggaaggagggcgggtacgaggtgatcaaggcggccatcgagaagctgaagctgcggcacagggagcacatcgcggcctacggcgagggcaacgagcgccggctcaccggcaggcacgagaccgccgacatcaacacgttcagctggggcgtggccaaccgcggcgcgtcggtgcgcgtgggccgggagacggagcagaacggcaagggctacttcgaggaccgccgcccggcgtccaacatggacccctacgtcgtcacctccatgatcgccgagaccaccatcatctggaagccctgagcgccgcggccgttgcgttgcagggtccccgaagcgattgcaaagccattgttccttccgttctgtttgcttattattattatctagctagatcatccgagggtcaggtcgtggtgtgccaaaaacagaacacagaaagaggaagaagaaaaaaaaaacaagacgtgtggcgttaatgttatatcatctaataatggccgtaccacacttgtggtacctttcagtacgt

SEQ ID NO: 21012 - DNA, 537 bp, Zea mays
  Clone ID: LIB3245-584-H9_FLI
agatctcgctcagaagagactctgaagagataacgagctgcgcttcttcgtcctcgatcaactagcttctctgatcgcttccatatggagagagctgcgtcaagctgcgctagcctcctagcacaaaggaggtgctactccgtggccgcggtcgtggtgaagggatgcgggcggaaggccgtggagaaggtggccaagcgcatcatgggcaaggaggtgaacaccgcggctgcctccggggagaagacgccgtgggtgccggacccggtcaccggctactaccgcccggcgggtggcgccaaggaggtggacgcggcggagcttcgcgccaggctgctcaccaagaggatcgccaactaaatcaatctagcagcagagcagtgcggctgagattatttagcgccagttgatctcttgggcctagagcatgacggtgctgtaacttttgaggcataatatatatagatagatagatgggaagagctcgaacgtatctccgtttctagaaagaatggcgcaattcttgctttgcttttt

SEQ ID NO: 21013 - DNA, 1197 bp, Zea mays; identical to SEQ ID NO: 311
  Clone ID: LIB3245-586-B11_FLI

SEQ ID NO: 21014 - DNA, 464 bp, Zea mays
  Clone ID: LIB3245-588-A9_FLI
ggccctcggcctcagcgagggagggccgctgttcgggttcaccaagtcgaacgagctgttcgtggggcggatggcgcagctgggcgtggccttctccatcatcggcgagatcatcacggggaagggcgcgctggcgcagctcaacatcgagacgggggtgcccatcaacgagatagagccgctcgtcatcttcaacgtcctcttcttcttcatcgccgccatcaaccccggcaatggcaggttcatcatcggcgaggaagaggaataggctgctggctgctgctgctggcctcggacatgagtcgtgtgcgtttacttttacctgtgactgtgcgtctcggtgcgcgcgcgtaagtgctttgctgtgtatcaattactcgtgatgagacctcgaaggtagggtgtcgcgttgggttgtctgcttgtagaaacaagagcttatatataaattactactagctaat

SEQ ID NO: 21015 - DNA, 525 bp, Zea mays
  Clone ID: LIB3245-588-G12_FLI
cttctagattgtccaagtcgcgtggattctctccattgtaattatggggatcaatatttatttcttctgcaatagcttcataagttggcttgtgcacagtgaactcccaaggatagtcaatgttataattagcacccttgtcttccctttcatggcggcatatattgcagctttaatctacttggctttcagaaaagttaatgctgctggcatattcccttccgtgtcagcttccactgggactgaagtagaagcatggaggcaagatggcaacattgatgatattggtgtacattgatatgtttgaaacacagtatataaatatactctttcattaaaaaaatattttgttcatacaccacacattagggaagacgtcaaaccattattgaaagatgtatatagttatacatatagttttatggttagatttgttgtccctttaggaatgtagtataagcaatttaagttttttttttatctacggtggtatctaatataaggatttatctgtccttggtggtt

SEQ ID NO: 21016 - DNA, 1376 bp, Zea mays
  Clone ID: LIB3245-589-A10_FLI
tctcttctctccgtccaacgacggcgcgattcagatccaggcatacaggccatccttccgccgccgcggactgcacctaatcttccttctccagcagccgggcgttcccgtcgtcctcgatcgtcccctggactggatcgcaacggagatccagctggacctgcggtggtcccttccttttctcgatagcataatgagctcgccagtggagaggtgattcgtcaggctggtatcaagttcctagtccatggtgcctggatgagcagtagagatgctactggccgtggaaggaggagggttcttctcgtcttcagctacaggttacagccatggcctcgccctcttgctgctcggacgcaaagctgaggagaagcccgtaaaggtctcgccgtggaaccagtaccggctagtcgaccgggagaccgagcaggtgtaccacctgccctccgccaaggaccaggctcctgggaaatgtgctccctttgtctgcttcggatgcacggctaatggcctcgaggtggcgtctcctccaaaagcgacctccagcaatgcgcttggtaccggtacctcacaggaagaagcatcttgttcagcaaacaagacgttgaccactagtggttccatcagtggcagtgagagacgaggctgtcttaagagcaactccaaaagggattctttggagcaccgtatagtggtgagcgagggtgaagaaccgcgtgagtctttggaagaggtgcaaaccctgagatctagcatggaacggaggaaagttcagtggacagatacatgtggaaaggatctttttgagataagggagtttgaaacaaggtaaccatcttgtgaggtaacttatcttcaagttttcaagtaacaaagataccacaaagttcgagccatcttaatgagtagtctccaaccaaaagcgacgagagtctgtcagatgatgacccagaaaatgaaggtttccggaaatgtgagtgtgtgattcagtagatttcttgtgtgcacaacaagcctgacaggaacatctcctcatgggaagcccatgtcctgctgagaaggacatgccatatgttcttctgggaaggatatgccacacccagtgatttcattgcaactggaacgatcgatgacagtcgaaacaaagcaaacggtgatgaatcgatattgtgctagattatttgttggttctacgcttaactagtctgctcggcagggttatagtttcgatgcccacctgtacaataccaagatcccattcctttctttttgttgtcatgttttgtttctctgactttccatcacctttttcacgcccgctgtaccatatgaggctgccctgttacttctgccatggatggtggatccctgacttc

SEQ ID NO: 21017 - DNA, 1300 bp, Zea mays
  Clone ID: LIB3245-591-A11_FLI
gcttaaatctccgacaggctcttcttctggagatgggtttgatgttatgactctagccacagatcagcctgctggaccagtttcagcaacgcctaaggtacctaatgccagagatgatgataagttcaatgatggcatgtacgaagacttgtgtgtagatgatgctgaccttacattcgaggattatgaagagctttttggtacctctcacattcgaacagaggaactctttgatgacgctggaattgacggttacttcgaattgaaagagacaccacctttttatttcaacgagcagcccaaagctatgcagatagaatgtggcaacgtggtatcagctgattgtgcgatgtcaaacccaggggcaagggctgattccagcctttgtattcccgtcaggcaggtcagatctagtatatcccactccttatctggtctgactggtgagagcagcgctggagatcaccacgactgtggggtgtcaccaatgctcctcatgggtgagccaccctggcattctcctggtggtccagaaggctcagtcgctggaggcagcagagatagcgctctcacacggtacaaggagaagaagaagaggagaaagtttgacaagaagatcagatatgcttctcgcaaggccagggcggacgtgaggaagcgggtcaagggacggttcataaaggccggtgaagcgtacgactatgatccgctaagccagactagaagctactgagccttgggagtgtgactgttgttgtcgtccagtgtcagcctcgcagtctccagccgctcgtcggttgcaggctgcgctacagccaagatcactggagagcacaacgatcgcattgcatcagagcctgcatctgaaaaaacgttaagaagagataccaagtgttgggatgaatgaaaaaaaaaagacaaaaaagaaagatgcagacttgccggactcatatccattattcagtttctctgcggatgagtggcttggatcgcactgtgccgtctgcgcgtcgaacagatgcagtgatggatgggcgctcgtcgtcctccagctgtaccgctgcgcgctaggacctgcgtcggctatatacggctgttcggcagtgagctgccaggttgtacagtctgggtaacagcctaacagggtatgcttatacctctcggttttcgttctgtaatacgtacgtattgtttgcgcttgccaggagactgttcttcggccgtgtgtatgtttgtagatggttgcaacattggtaaaaaaaaaaagtagccgtcgtgaatgtaaatttgtattcttgtt

SEQ ID NO: 21018 - DNA, 615 bp, Zea mays
  Clone ID: LIB3245-591-H10_FLI
cctttgcagaactccatcaagcagctcgagagtgctgccaccaaaatttacaaagagaagaagttgctgcaagcagaaaactggagcctaaagacaagtaagtatacgctgaaagtcagggagataaacgaccggttgatgatggccgagcgagcgttcaccaaccgagaaggactggtcgggagaccatggtacaagcatatgatatatgcatcatcggatcaagacgactgggggaccaaagccttccctggtatagtctcggccatggacaaggctaagaagtccaacacaaccgagacgtggcgactgctgcagcacgagatttacagggttgccagggctgtgtccaaggcttctgcagtcctggatggtaaactaacatgatgtgcacgtgcactgcagattttcattctattctacatagatcgaagtacccgatggattcagtttccatttcgtttcttgaaagctgaagtgcgtggaatacctgtcaggcatcattggataattgtgtaaataatgaagaaatatgctcaagttagtgtcctatgaataaagaatagtggaatcatctctcacgatgattcccttgagagtatcgccaatcatttt

SEQ ID NO: 21019 - DNA, 701 bp, Zea mays; identical to SEQ ID NO: 14442
  Clone ID: LIB3245-592-G4_FLI

SEQ ID NO: 21020 - DNA, 223 bp, Zea mays
  Clone ID: LIB3245-594-A3_FLI
ggaccaatgacaaggagaagggtggcgatgtccccaacctgcagctcaccttcagccagcaagcaaggagaagcaccggcttcaagcaaaaggagattaattatctagctgactgtgatggattgtatgtcatttgcatgtgtttgctacttatgcgatggacgtgtaagccatatattgtattttattgttagaatcaggcacccctgaattatattgttgc

SEQ ID NO: 21021 - DNA, 1321 bp, Zea mays
  Clone ID: LIB3245-594-A6_FLI
aaaagaacagaggttgctgaagacttagtgctcgaaaaaacatcttgccctctgggtgtgctgttgattgtttttgagtccaggcctgatgccttagtccagattgcgtctttagcagttcgaagtggcaatggtcttctcctgaaaggtggaaaagaagccatgagatcgaacacagtattacataaggttataactggcgcaattcctgacaacgtgggtcaaaaacttattggccttgttacaagtagagatgaaatcgctgatttactaaagcttgatgatgtcattgatcttgtcattccaagaggcagcaataagctggtttcgcaaatcaaagcatcaactaagatacctgtcctcggtcatgcggatggtatttgtcatgtatacattgacaaatcagctgacatgaatatggcaaaacgaatagtgatggatgccaaaactgattacccagcagcctgcaatgctatggagacattgcttgttcataaagaccttataaaggctccaggtcttgatgatatactcctatcactcaaaacagaaggagttgctatttatggagggcctgttgcacatgaagtactgtgtattccgaaagcagattcattccatcatgaatatagctctatggcctgcacaattgagttcgttgatgatgtacagtcagcaattaaccatatacatcgttatggaagtgcacatacagattgcattatcaccacagatgataaagtagcagaaacttttctgcgtcaagttgatagtgctgctgtatttcataatgcgagtacacgattctctgatggggctcgttttggattgggcgccgaggttggcataagcacagggcgtatacatgctcgcgggcctgtgggtgttgaaggtctcttaacaacacgctggatcatgcgaggaagtgggcaagtggtgaatggtgacaagaatgttgcatacacccataagaaccttcccttacaatgaggctgtttttgtgcttgatcaggattcgtgtctatccagtgatgtttgatagtttcatcaggcaggagcatagaatggtgaatcttttcgattgaggactgtgaatccatggatgttcagtcattgtttgtgtagacattgtggtgagcttggaggccaccccacctccccaataaagcagtgctgggagtaatagagcactgatgtactgagggtgcctaggttaaacaagaggaaccggttatatttgttttgcggtcgaacacaaacaatttttgttggtgacttgtttcttatgattctacatatttcaaggtttatgtgctgtcct

SEQ ID NO: 21022 - DNA, 1064 bp, Zea mays
  Clone ID: LIB3245-594-E11_FLI
cagacggcaatgcagacccccgcgcgcctctccgctccatcctcgccgctcgtctcctccgcgccaccgatacctgtacggccacaacgcgtcgctttcccctccctccgccgccgtgatctcctcctcctgccggcggcgctgaccctcccgacggcgcccgccccgttgcctgcctcggcgcgagggctgttccgcatgcccccgccgcggctggtgaaccgttactttctggtgcgcgcgggcgagtccgtgtacgaggggcagggcctcctccgcaccaacccggtcgccaagacctccgtcgacagcggcctctcccccgtggggctccgccagacggcgcgcgccgcgctcgagctccagcgcctcggcgcctgcgaggacgactgctggatatggccgtccatcactcagagagcttaccaggcggccgagatcattgccgcggccaacggcgtcaaccgcagtcgcatcgtgccggagtacagcttcttggatgcacgcggattgggtgcatttgagtggaagagcttagacaccttacccgaggtgtacgcgtcagataatatttctccagacttgaagcctcctcctatcagggatggtactccaaatgagagcgttgcagatgtatttgtgcgggtgacacagctcatgtcaatactagagacccagtactcaggggaaactgtcgtcattgtttcgccggattctgacaacttgtcaattcttcaagctggattgatcgggcttgaccttcggaggcatagcagcttgttttttcagcctggtgaggtccggccggttgatccatcgagcatacctgaatacaagcaacctccttctactgtttttaagtgtgcaaatccaccgagttgtaaagagtagttcacttccttaccttacagttcatattttctgtccgtgtatgagtataatcatgacaaacgtcttggaccttggtgataattgtatatagctgaaagtattgtttatgtgccacatctaaattattgagccaccttgtgttggacgaactccagatattcacggttcgttcc

SEQ ID NO: 21023 - DNA, 610 bp, Zea mays
  Clone ID: LIB3245-595-C9_FLI
ccatcgatgtgtatcttgctggaacggtcatgttgatatttgggatgggtctctacggtctcttcgtcagcaacgcttccgtgggtgttcgttctgaatccgaccgtgcactgagcggatcgttgctgttcgggatgttcgctttgaaggaacgccccaagtggatgaagatcacctccctcgacgagctgaagacaatagtggggcacgtcatcgtgatgatcctgctggtgaagatgttcgagaggagcaagatggtgacaatcgccacggggctggacctcctcagctactcgatctgcatcttcttgtcgtctgcctctctctacatcctgcataacctccacaagggcgacgaccatgaggagtgaggagagtgcaataatataatgccgaatctgtaactctatgacagaagagataatggttaggcttgggttcagctgccatgtaccttcctggacccacatttcagtgagcatgggtgtcacctgacctgacatgccctttcaaaggctggtcctgaactcagaccaccaaagaaactaggttctatatggtctgtatactatggttttatttcggagtgattgaggagaatttcattttt

SEQ ID NO: 21024 - DNA, 754 bp, Zea mays
  Clone ID: LIB3245-596-C2_FLI
cgtccgtgctagccatggatctaggcgctcccgctcgacggcgcttaccgatccgcctcttgctggtgtcgctcgccgtcctcatggtcctcaccgcgcgttccagtgccgaagtcatcaccctcaccgaagagaccttctccgacaagataaaggagaaggacacggtgtggtttgtgcagttctgcgtcccctggtgtaaacactgcaagaaccttggaacactatgggaggacctgggaaaggttatggaaggtgcggatgaaattgagattgggcaagttgactgtggtgtcagcaaaccagtatgctcaaaggtcgatatacactcctacccaacattcaaggtgttttatgaaggcgaagaagtagtaaaatataaaggacctaggaatgtggaatcgctgaagaacttcgtgttgaatgaagctgagaaagcaggtgaggcaaagcttcaagctgattgaggcaggggagtttcagcaagcatgtggcgtagacaaggaacaatgctgtgcaacattgtcttctatcctgtcatttacaaagccaatttacaggaaagaaatgatcttatgaccccgtatcagagtattcctcttcgaaagtaactccgaatcagttcatagaagctgtactccattccatagtttttatcacattgacaaactccgaatcagttaatagaagctgtactccattccatagttttcatcacattgacaaactgaagtaatgattggaacgcaaccat

SEQ ID NO: 21025 - DNA, 470 bp, Zea mays
  Clone ID: LIB3245-602-E8_FLI
actcacttgatgctgctggcactaacgcggatgctgccagtaagattgagaggtttctgattcaaccgagagtagaggatgcagtacttggccggcggaaagctgaaaacgcaatggcttggcgggcagtgtttacatcggccgggtttgctccggtaccgctcagcaacctcgcagaagcacaagctgactgcctgttgaagcgcgtgcaggtccgaggattccatgtggagaagtgtggaatgggtctagcactctactggcagagcggcgagctcgtgtctgtctcggcatggcggtgctgatcatacggaccccatccatcaaccatcatgacacctacaccaatttgcaggcatgtttaaccctggtaatgtgcattttgtcttgcaatttcaaacatcgtgaagaaaactattgtatttgttgttacacgcctctgattgctttgctgatgttggagtaccgcc

SEQ ID NO: 21026 - DNA, 994 bp, Gossypium hirsutum
  Clone ID: LIB3272-010-H4_FLI
taaaaacctctccacaatgcttttgagaccagtttcatctttgtgtgtgcaagccaagcaaggggataatctaatttgttcccttaagggctcccctgtaacatcatcatcatcatctgctctgagttttcttcccagaaaacatggaagggctttgggtgtttatgcatccataggaaccaacaatcatgcacttacaggggtagtgttccagccttttgaagaggtgaaaaaggaggaacttgatatcccaatcgctcctcatctttcgctggctcgccagaaatttgctgatgcctgtgaagccgccatcaatgagcaaatcaatgtggaatacaacgtttcctatgtgtaccactcgttgtatgcttacttcgacagagacaacgttgcgctcaaaggctttgccaaattcttcaaggaatcaagtgaagaagaaagagagcatgcggagaagctgatggaatatcagaacaaacgaggaggaagagtaaaactacactctattctgatgcccccttcagagtttgatcatgctgagaagggagatgcactatacggtatggaattagcattgtccttggagaagctgacaaacgagaagcttttgtgcctgcacaatgtagcggtgcaaaacaatgatgctcagatggccgatttcatcgaaagcgaatatttagctgagcaggttgaagccattaagaagatatcagaatatgtttctcaattaaggcgggttggaaaaggacatggcgtgtggcacttcgatcaaatgctactccacgaaggggcgtgatgctgcccataatcaccatctaaatgctgcatctttctgttgttttagtgcttcacagatgttctatatatacatatatgatgagggacaggtagtggagaagaataaattgttgttgtaaaatatctatatctatatgccattgtagcagccccttaacatttgccatgtaagagacaataaacagcttggtttttg

SEQ ID NO: 21027 - DNA, 1723 bp, Arabidopsis thaliana columbia
  Clone ID: LIB3277-017-D9_FLI
gaaaagaatcaatcttttgttcttcgattcgatttctaatcaattagattgtttttgttttgtttaacatcagttgcgaatcgagctggattcttgggctcgctttttctttcaatcaaaagtttcgatattagtgaaggataaaattcgctaaaaaaagagaattttttttgttaaaaaaattataaaagctggctttctcaaaatttctccatgtggtcgacgaagaagacgaagaagacgaagaagaaagagaaagtctcttagcaaacatgaccgccaccgaagctaagaatcgcaaaatcaatgtcggagatggagatgacgttgttgatatcgaaatccctgacactgctcatcaaattagcagcgattcatggtttcaggtggcgttcgttttgaccaccggtataaacagcgcgtatgtgttgggatattcaggaacaattatggttcctttaggttggattggtggtgtggttggtcttcttattgctactgcaatctctctttatgcaaacactctaatagctaagcttcatgagtttggtggcagaagacacattcgctatagagaccttgctggattcatttacggtaggaaggcttatcatcttacatggggattgcaatatgttaatcttttcatgattaattgtggattcattatcctagctggttccgccttaaaggctgtttatgtgcttttcaaggatgatcataccatgaaactacctcattttatagccattgctggtttgatttgtgcgattttcgctattgggattcctcatttatcggctcttggggtctggcttggagtttcgaccttcctcagtctcatctatattgttgtggcaatcgtgctatcggttagagatggagtaaaaacaccttcaagagattacgagatacaaggatcatcattgagcaaactttttaccatcacaggagcagccgcaaatctggttttcgcattcaacaccgggatgcttccagaaattcaggcaacagtgaggcaaccagttgttaaaaacatgatgaaggctctatactttcaattcacagcgggtgttttaccgatgtacgcagttacattcatcggatattgggcttatggatcctcaacctcgacctatctactaaacagtgttaatggcccactctgggtcaaagcccttgctaacgtctctgctatccttcaatctgttatctctttgcacatatttgcgagtccaacatatgagtacatggacacaaagtatgggatcaaaggaaacccatttgcgataaagaacctgctgtttaggatcatggcgagaggcgggtacatagcggtaagcacgcttatctcagcgctgttgccgttcctcggtgacttcatgagcctaactggtgcagtgagcacattccctctcacattcattctagccaaccacatgtactataaggcaaagaacaataagctgaatgctatgcaaaagctatggcattggcttaacgttgtcttctttagtttgatgtctgttgctgcagccattgcagctgtcagactcatcgccgttgattccaaaaatttccatgtttttgcagatttgtaattcattatattatatagtcaattgtgtatcctttattcttaggcaggtttatttctcctgtaagcttgtattctctctctatttgtcttaccattagagcctaaataaataaatcaagttct

SEQ ID NO: 21028 - DNA, 1015 bp, Arabidopsis thaliana columbia
  Clone ID: LIB3278-077-D5_FLI
cttcctcctcctccaaactcagttccctccgtccatggcagcaaccttacctctatctccgatcaatcatcagttgtgtcggttcgggaacaactctttgacgactcaccggttctgttctcctggcttcttgatttcttctccttgtttcattggtttgaccggaatgggctctgctactcagttacgtgctcgtcgttctctgatctcttcagcagttgcgacgaattcgctgttgcatgacgtcggagccaccgtggcagtgcttggtggagcatacgcgcttgtcttaagcttcgagagtctcaccaagcgaaacgtcattcaacagagtttgagcagaaagcttgtgcatatactctcaggtctgcttttcgtacttgcgtggccaatcttcagcggatcgaccgaggctcgatactttgctgcttttgttccgttagtgaatggcttaaggcttgttattaacggactatccatttccccaaattcgatgctaatcaaatccgtcacaagagaagggagagcagaagagttgcttaaaggtcctttgttctacgttctagctcttcttttctctgcggttttcttctggagagagtctcctatcggtatgatctcgttagcaatgatgtgtggtggcgatggaatagctgatataatgggacgtaagtttgggtcaactaagataccttacaacccaagaaagagttgggcaggaagcatctccatgttcatcttcggcttcttcatctccatcgcattactttactattactcaagccttgggtaccttcacatgaactgggaaacgaccttgcagagagtagcaatggtctcaatggtcgccacggtagtcgagtcgctacccatcaccgatcaattagacgacaatatttcggttcctctggctactattttagctgcttatttaagtttcggatattagattaatccctcataaaccgaatgtgtatatacgtatttttttaatgaatccgaccttacaaatgtt

SEQ ID NO: 21029 - DNA, 679 bp, Zea mays
  Clone ID: LIB3279-001-D10_FLI
ttcgttccgtccaggcaaggaagaaatcgagcagccaaggagaggagaagatggctcgtacgaagcagaccgcccgcaagtccaccggaggcaaggccccgcgcaagcagctcgccaccaaggcggcgaggaagtcggcgccgacgaccggcggcgtgaagaagccccacaggtacaggcccggcaccgtggcgctgcgcgagatccgcaagtaccagaagagcacggagctgctcatccggaagttgcccttccagcgcctggtccgtgagatcgctcaggacttcaagacggatctgcggttccagagccacgccgtcctggccctccaggaagccgccgaggcctacctcgtcggtctgttcgaggacaccaacctctgcgccatccacgccaagcgcgtcaccatcatgcccaaagacatccagctcgcccgccgcatccgcggcgagcgcgcgtaggcgtatctcgcgcccggccccagtggcggcggagggatggaggagtgcaatttgtaactttatgctgtttgttcgcttttagacggcgtggcgaagtagtgtaaaaacggctttacaagtctattttgtgtggtagttcgtgtaccgcttcgtcccgaagcgatcttggtaaaagactgatgattcgtgttgccaaacgacacaattcgtattttttt

SEQ ID NO: 21030 - DNA, 1553 bp, Zea mays
  Clone ID: LIB3279-001-F12_FLI
gcctgcccgggcggtagataggagaggtcaagaactacggcacgaccgccgacgtagcagagggatctgttcgcctcccgtaccgagacccccctaccctttcgtcgacgactaggcttgcggcgaccgcccttggcttcgccgtcggcgagcatcaccagggactgacgattggcgggggagcgaatgcggagatgggctgatcagaactgcgacaaggtccggttttctctctaaaccgcggtctctggaggtgggtttgctttttccgtagtcacagatggacgacgacgacggcagcctgggcattcggaactggggcttctatgacaccgtgaaaggcagcctcggcctgcagctcatgtcgcccatgccacctgatcgggacacgaagccactgctcccgagagctggtttcttgcagcagcatgggcatcacaatgccccacaccagctccacgcacagcagccgcagcattaccgtgactccgctggtggcggagtctctggtggcacacctgccgagcagcaccctatccacatggacttctcgcgcaatgaagcttggctgcacccatcacaccaccagcatccccatgaacagaaggtccttcattctcgccctatcggaccagctgggcatgttgggcatccaggccatgttgcccatcctgtgcatgccgtgcatgttgtgcatcaccatcctactggctatgggatgatatcagatgcacaacatactcttcagatgatgcaaccacagcttgagtcacagcttcaggagcctcctccttgcaaggaagacgaagcaccacctccactggttgaggatcactccgtggttagtaccgggccacccgtgaagaagaggcagcggggccagaagcagagctgtcagcctaagtcaccaaagcctaagaagcctaagaagtctgctgtcccaccggagggtgggacaattaatgggcacgcgacccggaggaggggacctaagaagaatgtggggatgatgattaacggtattgagttggaccttgccaacataccaacaccagtgtgctcgtgcaccggagctccccagcagtgctaccggtggggtgcaggtgggtggcagtctgcatgctgcacgacttctatttcaacgtatccactgccaatgaacacaaagcgccggggcgcacgtattgctggaaggaagatgagccaaggtgcattcaaaaaggtgcttgagaagcttgctggtgaagggtacaatcttgttaatccaattgacttgaagacgttttgggctaagcatggtacaaataagtttgtaacgatcagataaagaagccgtgctatgtttgtcgctttgtaggttgtagagctgcagttaggcctgatttattgtttgtatgcctatgtgccagtctgcagacatttgtagtagtagtttttagccatgtttagtttcgttgtcttaattgtcatgtctatctcgagctttggatatcgaccaactgaagtccttgtatcctcactttgcaaattgtactgtacccataatagtctct

SEQ ID NO: 21031 - DNA, 1533 bp, Zea mays
  Clone ID: LIB3279-001-F5_FLI
caaaacggaaatagctcgcggtcgcggtttcttgcgccactccggctcagccgccgcccgccacccgccacagccgccgcagacgagatgggcatcaagggtttgacgaaactgctggcggacaatgcgcccaaggcgatgaaggagcagaagttcgagagctacttcggccgcaaaatcgccgtcgacgccagcatgagcatataccagttcctgattgtagttggaaggacaggcatggaaactctcacaaatgaagctggtgaagtcactagtcatttgcaaggaatgttcaaccggacaataagattactggaagcgggaatcaagccagtttatgtttttgatggcaagcctcctgatatgaagaaacaagagcttgctaaaagatactcaaaaagagatgatgcaaccaaagatctgactgaggcagtagaggtaggagataaagatgcgattgaaaaattgagcaagaggactgtaaaggtcacaaggcaacacaacgaagattgtaaacggctattaagacttatgggggttcctgttgtagaggcaccttctgaagcagaagcagaatgtgcagccctttgcataaacgataaggtgttcgctgttgcttcagaagatatggactcccttacttttggggctccacggttccttcgtcatttaatggatccaagttccaagaaaatacctgtgatggaatttgatgttgccaaggttttggaggagcttgaactcaccatggaccagttcattgatttgtgcatcctgtgtggatgtgactattgtgatagcatcaaaggtatcggggggcaaacagctctgaaacttattcgtcaacatgggtccatagaaagcatcttggagaatcttaataaagacagatatcaaattcctgaggactggccttaccaagaagctcgacgcttgttcaaggagcctaatgtcacattggatattcctgagctaaaatggactgcacctgatgaggagggtctcataagtttcctggtaaaagataatggtttcaacgaagatcgggtgacaaaggccatagagaagatcaaatctgccaagaataaatcgtcgcaaggaagactcgagtcctttttcaagccaactgccaccacatcagcaccgctaaaacggaaggagacttcggataaaacaagcaaggcagctgcgaacaagaaaacaaaggctggtggaaagaagaaataatcttggatgcttgatgtacaactacgactacgaaagcagcggtggcgtgatcacttcgcttagattatttaactccctgttttaactcagagctttggtaaaagtttgctcatgtttcaagctggggtaagttagttgtgtttgaagagattggtgtaccaagtaacaaaacttatcgctgttttttacttcttgtcctttgaagtatgtatgccagtcctcgtccttttaagtatctgtgttgcaacaaaaatttaaggccttgttttgatgcataggctcactttaagatttagtttaaatttc

SEQ ID NO: 21032 - DNA, 1268 bp, Zea mays
  Clone ID: LIB3279-001-G4_FLI
gtttgctaagatggaagagggcaatgactactatgttgtcaggaaaggtgatgtggtggcagtttacaaaactctaagtgattgccagggtcagatttgctcttcggtatctggtcctgctgcaagtgcctacaagggtcactcttggagcagaggaaaggaggaatacctgtcttcacggggactaagtgatgctacatacgtaatcaatgcagccgaactcagggaagatatacttggcccccttgtgccctgtagtttccaggacatacttggttctagttcaaatcaactggctccaaatcatataggcttccataatgttatagcatctcagactggagcacaatatgttgatctgaaccatgaagccagatctagttcatccagacatatctcaccagcaaatttcaatcataccggaactgttgatgcacaacctatctcaaaacaatacatggtgggtattcttcattttgatggtgcttcaaaagggaacccaggtaaagcaggtgctggagctgtgcttatgactgaagatggaagagtgatatctcggcttcgtgagggtcttggtgtcgctactaataatgttgctgagtatcgaggcctgatcttaggactgaaatatgcgattcggcatggattcaagagaattaaagtacatggggactctcaacttgtctgcaatcaggtgaatggtgtttggcaaacgaagcagccgaatatgatggagctgtgcactgaagcgagaaagctaaaagagaacttccattcctttgagatcatccatgttcgacgggagtggaatgctgaggcggatcgtcaggcgaacatcggtatcacgcttgcaagtggcgccgtgtttgaggagcgtggtgacatctgatacatagctagcaacgtatgtagttaactaactagcttgacctttgacttgcacctttgtcgagcttctatgctgctctgcagcagccatcaggagctgaggtgatggcctgccgtctagtaggcactatatccaattactttacactagttggacctatttcaccatcaagctgctacggaagcctgatttctgtatccagttgaggcgatgcatgtttagggatgggttagaccttgatattaatacggtggggtactgggctcactttgacaaacccagtaacaaactggtgtaagcttcggtccatggaccctcttgtgaggcccgttttggtgcttaaggctgtccttatcagtggggcctaaaatggctttat

SEQ ID NO: 21033 - DNA, 541 bp, Zea mays
  Clone ID: LIB3279-003-E7_FLI
gcgacgcgtcgcccccggacgcagccgccgccgcaccggttccacccgcgcatgccatcttcgtcttccgcttcgagctcgccgacgccggcgaggagcgtgacccagccgacgccaaggaggaggagctgctcgacaaggccgggacaggcggaggcggctggccaggatacgtcagtgggtgggggagaggggactggagcgagagcagcagcaatggtggcgagaagcggaggaagagggggcaggcgagcaggctggccaaggccagttcctcctcttcggcgtcagtggcgtcctcctccgcgtcatgggcgagtggctccactgtcatggactggggcagcgccgaggaggcccagctgcagagcggcgacggcttctccctcctcgtctacgcctggaagaactagtgtgacgggctagcggcggcaattcagtgaaccggctttggttcttaattcagtgaggatttctcttcccattgttgtaagttgcaattgttcagcgagcaatgttcttgtgcagttttcagcggtcc

SEQ ID NO: 21034 - DNA, 479 bp, Zea mays
  Clone ID: LIB3279-003-F12_FLI
gttgctgttaaggcacgaggcatcacgaggcgttgtgatcatcatcgtcggttatgcagtgaccaaacaataccttagcattgctgggtctccgtggttatctacgtatccgtattccatttgttacctttccagtctcactgctatgtacccaagggcgcctgtcaattcggtggactttgtgcagtttcatcagtagcgtcataccttgtgaatacaattggccaaaataagaggaagtgtaaactaaagttcatgctttatggttttgtgttgtattaactcgtccgccttttcctcgctttctgcttcagtgcaaacatgttaatgccatcccttaggctattcattaagaatagttttatcacattgtttctaaggctattatctaaacatttgtcttgtctagaaaacaatatccagagtttcatcgttgtgaaactccctcatctttcaagagagcatgtataatccctttt

SEQ ID NO: 21035 - DNA, 651 bp, Zea mays
  Clone ID: LIB3279-004-B2_FLI
ggatgctactgcaaatgaggaggaagaaaaggaagaggacaaggagatgactctggaggaatttgagaaaataagagaggagaagaggaaagcactacttgcgttgaaggctgaggagaggaaagttgaagttgacaaggatctgcgttctctgcagccactttcaaacaagaaagaaaatgatgaagttttcattaagctgggttctgacaaggataagaagaaggaaaatgctgagcgtgatgagcgtgccaagaagtcggtgagcatcaacgagttcctgaaacctgctgaaggagaaaggtactacggcggccgtggccgtggaagggggggccgtggggatcgtggtggttttagaggcggatacggagggggatacagtcgtggcccagctgctgctgctccatccattgaagatcaagctcagttcccaagccttggtgggaagtgaagggcgcccagctgctgctgtcaccgagcgttgtgttgtctgctgttgtcatatttaaattttgtccgacgttacatttctgtgccacggtttaaacggaacaaataatggtgttgcatgtggctatctttggttatgtggtacttgacgttgaataccggagttgttgtttatcagaattagactccaatttttgt

SEQ ID NO: 21036 - DNA, 365 bp, Zea mays
  Clone ID: LIB3279-004-C7_FLI
accgatgtaacaagacatccataccactgccaattttacgtgcaatttgaagctcctgagtacgtcagaagaattaggaagatcctttgaactttgagctacaactcttcttcttggcgttcggttacagaacattttacttagaacatctgttgtaacttgtgagctgtagagcagaaacacatgcctgaaatgagttattctataacagatgctcatgtaggcgtttgatctgaaacatttgtttattattattgcggtgtgcatttcagatgctctctttaaagtcgcatcatctagcgtatagatcatgtcccagagaccgttttttttttaaattgaccttttttgtcaaaaatattcat

SEQ ID NO: 21037 - DNA, 305 bp, Zea mays
  Clone ID: LIB3279-004-G6_FLI
catggaagttaagcggcataaaaacaagatgaccaagacttcagcataatgttgtgactaaggtcaaggcgactatggtcatggatgtaccagacgtcgtggaaaaggagctcatggtggcacatcatggaagaatgtggcacatggctcagatggtggtagttgttgaaactattcatcttcaacacactatcgaaaggtcgagcttttgaatcacccaacaagaatacctaggcatagtgattatcgacagttgaaccaaattatttttttgtctttactagtatccaagtttacctttttat

SEQ ID NO: 21038 - DNA, 831 bp, Zea mays
  Clone ID: LIB3279-005-B8_FLI
tgggcgtgcaactttcccttccttcgccgaagccgcgcgacggaaaccccaaacccaacctcatctcttttctcggcctctaccgccccctcgatcggtcggccggtcagctatgacgccgggaagctcggccgccggatccggcgtcgtcgttcctcggaacttcaggctcctagaagagcttgaacgtggagagaagggcattggagatgggacagtgagctatggaatggatgacgcagatgacatctacatgcgatcatggactggcactattattggccctcataataccgtccatgagggtcgcatctaccagctgaagttgttctgcgacaaggactaccctgagaagccaccatcagttcgatttcattcaagaataaacttaacatgcgttaatcatgaaactggagtggttgacccgaagaagttcagcgttctgggtaactggcagcgtgattactcaatggaatacatcctaacccatctcaagaaagagatgacatcgccacagaaccgcaagctagttcagcctccggaagggacattcttctaaagatggcagcaactcatgtccatccatggtgactcggaaacagcttccgcacctggttcctatattttatatatttagtctgatctcccagttatctgtaaaccaccgagatcgagtgcaagcagacttggttgatttacaatttgcccggtggttgctaatgatatgggatgaaacggttgccggtttggctgctattaaggttgtgtaatctgatgggcaatttcagcattctaatgccctaatgatgaatctttggccatttgctgttc

SEQ ID NO: 21039 - DNA, 1645 bp, Zea mays
  Clone ID: LIB3279-005-C3_FLI
cgtcttcgtactcgcctacctccgcggctcaaacctttcccccttctcccaattcccgccgccgctccatcccgtaacgcgacaccatgagggagtgcatttcgatccacatcggccaggccggtatccaggtcggaaacgcgtgctgggagctgtactgccttgagcatggcattcaggctgacggtcagatgcccggtgacaagaccattgggggaggtgatgatgctttcaacaccttcttcagtgagactggtgctgggaagcacgtgccccgtgctgtttttgttgaccttgaacccactgtcatcgatgaggtgagaactggcacctaccgccagctcttccaccctgagcagctcatcagtgggaaggaggatgcagccaacaactttgcccgtggtcactacaccattggcaaggagattgttgacctgtgccttgatcgcatcaggaagcttgccgacaactgcactggtctccagggcttcctcgtcttcaacgctgttggtggaggaacgggctctggccttggttccctcctcctagagcgcctgtctgttgactacggcaagaaatccaagcttgggttcactgtgtacccttccccccaagtttctacttcggtagttgagccatacaacagtgtactgtccacccactccctcctcgagcacactgatgtggctatactgctggacaatgaggccatctacgacatctgccgccgatcccttgacattgagcgcccaacctacaccaacctcaacaggcttgtgtcccaggtcatctcatcccttactgcctccctgaggttcgatggtgctctgaacgtggatgttaacgagttccagaccaacctggtaccctacccgaggatccacttcatgctttcttcgtacgctccagtcatctctgctgagaaggcctaccacgagcagctctctgtggctgagatcaccaacagtgccttcgagccatcttccatgatggccaagtgcgacccacgccatggcaagtacatggcctgctgcctcatgtaccgtggtgatgtggtccccaaggatgtgaatgctgctgtggccaccatcaagaccaaacgcaccatccagttcgtggattggtgcccgactggcttcaagtgcggcatcaactaccagcctcctagcgttgtgcctggtggcgacctggccaaggtgcagcgtgccgtgtgcatgatctccaactccaccagtgttgtggaggtgttctcccgcatcgaccacaagttcgacctcatgtacgccaagcgtgccttcgtgcactggtacgtcggtgagggtatggaggaaggtgagttctctgaggcccgtgaggacctggcggcgctcgagaaggactacgaggaggtcggtgctgagttcgatgagggcgaggatggcgacgagggtgacgagtactagagaagtttgctgatgacgcagcatcaggccagtgtgctgcccttatcccgtgatctgccgagagttgctcctgctatcgtgttatgtgtgtctgttctgaagtattgtgtggtttacaacacctgatgttgtaagagttgttaattcccctgcattgctaccgggttattgagaataattatggctgtttacgttgttgcttc

SEQ ID NO: 21040 - DNA, 904 bp, Zea mays
  Clone ID: LIB3279-005-D5_FLI
cacgtctccatctctggtttgaccgccgccgccgccgccctacgcggctacgccaggcgccgaggccttcgtcggcattttcgtcggcaagcactcaccaggtattcagccatggtttttcttgaggcagagatgtcatggaatgtgttgatctcacctagccagctggaccgcaagggcctcctgctccgcaaggctatcattgtgcgtcttctggaggatgtcacaaacaggagggcttcgaaagagcatggctactacattgctgttaatcagctgaaggcaatatctgaagggaaagtgcgtgagctaactggagatgttctgttcccagtttcatttacttgcattacacagaagcctatgaagggagaggtcatggttgggcacgtggacaggatcctcaagcatggcgtgttcctcaaatccggacccgtggagagcatcttcctggctgagaagtcgatgagtaattacaagtacataggtggggagaatgcgatgttcatgaacgaccactcgaagctggagaaggacaccgccgtgcgcttcaaggtcctagggttccgctggatggaggctgaccgccaattccagctccttgctacgatcgctggtgacttccttgggccgctgtgaactgcttccacaggtcaaacaggttctaatgtacattgctcgttagatggtggatggatggttggatctgatgtgtagaattaaactttgctaccagtggtttggtcttgtagaacctgagacatggtaggttttctagatgctgttgccagtgatatttagctctggtttgaacgtatcagtgtacctgtatgatgaacaagcgttgtcatggatgtaccttttctatgcttgcttggaagttaacgttacatggtgttccctg

SEQ ID NO: 21041 - DNA, 509 bp, Zea mays
  Clone ID: LIB3279-005-E7_FLI
ggagcaaccgcttgcgtcacacgcacactgacggagagtgatcactgatttctggtcatggcaaccgtaactgaggaagttgctccggtcgtcaccgtctccgaggagccggcgccggaggcggcgaaggaggtggcggagaagccggaggaggggaagaagcccgacgaggagggtggcgaggggaagaaggccgcccccgccgccgagaaggagaagaaggcgaggaagccgcggagcaggaagcccaagtccgccgggccgcaccacccgccctacttcgagatgatcaaggaggcgatcctgtcgcaggacggcgggaaggtcggggcgagcccgtacgcgatcgccaagcacatgggggagaagcaccgggacgtgctcccgcccaattaccgcaaggtgctggcagtgcagctgcgcggcttcgccgccaagggccgcctcgtcaaggtcaaggcttccttcaagctcgccgccgccgaggagaggaagccctccgcggccgc

SEQ ID NO: 21042 - DNA, 752 bp, Zea mays
  Clone ID: LIB3279-005-H11_FLI
cacagatcaaggaataccgtggcaagattgaggctgaattgagcaacatttgtgatggtatcctaaagctgcttgacacgcaccttgtgccttcctccactgccacagagtcgaaggtgttttacctcaagatgaagggtgattatcacaggtaccttgctgagtttaagactggtgctgagaggaaggaatctgcagagagcacaatggtagcttataaggcagctcaggatattgcattggctgaactgccacctattcatcccataaggcttggacttgcacttaacttctcagttttctattacgagattcagaactctccagacaaagcttgcaatcttgccaaggaggcgtttgatgaagctatttctcagttggacatgcttggtgaggattcctacaaagatagcaacttgattatgcagctcctgagggacaacttgaccctctggacggaggacggcattgaggagggcttagaatcctcgaagggcgatgctggtgagggtcagtagcctggtaaacttagattgatggttcgacgtgtttctcaagcacatcgtgttggacgcccagtgctgacagaaggcttttgctgctccatgcattccaagcttctgccctttcgttcgcaccctcttcatgttgttggctggtagtggtcagatttagtcccattggtttagttggccctgggtccatctgaactgatgtattgttactgctatggaagtcattcctttagtttt

SEQ ID NO: 21043 - DNA, 543 bp, Zea mays
  Clone ID: LIB3279-006-A12_FLI
gggcgccgcggagccgcaccaaatctcaccccgcatcctttagggttagggttctgcccgcacctgtgaattccgttgcgaaatctctcatctcctgagtcgagaatcgcagtttcccgctcggctcgtttggggaaatcggttattttcgtccggccgcgtgggctctctgaagtgtttgggctgtcggctatttgccccgagttttcaggtttgaaaaatcgtcgtaatttgttcatcacgcggctgccgaactttaagtggtggtggaagtttcgtgcctcggcgtggcccccgtgctccgattcctgatcacctgcccgccccgcacgctatgagcgcagggcgcgcgggctggggctcttgctgctcgggcacgcgcgcgcggtccccgtgttaatgcctcggttgtcctgcaagttcgcggaccccgacagcaccgtttcctccgctccggtggcgcgccgcgtgcggtcagacacgatgagctgcggcagcgacgtgtgccgggacggcggcagcagcagcggcagcgaggagttc

SEQ ID NO: 21044 - DNA, 1834 bp, Zea mays
  Clone ID: LIB3279-006-C5_FLI
aagcctcaaatccgctctattcctctctccccctctctcccccatcgcaccagcaggcgagcgcgaggcggaggagtagagatggagtcggaccagggcaagcttttcatcggcggcatctcctgggaaacgacggaggagaagctgagcgagcacttctccgcctacggcgaggtaacgcaggccgccgtcatgcgcgacaagatcaccggccgcccccgcggcttcgggttcgtcgtcttcgcggatcccgccgccgtcgacagagcgctgcaggacccccacaccctcgacggccgcacggtcgatgtgaagcgggcactctcgcgggaggagcagcaggcctccaaggccgcgaaccctagcggtggaaggaactccggtggcggaggaggcggcggtggcggcagcgatgcaagtggtgctcggacgaagaagatctttgtgggcgggctgccctctactctgactgaggatgggttccggcagtacttcgagacctttggcatagttactgacgtagttgtcatgtatgaccagaacacacagcgcccacgtggtttcgggttcatcacctttgattcggaggacgcggttgaccgcgtgctgcagaagaccttccatgatcttggtgggaagctggttgaggtgaagcgcgcattgccccgtgaggcgaatcctggcggctctggtggtggtcgttctgggggaggtgggggttatcagagcaacaatggccataacaccagctctggtagctatgatggtagaagtgatggtggcaggtacgggcagacacaacagggtagtggtggtggtggctatcctggctacggtgcaggaggctatggtgctggggcagctggatatggatatggtgctaaccctgcagttggatatggaaattatggggctggagggtatgggggtgttcctgctgcttatggtggacattatggaaacccaggtgcagctggttctggttaccaaggtggacatccaggctcaaatagaggaccttggggcagtcaagctccatctgcatatggaactggagggtatggtggcagtgctgggtatagtgcttggaacaactcttctggtggcggcaatgctctgaatagtcaagcccctggtggacctgcaggctatggaagccagggctatgggtatggtggatatggaggggatccatcatacgctagtcacggaggatatggggcttatggagcacgtattgatagtgctggcaatcctgctactggtggatcatctggatacaatgcaggctatggaagtggtggtgccaactctggctattcaagtgcttggagtgatccttcgcaaggtggtggatttggcggttcggtcaatggaggtgctgaaggacagtcaacttatggcactggctatggcagtgtgcagcccagggttgctcagtaaagagaggcattttgagtgtgcgaaatgaaccagtgcatctgggcagtctatgtattgatttgtcattccagtctctctggttgctctcagcattttgaagattgcccatttgctgcttaaatcagtatttatccgggttggaatgcttgatcctttagcggcttactactagaacgtctagtcaataagtagctaaaatgtggagtagcagtatcttgcggaatgcttttattaatttttacatttagctttatccatctgtgtggtttgccatgagtggagtttcaggttgcttcatctctagttataagctagagtagcttgactacttatgggcaaaattatctagttgtacctctattctacagatcatatatttgtgtttgacatt

SEQ ID NO: 21045 - DNA, 1373 bp, Zea mays
  Clone ID: LIB3279-008-D1_FLI
caacactcgcgagtcgcgagcacagatcgaacaggcaggcggcctctgtcctctgatctgtcgccattgtctcgttgtgttgtcccggaggagcaggagcaggagcgatcaggccaacgctttggactcctggacctaccccgatggcgccagcctcctctccgatgagacagtaatccagcgagcgcgagtgagaggcaaccagcaaccatgaggccagacacggcggcctccgcctctccgactccgaagaagaaacccgacagtaaagccgcgctggacctcgcgtcgtggagcttcaacgtcaccacgtccgtcgggctcatcatggtcaacaaggctctaatggcgacgtacgggttcacgttcgccacgacgttaacggggctgcatttcgcgaccaccaccgtgatgaccctcgtgttccggtgggtcggcctgagccagccgtcgcagcttccgttaccggacctagccaagttcgtggtgttctccaacctgtccatcgtggggatgaacgtcagcctgatgtggaactccgtcggcttctaccaggtagccaagctgtgcatgatcccggcgtcgtgcctcctggaggtggtcttggaccgcgtgcactactcccgggacaccaggctcagcatcgcggtcgtgctcgcaggagtggcggtgtgcaccgtcactgacgtgagcgtcaacgccagaggcctggtcgcggccgtcgtggctgtctggagcacggctctgcagcagtattatgttcatttcctccagcgcaagcactctctcaactcgttcagcctgctgggccacacggcgccggcgcaggcagggtcgctgctgctggcagggccgttcgttgactacctgctgacagggcaaagggtggaccacttcagcttctcgtctctcgctctgttgttcctcgcgctgtcgtgcttcatcgcgatcggggtcaacctgagccagttcatctgcatcggccgcttctccgccgtgtccttccaggtcctgggccacatgaagaccgtgctcgtcctctccctcggcttcctcttcttcggcaaggaaggcctcagcctccaggtcgtcgtcgggatggccctcgccgtcctcgggatggtgtggtacgggaacgcgtccgctaaaccgggcggcaaggagcgccgcggcaaagacctgccggtgagcctcaaacaagacaaggacgacactgacaaataatcatttgttatagttacaggtatacgtgtaatcgtttaatcacatggtgcaattgtttgccaaatcattgaacaatttcctgtggtatacgtgtgtgtgtgtgtgtttgcctttgccaaaacattgaacgatttggtttgtaaacgcgt

SEQ ID NO: 21046 - DNA, 1098 bp, Zea mays
  Clone ID: LIB3279-008-D7_FLI
gcgcgcagcaacgagaggggcaaacaagcttgctactgtgatttctcgtccgagcagcggcggaggagagagagagagcatggccgaccacaaggaggagcctgtgccggagtctgtgatggacaagatcaccgagaagttccacggcggggactcgtcgtcgtcgtcgtctgactcggacgacgagaagaaggggtcctcgttggcgtcggcggcggaagccatgaaggccaagatctaccgccttttcggccgggagaggcccgtccactccgtcctcggcggcggcaagcctgccgatcttatcctatggaggaacaggaagatctctggcggggtacttgctggtgccacggccatctggctcctattcgaggtcatggagtaccatctcctcaccttggtgtgccactgtctcatcctctcgctggccatcctcttcctgtggtccaatgcctccactttcatcaacaagtccccaccgaacattcctgaggtcaaaatccctgaggatgtggctgttaatgttgccctgtcactgagatatgagatcaacaggggctttgctaccttaagggagattgggcatggccgtgatctgaagaaattcctaattgttattgcaggtctctggcttctttcagttctcgggagctgctgcaacttcctgacactgttctatattgtctttgtggcactgtacactgtaccagttctgtatgagaaatatgaggacaaggttgatgcttttggtgagaaggctatgactgaactgaagaagtattatgccattttcgatgagaagtgcctatcgaagattccaaagggcccccttaaggataagaagcactagattggtagtaaggtatttgctatgaatcaacatctacattatgtcactagctgtcacctctttctctgaaggatggtgcttggtcctggtctctagttgatagtatataatctgtatgggcaactttggtgtgactgacagtctgctgaaaactgttgatcttgtttttggtttcagctttcaccatagttgcctggaagcttgaaatatattatgcgctctatcaatgtcatgtgaactttgtc

SEQ ID NO: 21047 - DNA, 429 bp, Zea mays
  Clone ID: LIB3279-008-E3_FLI
caaaaataggaggccggaggcgggcgaggaacgtgaataaaatatcattcggagaaacaagagaggccggggaatcgcgtcggaattccggcgaatcggcgggatccggccgggatctgcgcgccggatgaggggtcggcaccatgaaatggtccacattactcagtaaggtcgtcttcgccggcggccagcagcagcagccgccacctccgccgtcgccgccgccggagtctccgttccacggccagcaggtggtccaggacctctccaccccgaggctcagctccgcctccaccggcggggacgagggcggcttcgacgcggcggccgggagctcgccctctgccgctgcgtcctctgccagggggagaaatgaattggagtcgaactttaggagattatgggaagaatttcgctcttccagctctg

SEQ ID NO: 21048 - DNA, 541 bp, Zea mays
  Clone ID: LIB3279-008-F2_FLI
ccaccagcaaatccccaattcctccgagttcgagcgaccatgtcggggcgtggcaagggcgggaagggtctgggcaaaggcggcgccaagcgtcaccgcaaggttctccgcgacaacatccagggcatcacgaagccggcgatccggaggctggcgaggaggggcggcgtgaagcgcatctcggggctcatctacgaggagacccgcggcgtgctcaagatcttcctcgagaacgtcatccgcgacgccgtcacctacacggagcacgcccgccgcaagaccgtcaccgccatggacgtcgtctacgccctcaagcgccagggtcgcaccctctacggattcggcggctgagaggcgctaccgccgctggtggccgtggcaaaagtcttgggtcgcggtcaagaaatcgagagtattctggatgacgtgcttagtttcgtagtattattatcactagtgcttattgttagcggttgttgggttcgaccactctaagccactgtcaaacagtaatatatgagtaccgaatttccgtgtttcg

SEQ ID NO: 21049 - DNA, 982 bp, Zea mays
  Clone ID: LIB3279-008-H7_FLI
gtgtcgacgactccagggtttcgcgtacctccccggcggtgtgtgcgtgtcgagcatggggcggccggtgtcgtacgagcaggccgtggcgtggaaggtcctgagcgacgacgacacgccgcactgcctcgccttcatgttcgtcaactggtccttcgtgtgagtgaggaccggccccctagcagagccagccagtcgcgcgcgcccgcccgcctagcatttgcagctgttatttgttgaactctgtatccaagtactggtcgctcttgcctttgtccaggcaatcctgtgaaacgcacctgccccccagttcatccgtggaacaaacgccttttgtagttgcttgcttgctatgttatgatggatcctggtctgctgcatctcctaaaaattggcttggaacattgcgtgcgtccccttctgctgaattcgttgcttctcgcttgattaaggaaagcgcggtacatgatgtggccgacctcggacgcagacgtggggacgtggtgggaggatggcagccgctgcggtggttggactcgcaaccgaactgattttgttaggtcaggtcaggtgcgcgtggtcttctggcagaggccacctgagctggcgatggacgtgaaggaaggagaggtggcagaagctacggctgagggcacctgaggacggcgacgggccgcctaatccccccggacccgtcgtcgtcgctgcgtgcgctggcgacggtcgtggcgccaaactcgctgcgtttcggcaaaggattagcgcaaccgcggcgctgtcgaaggtgtacgtgagcgctggatgatctcagattctcagtgatgggactttgttagatcaatccaaggaatggacagggagcgtttgtggttggttttgttccagccatgacatggaattcgctacgtgtcgtggcgcaactgcaaggaccgtgtgtgtgtgatgtgcatcgaagcttcaaatataactgatgaaatttctg

SEQ ID NO: 21050 - DNA, 703 bp, Zea mays
  Clone ID: LIB3279-009-D9_FLI
ccgcatccacaacctgcctctctcgtcccctggcggcgtccgcggcaggatggcggaatctacggcgaggacggtgaaggatgtcaacccgcacgagttcgtcaaggcctactccgcccacctcaagcgctccggcaagatggagctccctgagtgggttgacattgtgaagactgcgaggttcaaggagcttcctccttatgatcctgactggtactacatcagggctgcatccattgcaaggaagatctacctaaggcaaggcatcggtgtgggtggctttcagaagatctacggtggccgccagaggaatggctcccgcccaccacacttctgcaagagcagtggtgctgttgcacgcaacatcctgcagcagctgcagattatgggcatcatcgatgtcgatcccaagggtggacgcctcatcaccaaccagggaaggcgtgatctggaccaagtggctggaagggtcgctgttgaagcgtgagcagtgtcatctttggtttcaatggtgtcatgtttgatggttgagaagactgcgctctatttgctcttttgggttaggattttcgagttcagaggactttaaggtttattgcatctagctatggcgccacactatgttccccgagtacctaatgtgatatcaagactcaattctcgaatctaagatatatgtttgcaaagtgtctgaccaggtatc

SEQ ID NO: 21051 - DNA, 545 bp, Zea mays
  Clone ID: LIB3279-009-E4_FLI
gccagtaactcgcatcttcctccgtgatccaagttctagcagcgcagcgctcggtttcgacaatatgtcggggcgcggcaagggcggcaagggtctgggcaagggcggcgccaagcgccaccgcaaggtcctgcgcgacaatatccagggcatcaccaagccggcgatccggaggctggctaggaggggcggcgtcaagcgcatctccgggctcatctacgaggagacccgcggtgtgctcaagatctttctggagaacgtcattcgtgacgccgtcacctacaccgagcacgcccggcgcaagaccgtcaccgccatggatgtcgtctacgcgctcaagcgacagggccgcaccctctacggcttcggcggctaggtcgcttcgtcatctggtggcgaactgcatgtgtgtcggcggtggtcgtgttgtgtgcctaatctagtgtagtccgttctctatatcgtcgctgtgttctgtggtgtcttgtatcccatttcctgcaataccaacttgccattatcaatggaaaaccctcgttttcatc

SEQ ID NO: 21052 - DNA, 657 bp, Zea mays
  Clone ID: LIB3279-009-F7_FLI
gaagccgccgccgcagcaatcacagcagcccggagaaagcccaggtccgacaagatgcagatcttcgtgaagacgctgacagggaagaccatcaccctcgaggtcgagagcagcgacaccatcgacaatgtcaaggccaagatccaggacaaggaagggatcccgccggaccagcagcggctgatctttgccgggaagcagctggaggatggccgcacccttgcggactataacatccaaaaggagtctacgcttcacctcgtgcttaggctccgcggtggcatcattgagccctcgctgcaggcgctcgctcgcaagtacaaccaggacaagatgatctgccgcaaatgctatgcacgactgcaccctagggctgtcaactgccgcaagaagaagtgtggtcacagcaaccagctgagggccaagaagaagatcaagaactgaggtgctgctcctagtcagtttcatggacaatgttgggctgtattgctgtgtggttgttgaaccgtgtttgtttacccaacatttgggccttctgttatgttttaccttgttgtcgatgacacaatactatatgacaatagcaactctgttattgtagttttggtcactgttcacctgatatgtgccatatttcggtaagtatcgttagtgggc

SEQ ID NO: 21053 - DNA, 570 bp, Zea mays
  Clone ID: LIB3279-009-G4_FLI
gtgctcagcgccgtcaacgacctcgccatcttcaatggatgcacaacgaaggcaattgagcatgctgctgacaaccctgctgttgtggaagcaattggagtgcctatagtcagaggaccgtggtatgatgcttctcttgaggtgggccatcgacggcggtctgtgtcatgcacattccctgtatctgggccacatgggtcaggatttctccagattaaggcaacccgagatggaggtttgttttcagttttctcctttgctgtgccctgaatagtcacattatacaaaaacgatggtgttgtgtagaggatggtctgctttcgtttctgcggcatcacgactggaagatcctattgctggaggctcatcttgaagcaccatcagatgatgaggaccagagaaagctggttaaggtgaatcttgcaagcagtggccgtggggaagatggggatccagagagtggttaatcttttgtactgaattccatggtgagtggaagatcgtgtcatctgaatggactccaaatattaaatgacatggagatctagggaagcagatgttttttgctcc

SEQ ID NO: 21054 - DNA, 867 bp, Zea mays
  Clone ID: LIB3279-009-G8_FLI
ccacttccacgtccagggctgctcaggcctttgaccttgtccactatgatctctggacctctctcgtcatcaacctctctggttacaaatactaccttatcattctggattatttctctcactttctttggactttcccgcttcggttgaagtctgataccttgtccaccctcacacacttcttcgcctgggtctccacccagttctgtcgcccaattcgtgcccttcagtgtgacaatggtcgcgagttcgacaactccgactcttgctcctttctctcccacggcgtttagttgcgtctctcgtgcccttacacctctccccagaacggtcaggccaaacgcatcattcgcaccactaccaacatgatttgttgcctgcctcctctttcaggcgtctctccctgctagctattgggcaaaggccctgaacaccactacccatctcctcaaccccccccccctcgaaggcggtgagccaccacactccccacttcgccctgtatagcacagccccctcctacgaccacttccgtgttttcagttgtgcctgctaccccaacacctccaccactgctccccacaagctatctcctcgctcgactcgttgccttttccttggttactctcctgaccacaaggggtaccactgccttgacctcctctctcatcgtgtcatcgtctctcgtcatgtcattctcgacaaagacgtttttcctcttgctggttccaccctgcctcctgatctcgactcactccttgagtatgatcttgatcctccaccaatgattcctccgctcgcgcctctccccacaccgcgcgcgatccaggcaccccaccatacgcggccccgtcgaccccgcctggg

SEQ ID NO: 21055 - DNA, 1044 bp, Zea mays
  Clone ID: LIB3279-010-D6_FLI
cctccctcagccgcgtcgcgtcgcatcctacgatccaaagctctctctgctcgcaggtcgcagccatggcgaagaactacccgaccgtgagcgccgagtacagcgaggctgtggacaaggccaggcgcaagctccgagccctcatcgccgagaagagctgcgccccgctcatgctccgcctcgcgtggcactccgcggggacgttcgacgtgtcgtcgaggaccggcggtccattcggcacgatgaagcatcagtcggaattggctcacggcgctaacgcggggctggacatcgcggtgcggctgctcgagcccatcaaggaggagttcccaatcctctcttacgccgatttctaccagctcgcgggagttgtggccgtggaggtcaccggtgggcctgagattcccttccaccccggtagggaggacaagcctcagcccccacctgagggccgccttcctgatgccactaagggttctgaccacctgaggcaagtttttggcaagcagatgggcttgagcgatcaggacattgttgccctctctggtggccacaccttgggaaggtgccacaaagagcggtctggtttcgagggggcctggactacaaaccctttggtctttgacaactcttacttcaaggaacttctgagtggtgataaggagggccttcttcagctcccaagtgacaaagccctgctgagtgaccctgttttccgccctcttgtcgagaaatatgctgcggatgagaaggctttctttgatgactacaaagaggcccacctcaagctctccgaactggggtttgctgatgcttaaatagaccctatcctggagtgatacattctgctgcatgtggtcttttgcatctggagtcaatgtgaacaagcagattgtcgtattgtctttctcgtaataaatttgtcaatgttgagcccttaggcttgaattgtgggaccctttgttcgttttcctagactctgatgctgtatgcaactgaaacgagtaaatctatgatcttaaggctgcagtatgttcttgtgtt

SEQ ID NO: 21056 - DNA, 635 bp, Zea mays
  Clone ID: LIB3279-010-E6_FLI
cgccgccactcaccagcaaattcccgagccgccccttccccatctctttcgcgacccatttgatcgattcctgatggcgcccaaggccgagaagaagcccgcggagaagaagccggcggaggagaaggccgagaagaagccaagggcggagaagcgcgtgccgagcaaggagggcggcgagaagaagggaaagaagaaggcgaagaagagcgtcgagacgtacaagatctacatcttcaaggtgctcaagcaggtgcacccggacattggcatctcgtccaaggccatgtccatcatgaactccttcatcaacgacatcttcgagaagctcgccgccgaggccgccaagctcgcccgctacaacaagaagcccaccatcacctcccgggagatccagacctcggtgcgcctcgtcctccccggcgagctcgccaagcacgccgtatccgaagggaccaaggcggttaccaagtttacatcctcttagggtgccgccgcacgttgctacgatcctgtttaattctcatatttaggcctgtgctaggttgcttctgcaacaatgtagaatttgttataattgctgaatgaatcagttacccctgttgaagtttctaatatattgtaatcttgctagt

SEQ ID NO: 21057 - DNA, 507 bp, Zea mays
  Clone ID: LIB3279-010-H4_FLI
aagagatcaagatccaggcttgggaggaccatcagaaagcccagatagaagctgagatgaggaaaatcgaggtcgaggtggagcggatgcgtgcccgcgcgcaagacaagctgatgaccaagctcgcgtcggcgaggcacagcgcagacgagaagcgtgccgcggcggagctgaaacggaaccgcgcagccgcgaggaccgctgagcaggcagagcacatcaggaggaccggccgggtgccgccgtcgtttggctgctggaactggtgctcatgaagtgcccatggaagatgagtcgcccgttgagaatgagtcgcttgtaagctgctgtaactatatatatatatacacacgtatgtaagatgtgagatccatgcgtcctgtgctgtggtggttactgtgtaagtgtcacagatgtaccgaattcaaggccgagcttggattcctagtccacatatgtgataaacttcacaccatgctagttgtgactggatttgatttgtgctct

SEQ ID NO: 21058 - DNA, 1513 bp, Zea mays
  Clone ID: LIB3279-011-A10_FLI
caccctagtcgtcgtagcggcctacgggctcttgggcagagagagaagctgcatagcctgcatatgctccagctgctgcgcgcaatgatggcactgacggagcggcagccgcagctggagaagaagccgacgcgcgggagggcgccgctgtccgggaaggccgtcgcggcgctgtgcgtgacgagcttcgttgtggggctgctgcttagcggcaacgtgtcgctcatgtcggcctcggcgtcaccgtcgtcctcgagcacggacagcgagaagagcattcgtgtttccggttgcgacaatgagcgtaaactcggagagaaccaccccaaggatctcctgaacgaggtgtcgagaactcatcaagcaatccagtcgctggacaaggcggtgtccaccctggagatggagatggccgtggaacgcgctaggggcgggggcgggggcggcggcgccgcgtccatggcgtccagcaggactccccagaaggccttcgtcgtggtcggcatcaacacggccttcaccagcaagaagcggcgcgactcgctccgcgacacctgggtccccagaggggataagctgaggaagctggagcgggagaaggggatcgtggtccggttcgtgatcgggcacagcggcacgccgggcggcggcgcgctggaccgcgccctggacgcggaggaggccgagaccagggacttcatgcggctggaccacgccgagggctaccacgagctgtcgtccaagaccaggacctacttcaccaccgccgtcgccacctgggacgccgacttctacgtcaaggtcgacgacgacatccacctcaacctcgggatgctggcgagcaggctggcgaaacacaggacgcgcccgagggtgtacgtcggctgcatgaagtccgggcctgtcctgtcacagaaaggagtcaagtaccacgagccagagtactggaagttcggcgacgagggcaacaagtacttccgccacgccaccggccaaatctacgccatctccaaggacctcgccgcctacatctccatcaaccagccgatccttcacaggttcgcgaacgaggacgtctcgctgggcgcgtggctgatcgggctcgaggtcgagcacgtcgacgaccggagcatgtgctgcgcgacgcctccagactgcgagtggaagaagcgagccgggaacgtttgcgtggcgtccttcgactggtcgtgcagcggcgtctgcaagtcggtggaccggatgcgccacatccacaaggcgtgcggcgaaggcgaaggcgccgtctggaacgccgccacatgagatgagattgccattctcgtcggaacacttgttgtatgcggagcttcacttgatgaaaacgcgaagccgagagggaagcgcttgagcattccgcatggcaagcgtggttgtttcacttgagacggcatgctgtgatccacgtaaaagctcatggattatttggtgtgtcaacgtgatcctttttggatcgaaaagaaatattgaacggtgg

SEQ ID NO: 21059 - DNA, 452 bp, Zea mays
  Clone ID: LIB3279-011-C10_FLI
tacaaaggaatgcttcgaagtgccaccgaaagcaacccgtgtagtttctgagagaatggcgtttccattgtcgttgatgcattcccatgattatgtttccaaaaggttagcattagttggagatgctgctcatactgtccaccccttagccggccaaggtgtaaacttgggctttggtgatgctgctgctttagcaaaagttattgctgagggagtttcagtgggctcggatgttggggatctgactttgctacagcggtatgagaaggagaggaaggctgccaatgtggcgatggcagcagtgctagatggttttcagaagatgtactctgttgatttggggccccttaatgtagtgagagctgctgcgttccacggtgcccagtacatatcaccactaaaaaagaacatcatctcttatgcaacgggtgacacgaaatggtcactatttc

SEQ ID NO: 21060 - DNA, 1737 bp, Zea mays
  Clone ID: LIB3279-011-D5_FLI
cttttctcgcactcgtactccctcctccgctccggctaggaggctgctccctccgccgctccgccttcgtcgcgcggccatcgtttccggctctgtccccggatatctcttcgccaccgcttcctgcgccgcggcgccgccacaaccgaaggcgacccagtcgcagtcgccttcaacactatggtgactcctcccactgtcgagcaggaggacgaggagatgctcgtgccccgccaggaggcggtcgacaccgacgcagcgcagcccatggaagtggtcgcacagactgaggtggtgagcacggcggagagccagcctgtggaagatccgcagacatcacggttcacttggacaattgagaacttcaccaggttcagtgagaagaagcactatttagaggtttttgttgttggcggattcaaatggagtgtgctgattttccccaaggggaacaatgtggaccacttctcaatgtacttggatgttgctgactcaaccagccttccgtatggttggagccgctatgctcagtttagtcttgctgttgtaaaccaaatccagccagagtttacgatacgcaaagagacccaacatcaatttaatgctcgtgagagtgattggggtttcacatcttttatgcctttgagtgagctctatgatgcaagtagaggttacctcgtgaatgatactgttgttgtggaggccgaggttgctgtccgcagaatggttgactattggacatatgactcaaaaaaggaaactggttatgtgggcctgaaaaaccaaggagctacctgttatatgaactcccttctacagacactataccatataccctacttcaggaaggctgtatatcatatgccaaccactgaaaatgacataccatcaggaagcattcccttggcgctgcagagccttttctacaagctccagtacagtgacagtagtgtagctacaaaagagctgacaaaatcttttggttgggacacatatgattctttcatgcagcatgatgtacaagagctcaacagagttctgtctgagaaacttgaggacaaaatgaagggaactgtcgtagaaggaacaattgagcaattatttgaaggtcaccacatcaattacattgagtgtataaatgttgagcataaatctaaccgcaaggaatccttttatgatcttcagcttgacgtcaaaggctgtcgtgacatttattcgtcgtttgataaatatgttgaagttgaacgtctagagggtgataacaagtatcacgcagagaatcatggtctacaggatgcaaaaaagggcgttcttttccttgatttcccccctgttttgcaactccagctgaagcgctttgagtatgattatatgagagatagcatggttaagattaatgatcgctatgagttccctctgcaacttgatctggatagagatggtggcaaatacattgctccaaatgcagatcgaagtacacgaaacctttacactcttcacaggtataaatttgatgatgaacgtgtaacaaaagaagatgctaagaaggctcttgaagaacaatatgggggtgatgaagagttaccccaaataaaccctggtttcaacaacgctccatttaaattcacgaagtattcaaacgcgtatatgcttgtttatattcgtgaaagtgccaaggagaaaattatgtgtactgttgatgaaaaagacattgctgagcatttaagggtaaggttg

SEQ ID NO: 21061 - DNA, 629 bp, Zea mays
  Clone ID: LIB3279-011-F1_FLI
cagttggatgagtgggtgttgtgccggctgtacaacaagaaaaacaattgggagaaggtgaaggctgaggagccggaggcggcggcgccgttccgtcaccagcagggcgcagcggaggattccatgtctgacagcttccagacgcacgactcggacatcgacaacaatgccttcggcatgcagaacggcttcggtaacatggtgcacgggcagaccatgaccatgaggaacggcattggcagcgtgacgaggacggtgaaggaggacaactattggttcaccgacctgaatctggatgatctgcaggcaccctacaacgtgacccatgtgttgaatccgaaccctgtccagacgatgaatctggcagctgggcaaggccatggctacttgcagtctatgagctcgccgtcgacgaagatgtggcagaccatcttgcctccgttctgagagttgctgtgatggaagggggaagagatgatcttgggcgtaggagtggttagactggctaggaacagcaggtttaaaatttggagggtctgaattctgcaactgttgctggtagtcttgtaagggttattcatttgttaaattgtgtgcttggtaatataccaaaaggaaaatccatctcc

SEQ ID NO: 21062 - DNA, 1384 bp, Zea mays
  Clone ID: LIB3279-011-F9_FLI
cgtctgccttctgcgcctccatttcggcctctgtcccttgcaagttcaatctcacctccaaccatgggtaaagagaagtcccacatcaacattgtggttattggccacgttgactctggcaagtcgaccaccacaggacacctgatctacaagcttggaggcattgacaagcgtgtgatcgagaggtttgagaaggaggctgctgaaatgaacaagcggtccttcaagtacgcatgggtgctcgacaagctcaaggctgagcgtgagagaggtatcaccattgatatcgctctgtggaagtttgagaccaccaagtactactgcacggtcattgatgcccctggacaccgtgacttcatcaagaacatgatcactggtacctcccaggctgactgtgctgtccttatcattgactccaccactggtggttttgaggctggtatctccaaggatggccagacccgtgaacatgctctccttgcgttcacccttggagtgaagcagatgatttgctgctgcaacaagatggatgcaaccactccgaaatactccaaggcacgttatgatgagattgtgaaggaagtctcatcctacctcaagaaagttgggtacaaccctgataagattgccttcgttcccatttctggttttgagggcgacaacatgattgagaggtccaccaaccttgactggtacaaaggcccaaccctgcttgaggctcttgaccagatcaccgagcccaagaggccttcggacaagcccctgcgtctgcccctccaggatgtgtacaagattggtggtattggaactgtaccggttggtcgtgtggagactggtgtcatcaagcctggtatggtagtcacctttggtccaactggcctgactactgaggtgaagtctgttgagatgcaccatgaggcgcttcaggaggctcttccgggcgacaatgttggcttcaacgtgaagaacgttgctgtcaaggatctcaagcgtgggttcgtggcctccaactccaaggatgaccctgccaaggaggctgccagcttcacctcccaggtcatcatcatgaaccaccctgggcagattggcaacggctatgccccagtgctggactgccacacctcccacatcgccgtcaagtttgctgagctcattaccaagatcgacaggcgatctggcaaggagctcgagaaggagcccaagttcctgaagaacggtgatgctggtatggtgaagatgattcccaccaagcctatggtggtggagacattctccgcgtatcctcccctgggtaggtttgccgtccgcgacatgaggcagacggttgctgttggagtcatcaagagtgtggagaagaaggacccaaccggcgccaaggtgacca

SEQ ID NO: 21063 - DNA, 744 bp, Zea mays
  Clone ID: LIB3279-011-H6_FLI
gccgcaccacagctcagctcccacccactcccaaaccctctcgccggagccccagcaacccgccagcaagcaagatggacggcagcaaggcgaagaaggtggcggcgaagaagttcggcgggccgaggaagaagtcggtgaccaagtccatcaaggccgggctccagttccccgtcggccgcatcgggcgctacctcaagaagggccgctacgcccagcgcgtcggctccggcgcccccgtctacctcgccgccgtcctcgagtacctcgcagcagaggtgctggagctggccgggaacgccgccaaggacaacaagaagagccgcatcgtgcccaggcacctgctgctggccatccgcaacgaccaggagctcgggaggctgctgtccggcgtcaccatcgcccacggcggcgtcatccccaacatcaacccggtgctgctccccaagaaggccgccgagaaggctgagaaggccgagaagaccgccaccaagtcgcccaagaaggccaccaagtcccccaagaaggccaccaaggcgtagatctggctccgagcgcccgtgccggtgaactggactgatggtgctccgtcagccctcgtgtgcctagtgtctctgtgttaagttagctgtggtgtgttccagagtgtgttgaagcttgttcttttgctttgccccgccatgtaaccgtgaacgaagaggaagcgtcttgcttcctctgttctgctatatcaatctggtttct

SEQ ID NO: 21064 - DNA, 945 bp, Zea mays
  Clone ID: LIB3279-011-H7_FLI
gtttttctccgccccgcccgaagccgaggaggagaggggagcagcgagatcgtgcgcgcctccgagatctccacgaagttgtggtaacatggggctcaccttcacgaagctcttcagccggctcttctccaagaaagagatgaggatccttatggttggtctcgatgcagctggtaagaccaccatcctctacaagctcaagctcggagaaatcgtgaccaccatccctacaatcgggtttaatgtggagactgttgaatacaagaacattagcttcactgtctgggatgttggaggtcaggacaagatcaggccattgtggaggcactatttccagaacacccaaggccttatctttgttgttgatagcaatgacagagatcgtgttgttgaagcaaaggatgagctccacaggatgctgaacgaggatgaattgagggatgctgtcttgctcgttttcgcaaacaagcaagatctaccaaatgcaatgaacgctgctgagatcaccgataagcttggtctccattccctgcgccaacgccactggtatatccagagcacttgtgctaccacaggagaaggtttgtacgagggtcttgattggctctccaacaacattgcaaacaaggcctgaatggacaattctgctgtttcacggagcacatctgcacatggcgaggcatggtcattttgaccctcagacgatcattgtttcattggaaagtatcgtatttctatgctaggcttttcagagagattactctctaagaaactgatccgatattaagacactataattggcattggcactagtagatcgtttactgagtaatgcagtttattttaatgtatcccaattgtgttgtaagatacaactatgcgtcggaattacccattcaatttgaatctagatacgtagtttttgttatatacttatacttggat

SEQ ID NO: 21065 - DNA, 784 bp, Zea mays
  Clone ID: LIB3279-012-E10_FLI
ggcctcgtagataaaccagcactactcatccgtcgccccacggaagtttcggcggcgccggcgtgctcgtgatctcaaccaaggcgtgtctccgctccggtcacccgtcactccacgcaaacatgtcgaggaggaagaccagggagccaaaggaggagaacgtcacccttggacccactgtccgtgaaggagagtatgtctttggtgttgctcacatctttgcatccttcaatgacactttcattcatatcaccgatttgtctgggagggaaactctggttcggatcaccggtggcatgaaggtgaaggctgaccgtgacgagtcgtcaccttacgctgctatgcttgctgctcaagacgtcgcacagcgctgcaaggagcttggcattactgcactgcacattaagcttcgtgccaccggaggcaacaagaccaagacccccggacctggtgcccagtctgccctcagggcgcttgctcgttctgggatgaaaatcggacgcattgaggatgttaccccggtccccacggacagcactcgcagaaagggcggtaggaggggaaggaggctgtaggcatctctggcgctcttgccggctcttggcggcatgaagctagtcctctctgggtggtgttgctgttttctgtgtttgtcaagacgagctttaattttgctctatgtggatgaccgtttacagttactccaacctatatgattttgcatggataatgttttttggctgaggaattggctcgtcatatttatatatgcattttcactctc

SEQ ID NO: 21066 - DNA, 667 bp, Zea mays
  Clone ID: LIB3279-012-F3_FLI
cgaatccctctttcttcgcctgctggctctctcgtcgtccgttcctcgtcctctccggcattcgaggatagtttttcgccgggggcggcctagaaatcagccgtcaggtgaaccgggaggggtggttgcctgaggaggaagagatgatcacgcgagcgaagctggtggagcagctgcgggagcaccagatccggtcggcccagtcctactccgccgcgctcgccgtcttctcgcccaacccccacatcgcctccaggagagatctcaaggttgctgtcatctatgcggtcctgttttgttttctcatggtgtcctgctatgccgccctttacttgaaatggttcagactttcagccatgtttgtaaccttcgggatcctccttccagtgagtctcaaaatctctaggcatagaaggctgaagaggaaaagagaaaggagactgttgttgccactgtccatgtgaatacattttttttgatacaccctgtaacattctagtggagttggccagctacagaagatagggaaatcctcggcagacgaactcaactttacggccccagcctacgctttggaaaatgttgtatgcatcacctgttgtgcttctgtcctccacatgtgtacacacacacatacgtgccgaacactttgcgttgttttgccccc

SEQ ID NO: 21067 - DNA, 1168 bp, Zea mays
  Clone ID: LIB3279-012-F9_FLI
tatggataaagagttcatatgtttctacttgagttctatactgttatggtcactattaagaagctaattttaagtcctatgtggctatgtgctgtgtactgcctcgttgcattatgtgaaagactgtgagtatcgagctctctaaagtcaatgtatattttcaaaaccttgatttaatatagttatacctgattacatatttgtttcacaatgttgtttcctactctgatttgtactttatgacaatttgaacatgtgtctcagttatttgcgaacaaagagttataattccaaacgggcatggggagaagcttgttggtttattacatggaacaagttcaaagaatcttgtgatcctttgtcatggattccaagccacaaaggatgacagcatcttggttgcccttgctaatgccatcacaaaggaaggaattagtgcttttcggtttgatttttctggaaatggggaaagtggtggtgaattccagtatggaagctacagaaaagaggcagctgatttgcgctctgtagtattacatttctcagaacagaaatatgacataattgctcttatcgggcatagcaaaggagggaatgctgttcttctttatgcttccaagtaccatgatgtccctgccattgtgaacatttctggccgctttgcattagagcgaggtatggagggacgccttgggaagaatttcatgaggagaataaacgaagatggatacattgatgtgaagaataaaaaaggggagttgcagtaccgggtgtcgaaagcgagtctggatgaccggctgagcactgataccctattctccagccgtgccataagcgaagactgcagggttctcacgatccacggcgccaaagacgagaccgtcccggcggaggacgcccggcagttcgcggcgaacatccgcaaccacgagctgcgcatcatcgcagatgccaaccaccgttacaccgggcacagggacgagctggcctcgctggtgctgggcttcctcagctcccatccctaccagaccacgtcgcgcttgcgtccgagactgtagatagagtagagcacacccacttgaccgtttgcgaacaaaaaaaaaatcccctgtaccaatccaagagttgtgggtatggtggtgtgtttatccagaaccagaacacgagc

SEQ ID NO: 21068 - DNA, 719 bp, Zea mays
  Clone ID: LIB3279-012-G5_FLI
cgatcccgggcgctgtgggcgtcccgcgccgccgcctacctcaggatctccaccttccccagggccttctccaccgtgctgaaggatctgaaatatgctgacactcatgaatgggtgaaggttgagggcgattcagcaaccgtggggattactgaccatgcccaggatcatctgggtgatgttgtctacgtggagctgccagaagttggcgtcagtgtatcccaggggaagaacttcggtgctgtcgagagcgtgaaggcgaccagtgatatcaattcaccagtgtccggagaggtggttcaggtgaacggtaagctaagcgaggagcctgggttggtgaacgcaagcccgtacgagaaggggtggattatcaaggtcaagctcagcgattcaggcgagctcagttcgctcatggatggtgacaagtactcgaaattctgcgaggaagaagacggtcattgaagaaatcagagggtcttctgaacaccaaggacctgtgtctcaagctctatcagtgctttctggtctggagacctgctgtgacaaatttaaattggcaaggttcattgcatggaataaattagttaggatttgccctattccaccagggcttgggaaatccgagcttgtgttgtgagtggcgtggtcaagtttgattatctctttttagttgtaatctcgtgatttccttcttttttttaaaaaaaaatttatctttt

SEQ ID NO: 21069 - DNA, 889 bp, Zea mays
  Clone ID: LIB3279-013-A8_FLI
gcacagaaagacgaaagaagaaacggggcgactcgcagatccaagcggagaagctgcgtcgtggcctgaccctgtccgtcctctccggtcggcgagagcaagaagagatcccgcgccgtcctcttctccacctccacctccacccatggcggcctccaccttcagcggcgacgagacggcgcccttcttcggcttcctcggcgccgccgccgcgctcgtcttctcctgcatgggcgccgcctacgggacggccaagagcggcgtcggcgtcgcctccatgggcgtcatgcgccccgagctcgtcatgaagtccatcgtccccgtcgtcatggcgggagtactcggcacctacggcctcatcatcgccgtcatcatctccaccgggatcaaccccaaggccaagccctacttcctcttcgacggctacgcgcacctctcctccggactcgcctgcggcctcgctggcctcgctgccggcatggccatcggcatcgtcggagacgccggagttagggcgaatgcacagcagccaaagttgtttgtgggcatgattctgatccttatcttcgcagaagctcttgctctgtacggtctcatcgtcggtatcattctctcatcccgtgcaggccaatctcgcgccgattagaaggcttgatatacgccacactgagtcatctgccattgtattcaaagtgttcttttctcggtgaacaatgtgagggatcatgttgagcctgttccacctttgtaacattatattgctattatgtgaagacaaacctagctagctgttgcagttatgctgttgtacttgtatttgtttgaaaataataggcagcgagccccggatgtgatgaataataagcaagctggactagttgttaatgtt

SEQ ID NO: 21070 - DNA, 1331 bp, Zea mays
  Clone ID: LIB3279-013-C11_FLI
ccaccgatcgatcgagctctaggctctagctagcgcgctgcatatgtgaggcaacttttcatttatctgacacacgtacttacggcccacgatggccgccgccgccggcctcccgtggtggctgctgctcctcgccgtggtcccggccgtcaccgctgcggccaccgccggcggagaggggagggcgccggcgctgttcgtgttcggcgactcgctcatcgacagcggcaacaacaacaaccttgcgtcgcttgccaaggccaactacttcccctacggcatcgacttcgccggcggccccaccggccgcttctgcaacggctacaccatcgtcgacgagctcgccgagctgcttggactgcccctggtgccaccctactctgaagcctcgtccgtgcagcatgtcctacagggcgtcaactacgcctctgccgccgccgggatcctcgacgacagtggcggcaactttgtaagcagccatgcatgctcagagacatgactgactgactgactgactgacaaaaaagcatctctccaaatccaatgcaggtcgggcggatcccattcaaccagcagatccagaacttcgagacgaccgtggcacggatcgccggcgcggtgggcgcggcggcggcggcggacctggtggcgcgctccgtcctgttcgtggggatgggcagcaacgactacctcaacaactacctgatgcccaactacgacacgcggcggcggtacgacccgcagcagttcgcggacctgctcgcgcggcagctggccgcgcagctggccaggctgcacggcgccgggggcaggcggttcgtggtggccggcgtggggtccgtgggctgcatcccgagcgtgcgcgcgcagagcctcgcggggcggtgctcgcgcgcggtggacgacctcgtgctccccttcaacgccaacgtgcgggcgctggtcgaccgcctcaacggcaacgctgccgccggccttcccggcgccagcctcacgtacctcgacaacttcgcggtgttcagggccatcctcgccgacccggccgcgttcggcttcgccgtcgtcgaccgcgggtgctgcggcatcggcaggaacgccgggcaggtcacctgcctgcccttcatgccgccgtgcgaccacagggagcgctacgtgttctgggacgcataccaccccacggcggccgtcaacgtcatcgtcgccaggctggcgttccacggcggcgcggacgtcgtctcgcccgtcaacgtccgtgagcttgccggcatgtgacaagatgatcggagcggacatatattctcctatatatagcaataataatttgtttggtg

SEQ ID NO: 21071 - DNA, 759 bp, Zea mays
  Clone ID: LIB3279-013-H3_FLI
cgagtctccagccaaccgcatccagtccaccccatccccctcgaccccgacaaccccgagtcccgacccgatggcgcccaaggccgagaagaagccagcggagaagaagccggcggccgaggagaaggcggagaagacgaccgcaggtaagaagcccaagtccgagaagcgcctgcccgcctcgaagtcctccggcaaggagggcggcgagaagaaggggaagaagaaggccaagaagagcgtggagacctacaaaatctacatcttcaaggtcctgaagcaggtgcaccccgacatcggcatctcctccaaggccatgtccatcatgaactccttcatcaacgacatcttcgagaagctcgccggcgaggccgctaagctcgcccggtacaacaagaagcccaccatcacctcccgcgagatccagacctccgtgcgcctcgtcctcccaggagagctcgccaaacacgccgtctccgagggaaccaaggccgtcaccaagttcaccagcaattgagcagcctccagcgtccacggatttgttaggtctccccttcttacaagggttcttcgtcgtgtcctctacccctcccctccccgcctatgtatgtgctgtgaaatcgttgatgttctcgtcgggtgaacaaaggccagtagctagcttgcctgcttcataaatcgtgccggattgtaatgggcctcttagatttggcgcccctgttttggaatatagttgtatccgtgccttccctgcttgct

SEQ ID NO: 21072 - DNA, 382 bp, Zea mays
  Clone ID: LIB3279-014-D8_FLI
ccgcaagctgcccttccagcgcctggtccgcgagatcgcgcaggacttcaagaccgacctccgcttccagtcctccgccgtcgccgcgctgcaggaggccgccgaggcctacctcgtcggcctgttcgaggacaccaacctctgcgccatccacgccaagcgcgtcaccatcatgcccaaggacatccagctcgcccgccgcatccgcggggagcgcgcctaggcggccggccggataggccgtggcccgtggcgcaggctcttctcggaagtttgtactagtggtcgggtcgtgtggaaggagtggtgtactgatcagcaatgtctcaaaccatgtcaacctctttgttgtcatcaatggaaatcgccacttatgtgtgct

SEQ ID NO: 21073 - DNA, 1256 bp, Zea mays
  Clone ID: LIB3279-015-C4_FLI
cttccccaacagtggcatcctcgctgaccaaggtgtcgccggcaaaggcgtccccatcggcggcatcgacggcctcagctcagaggcggcgatgttcgacgtggagtacgggcggtggcaggaggagcactaccggctgatgtacgagcttcgggcggcgctgcagcagcacctgccggagggggagctgcagatgtacgtggagagctgcctggcgcaccacgacgagatggtgggcatcaaggagggcgccatcaagggcgacgtcttccacctcatctccggcgtctggcggagccccgccgagcgctgcttcctctggctcggcggcttccgcccctccgaagtcatcaagatgctgctgagccacgtagagcccctgaccgaacagcagatcgtgggcgtgtacgggctgcagcagtcggcgctggagacggaggaagcgctgagccagggcctggaggcgctctaccagtcgctgtctgacaccgtggtctccgacgcgctcagctgcccctcgaacgtctccaactacatgggtcagatggccgtcgccatgaacaagctctccacgctcgagggcttcgtcagacaagctgagaaccttcggcagcagacgctgcaccggctgcaccaggtcctgacgacgcggcagatggcgcggtcgctgctggccgtgtcggactacttccaccgcctccgcacgctgagctcgctctgggtcacacgccccagggcaccgcaggagcaataatagggccacagctggtgacggcggcgctgatgaatggtgatcgccggccgccgcatacaacggcgccacacgcgcatgtgtccattcatgcatatatgagtcgtgcatgggcgcatgcatggtgtgtcgttcgtcatcaagaacagagcttgcaggtagagccagttagggccggccgggggagagagagctagtgaggacgacaaaccaaccaaaggataatgttaatcttggcgacgattgtcgtgttgcttgctttgtagctatagctaggtgtagttgatcgttcgatcgcgatctatcgatcgatcggctgctgctgtagtcgatgcggtggagtgatgatgttgttctaagttaattatctctcatgatcaccggacgcatatgcttcgtagtcgtttaatttggagacgtgtgtggggttttaggcaaccgtcataaatctttgatagcatgtaacacatgctaatataagcttgctttgatgctagaagtcaag

SEQ ID NO: 21074 - DNA, 660 bp, Zea mays
  Clone ID: LIB3279-015-C9_FLI
tgaagatccagccggcacaccatcggcgaagaagaggccggagagaggatgatactggccgtgctcttcgccaactccgatggaaacatccttgtcgagcgattccatggggttcccgcggaggagaggctccactggcgctccttcctggtgaagctcgggtccgagaacctcaaagggtccaagaacgaggagctccacgttgcctcccacaagtctgtgtctattgtttataccacggtcggggatgtctgcctctacattgttggcaaggatgaatatgatgagcttgcttcagtcaaggatgtttgtgcgaaacctcctaccgagcgcctcttccttgacaaatacgggaggatctgcttgtgccttgatgagattgtttggaaggggttgcttgaaaacacggagaaagacagagtgaggaggttgattagactaaagccccctgtggagccataatttgcatgtaaagcttatgttggcgttgctgtaatccaaatccaatcccatttgcatttgtaggcaaattttcagagttttcatctgcactttgtatctacagaattatcatcacttattggaggattgcgtgtgtgacatcaaaaacaatgtatcatctgtgtatttgctatgttgataagtgtgttactgcgttgt

SEQ ID NO: 21075 - DNA, 571 bp, Zea mays
  Clone ID: LIB3279-015-E5_FLI
ggcctcaagcctggcctccatgggtttcatgtgcatgcgcttggtgacaccaccaatggctgcatgtcaactggaccacactacaatcctgcgagcaaggaacatggagcaccagaagatgagaaccgccatgccggtgatcttggaaatgtgacagctggagcagatggtgttgcaaacattaatgttaccgacagccagatcccactgactgggccaaactcaatcattggcagagctgttgttgttcacgctgaccccgatgatcttggaaagggtggacacgagctcagcaagagcaccggaaacgctggcggccgtgttgcttgtgggatcatcggactccagggctgaactgaaacgaatggtcgctggacttcgggggcgcctgggagtgccgtcaccactcaccagcaggctagaataacatcccgagacatcgtgaaataataataataagagcgcctgatatgtgatcagtggtgtactcgccattaagcacctgtggcaaccgatgagctgaactgtgttggactgttggataatgctggttcgcctgagcatgtgttac

SEQ ID NO: 21076 - DNA, 1159 bp, Zea mays
  Clone ID: LIB3279-016-B9_FLI
tgcttactcccatttgtacttctgagttctgtcttagttgttcttactggtgtttgaaaccattgcttatgttatacttgagcaggtgtgttcactgagctgattcagcaaatgcaagtgaaaggtgtacaggtggaagagctttactctctcgatgtgggctctcttagtcaactgcggccagtatatgggctaatttttctcttcaagtggatacccggggagaaggatgaacggcctgttgtcagagatcctaacccaaaccttttctttgcgcaccaagtcatcactaatgcatgtgctactcaagctattctctcagttctcatgaatcgccctgaaattgacattggcccagaattatctcaattgaaggaattcacaggagcttttacacctgatctgaagggcttggctattagcaacagcgaatctatccggacatctcataacagctttgcaaggccagagccatttatttctgatgagcagagggccgcgactaaggatgatgatgtttaccatttcataagctatttaccttttgaaggtgtcctgtatgagctggatggactgaaggaagggcctgtgaatcttgggcagtgcgatggtgctgatgatcttgattggctacggatggtgcagccagttattcaagaaaggattgagcgctactcacaaagcgagatcaggttcaatctcatggccatcataaagaacaggaaagaggtgtacagtgctgagcttgaggaactggagaagagaagggagcagattttgcaggagatgaacaatgcttcctccacagaatccttgagcagttcgcttacggaggtgatatcggcaatcgaaactgtcacggagaaggtcatcatggaagaagagaagttcaagaagtggaagaaggagaacattcggaggaaacataactacatccctttcttgttcaacttgctgaagatgcttgcagagaagcagcagctaaaacctctggtcgagaaggccaaacagcaaaagtcagcaagcccgagcacgagttgatggtgaaatgtcaatagactggtagcttttgccgatgtcttctgagcgtcgtgttatcttatcagatacattgccaagttggcagctcagataagataaattatgaccgatgttattt

SEQ ID NO: 21077 - DNA, 916 bp, Zea mays
  Clone ID: LIB3279-016-G11_FLI
aatttgtgcttgggcgtatccgtcaatacacgcaccgagaggaggaagcccactaccccgtctctctctctctctcctccctggctctcgtcttcctctcctcccccaccgagttgccgccccctcgctttcaccccacgcggaagcaagaattcgtcgtcaaattcccaccttgcgcgtgtttctgtggatttccttttttttggccgcttccttgctcctatgggcctttgatccggggcttggatcttgggaaggggaggtgtggtgggccgccgccggcgatctggcggggaggatatggccggcgggaaggagccgatcgaggtcaggttccggctcttcgacggcacggacatcgggcccaccaagtacgatccctccaccacggtctcctcgctcaaggagttcatcctcgctcggtggccgcaagataaggatataactccaaaaactgttaatgacttgaagcttatcaatgctggaaggatattggagaataatcggacacttgcagagtcccgtgttccagtaggagaggtcccaggaggtgtaattacaatgcatgtggtagtgcgacctccacaagctgacaaaaacaagaagcagcttgcgaattccgtcaagcagaacagatgcgggtgcaccattctctgataagacgcctgcttgatgttgtacaatctgtgtagtcttaggattttgtatctgctttgctgtgttcacacaagcgtgaattcattttgatatccagtccttgaagccattcgagtccagaaacatacacactaaaaatccatcgaatatgaaggtttctggatggtagatttggatcgtcttgttccagagttgaggattggatgcttcctgctgtataaatggtgttgtcgaaactagaaaaaaaaactcttttatt

SEQ ID NO: 21078 - DNA, 635 bp, Zea mays
  Clone ID: LIB3279-016-G9_FLI
aaaaaaaagcaaatttgccgtctgcaaaacccctcccacagccgtcgccgcccgccagcccgcctgcgagagaagtccgcttcatccgttcgccgcctcaaggacgagatggacacatcaagccctgcagcacttgtcaatgcacagatgctgaacatgtttgttgggcgaagagtgcgcacggttgttcaagtccaacacaatgaaggtggagtgcttgtcgggcagtccaccgatgggcaccagttgtgtgtcaaaagtgccatggacgtccccgtatcacattttatggaggtttatggaattgctgaaaacagccagaccatccgtgctgaagtttgcacagattttggtcccaactttgatcccaaggtttttgatgagttgtgcaagctggcgagtggcaggttcaagcacctgttcctgtagagataatcatcgcatggaggatcttcagccaactgaagcttgtttgaaactgaatgtttcgcctttaaatttaagatttggctacatgttccttcattgcatggaggaccttcagtaccctgttactcgtcagtattggacttctattagcatgtataagcaacataggactgcgaatacaagcaaaatatatcatgtagttgaag

SEQ ID NO: 21079 - DNA, 739 bp, Zea mays
  Clone ID: LIB3279-018-A8_FLI
cttgcaatcacaacgaacaaaagctctcgatctcaccgacaccgaggaagaagagatcaatggcgtccgagcagggagtcgtgatcgcgtgccacagcaaggctgagtttgacgcccacatgaccaaggcccaggaagccggcaagctggtggtcattgacttcactgccgcctggtgcggtccatgccgcgccatcgccccactgttcgtcgaacacgccaagaagttcactcaggtcgtgttcctgaaggtggacgtggacgaagtgaaggaagtcaccgcggcctacgaggtcgaggcgatgccgaccttccacttcgtcaagaacggcaagacggtcgcgaccatcgtgggtgccaggaaggacgagctcctggcccagatcgagaagcatgctgcgcctgcgcctgcgtctgcgtctgcctaaaggagatcagatcagtcgtcgccgtcaataagggccagcacgtatggctgtaaatgttgtcgttatcagttctggctttgtcgtttgtgggcgattgtgaactagtagtatgtttgtttctatccgagccggaggcgatacttaaccatggatacttgttgtgagttcgtttctgttcgcgtgtgactcttgaattgaatcaaccagctcaccactgcaccaggccgtggtgagtggtgacagtgatttcctgttagcatgaatgatcctatggatggatatagaataatagataaatcacgttgcgctgc

SEQ ID NO: 21080 - DNA, 525 bp, Zea mays
  Clone ID: LIB3279-018-F2_FLI
ctcctcgcatttcttcccatcccccttcgcaacccaaaccccaactcgccccgcatcgatggcgcccaaggccgagaagaagcccgcggcgaagaagccggcggaggaggagcccgcggccgagaaggcgcccgccgggaagaagccgaaggcggagaagcgggtccccgctggcaagtccgctgccaaggagggcggcgagggcaagaggggcaagaagaagggcaagaagagcgtggagacctacaagatctacatcttcaaggtgctgaagcaggtgcacccggacattggcatctcctccaaggccatgtcgatcatgaactccttcattaacgatatcttcgagaagctcgcttgctgaggccgccaagctcgcgcgctataacaagaagcctaccatcacctcccgtgagatccagacctccgtgcgcctcgtccttcccggggagctcgccaagcacgccgtctccgagggcaccaaggccgtcaccaagttcacctcggcctaggctgcgcggccgc

SEQ ID NO: 21081 - DNA, 1269 bp, Zea mays
  Clone ID: LIB3279-019-A1_FLI
gaaatggtagagagctctaccattattggtccagtgagagaagaaagtctacgtcttcttaagaattttcaggaccagttggattcatgggagcgttttgtagcaacacaaatggatctgacttctgagtataattgggacttcgaccattacctagaggaggatataccagccgcgctggagtatattaaacaacacagcagagcaaaagatggcaagttgcttgccattggacactcaatggggggaattttgttgtatgcaatgctgtcaagatctggttttgaaggagtttcgtcaaatttagcagctattgtcactttggcttcttctgttgactatacaacatccaattcatcgctgaagctgttactgcctcttgctcatcctgcacaagctcttaatgtccctgctgttccattgggtacattgttggcagcggcgtatccgtgggcatctggtccaccatatcttttttcctggcttaatcctcaaatatcagctcaggacatgatgcatccggagttgctggctaagcttgtttcaaacaacttttgtacagtgcctgcaaaggttgttctgcaacttacaaccgctttcagggaaggtgggctgtgcaaccgaaatggaaccttctcatacaaggatcatttgcgagagtgtcagactcctgtccttgcattggctggagataaagacctaatctgccctccagatgctgtttatgaaactgtgaaactcattccgaatcacaaggtggactatagagtgtttggaaagccacaaggcccgcattatgcacattatgacttggttggaggccgactggcgatcaatgaggtgtatccatgtatcatagagttcctctctcgtcatgatggttattgatttgattatatgatgctaatacagagtaacttacaacaccatgttcatctcaaaggttttttaagttgagctgaacagtcttttccatggcttggccagaaaataggtgcatgcacgaattctcgtgtgtgttgaagagagagaaaaaaacacgagctcatctgatgtatccttgtaacaagcatcggttagtgcttctctgtttcccgttttgaggaaaagttaatggtaatcttgtagaaaaagggttgaaaaaatttacagtaggcttacatgtactcccacgaacaagaagccaagatcaaagaaattgtacaattgatctcttactatgatgtaacacttctaatataatgatacgcatctcacatttccacttgc

SEQ ID NO: 21082 - DNA, 1442 bp, Zea mays
  Clone ID: LIB3279-019-B1_FLI
atcaccattgcccacgagatattctggttcctttaggggacttatcaagagcatgctacggaaaagtccagaacaccgaccaagcgctgcagaactgctaaagcatgtgcaccttcagccttatgtgcttcaggtccagttgaagtccagtccctctcgcaacatgtctccaatctatcaagctctgacagacaaagttaagaagatgacatttcctagtgatataactgattccgccagaagagtggcaagaagaaactcgcttggaaatgagaggactgtaacattctgcaaaccctctcctgagcagaactctattagctctacacggagcatcaaagaatatacaactacccagagtgtcaaagagctatctgttggcagcagtcaaattgatgatgaggttacaagtaaagccattagaacaaagacaacaggcattctaaggacgcccaagagtaccccagccaagacattgactactagaaatcggttggaattagatcctccaaaaacttcttatagcagaacagaccatagtgagttgacctcaagaacacctctgaacaagagtgctgtgacagcaagaagagcatcgctcccgctgccgacatacagagcacccaacggccgtgccgccagtgtcctcaaccagctggactccccagacgtgtccgtcaacgcgcctcggatcgacaggatcgcagaattccctctagcttcatccgaggaccccctggcgcccatgaacaagaacctgtcctcggcgcccggccacgacgtctcatgctccacgcctcccttcatcaaccggtccatcacgaaggacaagtacacggtgcaggtgctgcacaggggtgacggggacaacgcgagcgactcgtcggggcgcaacgccaccgccgcgtcgagcggggggtccaacgactcgaggcagcagcggttcgacacctcgtcgtaccagcagcgcgccgaggccctggagggcctgctggagttcagcgcgcagctgctgcagcaggagcggtacgaggagctgggcatcctgctgaagccgttcggccccgagaaggcgtcgcccagggagactgccatctggctcaccaagagcttcaaggagacggcgtcatagcggagggagggagggagacgtagctgccagttttctaacgtgcaatgtagttcaggtagtctaagctatgttaggaccccccaggtgtaggtgctggaaggaaggcaacaccagctcagtgttgccctaacttaaaagaagtccccatgttgtttagccattctccggtttaccagtaggaaaactgagcaatcgatggtagcattaggactagaaagctgagccccaggatcttgaaaccttgctgtaacataatcctgtgtcacttgcaatgatgctgatgcatgtagtactgaattggagggtttgt

SEQ ID NO: 21083 - DNA, 1486 bp, Zea mays
  Clone ID: LIB3279-019-B3_FLI
tctctccccacctcccggtccgctagcagatagcgggggccagagagatcgagatccggaggcgctagcgccacccatcagcgtctgcggcaatggcgggcacggtgacggtcccggggtcgtcgaaaccctccacgccgctgctcaaggacgagctcgacatcgtgatcccgacgatccgcaacctcgacttcctcgagatgtggaggcccttcttccagccctaccacctcatcatcgtgcaggacggcgacccgaccaagaccatcaaggtgcccgagggcttcgactacgagctctacaaccgcaacgacatcaaccgcatcctcgggcccaaggcctcctgcatatccttcaaggactccgcctgccgctgcttcggctacatggtctccaagaagaagtacatctacaccatcgacgacgactgcttcgttgccaaggacccatcaggcaaggatatcaatgcccttgagcagcacatcaagaacctcctcagcccgtccacaccgttcttcttcaacaccctgtacgacccctaccgtgagggtgctgactttgtgcgtggataccccttcagcctcagggagggtgcccacactgctgtctcccacggcctgtggctgaacatccctgactatgatgcacccacccagctggtcaagcctaaggagaggaacgaaaggtacgttgatgctgtcatgacaatccccaagggaaccttgttccccatgtgcggcatgaaccttgccttcgacagggatctcattggccctgccatgtacttcggtctcatgggtgatggccagcccattggtcgctacgacgacatgtgggccggatggtgtgtgaaggtcatctgtgaccacttgagcctgggagtcaagactggcttgccatacatctggcacagcaaggctagcaaccccttcgttaacttgaagaaggaatacaagggcatcttctggcaggaggacatcatccccttcttccagaacgtgaccattcccaaggattgcaacaccgtccagaagtgctacatctatctctctggacaggtgaaggagaagcttggcaagatcgacccctactttgccaagctcggtgacgccatggtcacctggatcgaggcctgggatgagctgaacccggctggccccgcggctgggaaagacacggccaagtagatgggagtccctgggggtgcattcacttccctgctgaagtgaaaagaaagtatgattgggtccagcctaggcccccccatagatatagctctttttgagagggaagagggattaattcagcagcaggttctttttataaattctttgttgttatgaagcaggcggtacttttgtagttgaaggggatttgtcgccactatcatttacataattcggacaataatttacattgtgtaatcttgagaatcaaagcactgtttgtgtttatagcatgtctatgaatgtgcactgttgctttt

SEQ ID NO: 21084 - DNA, 765 bp, Zea mays
  Clone ID: LIB3279-019-C1_FLI
tatcagagtatgggatttggcaactttgcagtgcatacagactctttctgatcataccgatgttgttatgtccgtgctttgctgggatcaatttctattatcttgctctttggatcaaacaataaaagtttgggccgctacagagagtggaaacttagaagtaacatatacacacaaagaggatcagggtgcacttgccctcagtggtatgcctgacgcacagtcaaaacctgtgctactgtgttcattaaatgacaacactgtccgcttatatgatctgccatcgttcagtgacagaggcagattattctccaaaaaagaaattagggcaatacagatgggtcctggtggtttattttttaccggggatggaactggtgagctcaaggtttggcagtgggtagatttagcccaaacctaatgaacatagtgtgctagattagttttctctcatgtattttatgagggagttcgtacaaatacgcataatgagttcaggttgtggtcggtggccagttctttttttgtaatatgccccacatttgtcacaaatgacacgagattcggtggatctgttcggcagtaaaatcagaagcagagtatgtgttatggactgtagttttgtcctggaatggattttaagacaggagaataattggttgttgtaatatgtaaggcactggaacgagcaattctgacgactgcttggaggtggtggcagtttcaaaaggatatatgctaatatacaagggtttgttcagccgc

SEQ ID NO: 21085 - DNA, 264 bp, Zea mays
  Clone ID: LIB3279-019-D1_FLI
cagacgtgaaagctctaccaaacggtctttcgctgctccttaacaagatgaatcctttgaagagggagcaggtcattgatggcctcaggcagcttcttggttgatcgatggtggcaaagtggagcatgaagccctgtttagttgggaacggattgttctggttgtagtcatgtatttagctgtttaacatgtatttaattgggtggcgttactccacgtcatacggtacaacagcaatcctgatcaagtgattatttattcttc

SEQ ID NO: 21086 - DNA, 717 bp, Zea mays
  Clone ID: LIB3279-019-E2_FLI
aggaagatggggctcgcgttcgggaagctcttcagccggctcttcgccaagaaggagatgcggatcctcatggtcggcctcgacgccgccggtaaaaccaccatcctctacaagctcaagctcggcgagatcgtcaccaccatccccaccatcggtttcaatgttgaaactgttgagtacaagaacattagcttcactgtctgggatgtcgggggtcaggacaagatcagacctctttggaggcattacttccagaacacccagggtcttatttttgttgtggacagcaatgaccgtgaccgtgttgttgaagccagagatgagctccacaggatgctgaacgaggatgagctacgtgatgctgtgctgcttgtttttgccaacaagcaagatcttcccaatgccatgaatgctgctgagattactgacaagcttggattacactccctgcgccagcgacactggtacatccagagcacttgtgccacaactggcgagggtctgtatgagggcctggactggctgtccagcaacattgcgagcaaggcttgaggcctaccttgaatatcaactgcgaactgactaggagctccggatgtatcatggaaactcaggacagaatcgcagttgcaatctgttagatgtcttctaccggcactatatatttttttttttgtttgatgtgtaatgatgttactgttcaacgcttattaccct

SEQ ID NO: 21087 - DNA, 701 bp, Zea mays
  Clone ID: LIB3279-019-F4_FLI
cgccgtcgcagcaatcacagcagcccggagaacggccaggtccgacaagatgcagatctttgtgaagacgctgacagggaagaccatcaccctcgaggtcgagagcagcgacaccatcgacaatgtcaaggccaagatccaggacaaggaagggatcccgccggaccagcagcggctgatctttgccgggaagcagctggaggatggccgcacccttgcggactataacatccaaaaggagtctacgctccacctcgtgctcaggctccgcggtggcatcattgagccctcgctgcaggcgctcgctcgcaagtacaaccaggacaagatgatctgccgcaaatgctatgcacggctgcaccctagggctgtcaactgccgcaagaagaagtgtggtcacagcaaccagctgagggccaagaagaagatcaagaactgaggtgttgctgctagtcagtttcatggacaatgttgtttggttgttgaaccgtgtttgtttacgaactgtatttttgtttggttgttgaaccgtgtttgtttaccgaacatattggccttatgttatgttttaccatgttgtcgatgacacaatactatatgacgatagcaactatgctattgtagttttggtcattgttcacctgatatgtgccatatttcggtacaatttcgttagtgggcatcccgaactgtttcctttc

SEQ ID NO: 21088 - DNA, 756 bp, Zea mays
  Clone ID: LIB3279-019-F6_FLI
ctcgtctgctcgcatttcctcccaatccatcccgcctccaaacccgaactccaagtcgccccgcatcgatggcgcccaaggccgagaagaagcccgcggcgaagaagccggcggaggaggagcccgctgccgagaaggcgccggccgggaagaagcccaaggcggagaagcgtgtcccagcaggcaagtccgccggcaaggagggcggcgagggaaagaggggccggaagaagggcaagaagagcgtggagacctacaagatctacatcttcaaggtgctgaagcaggtgcacccggacatcggcatctcctctaaggccatgtccatcatgaactccttcatcaacgacatcttcgagaagctcgccgccgaggccgccaagctcgcgcggtacaacaagaagcccaccatcacctcccgtgagatccagacctccgtgcgcctcgtcctccccggggagctcgccaagcacgccgtctccgagggcaccaaggccgtcaccaagttcacctcgtcctaggctgcgtggcctccgcttgcaggcttccctcgtatgttcgcgtgtcttgctgtagttaggtgctgctgtgtctggtctcctccggtagcaactgttatctgatggaacagtaacaatgcttattgaatccagctagttgcttatttgtggatcctctctctttgttgttggccacctttatctcgtgatgtttgtgtgcatgtgaatactctgaatgtgcatttcgaagtttgag

SEQ ID NO: 21089 - DNA, 835 bp, Zea mays
  Clone ID: LIB3279-019-G6_FLI
cggctcagcctcgctccgccgccgccggcgaccatgtccctggcggctatcttcgtcttcctcatcgtgtccgcgctgcagctgctcgaccgctacctcgacctcgccagaaagagcggaggacttagtgatgagcagatcaaagtgcggcttgaaatcaagcaacttctcaaggaggctgatcagttgtcaacgccgtccacatttgcacaagctgctaaactcaagcgcctggctgctgccaaggagaaggaactggcaaaaatgcaggaacatgaccttaaagggaagcaatccttatacgacaaatacacaaaatttttgttggttactaaggtcataatttatgctgtgctcgttctgtgcttttggagtactcctgtaactgcagttccacaacatcttctacagcccttcggaaaaatgttttcctggagaggtgttgatactgccaccggcaatgttgtggttggaatactcccgtggctctttttgacctctcgggtcagcaagatgctgtgccagaaactcggcttcgtgcttgtgcgtccgtagcgcctttccatgagaaagtcagcaagttgctgcacctaaacaagactgctagctttgttcttcttctatatctttttataatcaactgtttcacttattgtcctctatatactctctctccctgtttatttatcgcggtttagttcaaaaattagcgggcgacagatattcaagaacggaagcagtacttctgtagtcatatgaatttgctgcgctatgtgctcaagctgatacgcgtataagttactagtagtagtagccgtgaatgatgtgtgctttt

SEQ ID NO: 21090 - DNA, 1199 bp, Zea mays
  Clone ID: LIB3279-019-H6_FLI
ctcgtttttaactctcaggtatgtaccaattggtgttctttttgatcttctatgtgcagatccagaaagaccatggaatctaatagtccattttaggggatatccctcagaaatcttgtcaccatgcgagggtgaagatagtgtgaagtggagctacatgaattccctgaaagaggtttgttttgagaatcaaaattactaccatgttctatcacaaaggaacctatagcattctctctctctctctctctctattcaggccaccttcatcattactgggaacagtaagagtgtgatgaatatgtcgcatgctgatcaagtcgctctgtgggaatctgtaatgaaaggtaacttagatgggtataaaaatatctccaccaggcttaagcttggaccatttgaagatgatgtgttagtacggacagcctccgtggagcggcaacgtcaacaaaattctgatgaacctgaatctcctggatctagcaaaccatggtccctgttcgattatacgtacgcaatgttcaagaagaccttgagtacatagaagatgcagttcctgtcagtgactgggaaaacgtgtcctacataaatcggccatttgagactcgcaaggctgaaggtagaagctacatcaccctggaacatgcgttgcaaacattgcttccggagttcttcagctcaaagcccccaggcagcgctgacggctcccaacacgcaggcgcaatggacgcagccgcagacagttcagatgccaccaactcttcaagtcgttctcaggaggcagagcaagccctggcaagtccaccagaggcgggttctgccaagagagcaaaagtgaagctggtgagggtgcaaggtgttgagctcgacatggacatcccgttcctgtgggtcgccgaccacctcaagaaccccgaatactacgtccacatctgtgtatacgtcggcactagaaaacaatagagctaagagtacatggggaaattgttagatactgcgtgtaggagtgtgtcccagaaatcattttctttgttctttggttattacatgtgctatcctgtgtgcagatacagacgctgaaatttgtaacccttttggatgcacagtcatggaaggatggaattggatggtgaaccattttgtgtgtgtgtgtgtatccgatcgacgtattgcaatatatatcctgcctggagcatagc

SEQ ID NO: 21091 - DNA, 872 bp, Zea mays
  Clone ID: LIB3279-020-B7_FLI
caaaaagaaaaaaaacacgagaaaaatcaaatcaggagacggggattccagagagcccctgtcgggtagggaagggaaggagaggcgaagcggaggcgagatgggggcggccgaatccgtgccggagacctccatacacgaattcaccgtcaaggattgcaacggcaaggaagtgagcctggaaacctacaaggggaaggtcctccttgttgttaacgtcgcctccaaatgtgggttcacggagaccaattacacgcagctgacggagctttatcagaagtacagggacaaagacttcgagatattggcattcccttgcaatcagttcttgcgacaggagccaggtactgatcagcagatacaagactttgcttgcaccagatttaaagctgaatacccagtttttcagaaggtgcgcgtaaacgggccagatgcggcgccggtttacaagtttctgaaagctagcaagcctggtttgtttgggtcatcaaggatcaaatggaactttaccaagtttctggtggacaaagatgggaaggtcatcgagagatacggaacctcgacagctccaatggcaattgagaaggacatccagaaggcccttgaggaataatttttgtgagcttgtctcgtctcatccaccacacacttgcagcagaaataggcacttgctgaaatattccgtcgtagtaacattcagaccggacgtctttgcttatctgtagtaaaaattctgtgtaatgttaccctccttttcgccttccgttcgtgtaagtagaggttgtattaagtagccatcgtctgctagcttttgccctttctgtgtgaagaagtgaagacatggtatattgatgcaaaacttaacgttggtg

SEQ ID NO: 21092 - DNA, 1061 bp, Zea mays
  Clone ID: LIB3279-020-D1_FLI
accacctccgcctccgcgatcgaagctcctcacaaaccgttatcgtcgccatggcagccgccgcgcctgcaagctccgtgaaggaagtgctgccatctcccctgacctccgcctccgagccccctcccctcttcgatggcaccaccaggctgtacgttgcctatcattgcccgtacgcgcagcgcgcttggattgccaggaactacaagggtttgcaggacaagattaagatagtcgccatcgatcttgctgacaggccaacatggtacaaggagaaggtttatccagaaaacaaggtgccttctctggagcacaacaaccaggtgaaaggtgagagtttggatctggtcaagtacattgacagcaactttgaaggcccatcgttgctcccagaggatccttcaaaaaagcagttcgctgaggagctgcttgcatatactgatgcatttaacaaagcattatacttttgtatagtctccaaggaagatgtgtctgaggaagctgtcgctgctttggataaaatagaagacgccctcgggaaattcaacgagggtccattctcccttggtcagttcagtctggtggacattgcgtatgtaccattcatcgagaggtttcagatattctattccaacataaagaactatgatattacaaagggcagacccaaccttcagaagttcattgaggaagtggacaagattgatgcatacacacagactaaacaggacccacagtttttacttgagcagacaaagaagcggcttgggattgcttaaagcttgcggccgaggatgactctcgacagaaataccagcatagtagatcgacacttgtttagtcatttgtgtgcttgaataatgaatactacatatatggttttcaataagacatggtcctctatactgggttgtacttctgaaaacaaactagttgtcctgatattatagctttcgtggtgtgtttacgtcactgtatatgaaagggtggggagagagaatgatatgccatgtattctgtcaaatgtttttttataatgtcaagagctctgacttttaatt

SEQ ID NO: 21093 - DNA, 917 bp, Zea mays
  Clone ID: LIB3279-020-D10_FLI
cttgttccagctagctaggagagagagctttgtttaggcggcggcaagatgaacaggaagccaggagactgggactgcagggcgtgccagcacctcaacttcagccgtcgggatgcatgccagcgctgcagtgaaccacgtggagttggtgatcgtagcggcggtggtggcgacttgggtgggcgtggtggttcctccttcggcggtggctttggtgctggctctgatgtccgccctggtgactggtactgctcctgcggcgcacacaacttcgccagccgctccaactgcttcaggtgctctgcctacaaggaggaggctgccggcgcctttgatagtgacatgtcacgctcacgcggctacgccggcttcggcagcggcgctgccgcccgtaccaaccgccccggttggaagtctggagactggatctgcaccaggtccggttgcaacgagcacaacttcgctagcaggatggaatgtttcaggtgcaacgcgccacgggactccggtagcgctgccacgacgacctacgaaaactacttgcactgaggtgtaggtagagcaaagtttacagctatagcgcgcgtcgacgaagcaggagcagcagcagcagcatgaattgaagaggagtcctcatcatcacatcataagggagcagcagtagatttaattgcaaaattaaagacacccgcgatgcatgccctatcactagttttgttccaccggtacccctaccgcgcgtttcttttaagatttggttccccatttatctggggacagtagaccccagatgagacctatgtttgctgtttcattttcagttacgttcgtctccgcatgcatgtttgcgcttggatctgatgtaaccccaaaacgcttgcttcacaagtactattaactagttctgttgccttcct

SEQ ID NO: 21094 - DNA, 1588 bp, Zea mays
  Clone ID: LIB3279-020-E6_FLI
cagaaagagacacagtcacacagcgtagggcgctgcggcctgcggggaggaagggcaccagcttggtctttctcatccattcgcaaatcgcaacaaatcttgcatcttatcttaccctagaaaaacaaatcttgcatcttcagctgtctgtacgtgtgtgagagagagagagagactgcgtgccgcagcagcagctctggacaggcttacagtcagagagcgagggaggagccgggaagaggaggccggagggaacaaaaggggaagtttggttctttcctctaccacctggagcgtccccttgctagcgcccggtccggtgagctccataccatccagggagtgtgaggaaccgtcgtcgttgctggcgatccaagagaccaggagatgggcagcggcaggaacggcgctgtggtgaggcggtacgttcggtccaaggagcccaggatgaggtggagcgccgacctccaccgcagcttcgtgcaggctatcgactccctcggcggccaacacaaggctacgccgaagctcattctccagttcatgggcgccagggggcttaccatatctcatgtcaagagccacctccagatgtacagagctgcaagccttggcgcagaaagaggaggagggacgccagcccagctgctgcaaaggaggtactcatgcagcggtgatgagcgaggaggccccaaggaggagttcctgtgctgcccaccaccaccacctctgaaaagggcccggatgggatacgagagcatgcagggaagccatggagtcagtgatgcgaggactactgctgggggagggggactgtactgcatcgatgattacatgcaagccatggccgtgggctggagaataaaggaggagggcctcatcagatggcagaggagagatgcggctgctgctgctgctgcgccttccaacctccaagccatgggatgtttggtgcaagaatctgccccctttaaggtacgccgaccagaagcacaccgtcttggttctgcgctgaagcagcaggacgacgacgactccagcaaagaggacggaaacggacggccccagtccagcaatgcagcgaaggaggacgggccatctgagcagtgctcgctctcgctgtccctcggtaatctggacgcaaaatgcgggcgtggcacggcggcagcggcctcctcgcgaagcggcgagagcagttgcatcctcacggcctcgccggcgaggaggagctccagcgacgactgctccggccactcaggctgcttcgtcgtcggcccgggtggtgttgttagcctggagctttccctgtccatctgtggatcttagctagaccactccggccacttctggacgacgattctgtacatcagtgggcggcgttggtgatcgccgcgtttgtttttggtgttcgtgggcaggcacatcatgaccgtgttagaaagtttagtaaccttagaaccatagcgcatgttacttctagctaagctagtattatgttacctctctacctctagccctagctggtatgtgtaagtggcaaagtcaccaggcagcctccctttcagatccagagtagtaccattgtggc

SEQ ID NO: 21095 - DNA, 670 bp, Zea mays
  Clone ID: LIB3279-031-B1_FLI
gccacctcaacccaggaacagagcgaggcgacgccgcggcacctcttctccgttgatattgattatttaggcgaagggaaatggcaaccgttccaggggatctgatctggcaggttgtgaggaagaacaactccttccttgtgaagcagttcggcaacggcaatgccaaggtgcagttcaccaaggagccgaacaacctctacaacatccactccttcaaacactcgggtttggcgaacaagaagactgtgacgatccagccagctgcaaaggactcggctgtggtcctctctactaccaagaccaagaagcagaacgcacctgcgaagctcagccacaagtctgtgatgcgcaaggagttccgcaagatggccaaggctgtgaaaaaccaggttagtgacaactactacaggcctgatctgaccaagccagctcttgctaggctaagctcggtgtaccgcagcctccaggttgccaagtccggtgtcaagaagaagaacaggcagtcctaagcgctaagtttgtgttctgtcagggggcatgttggtgctcgtagtcccagcttatatttatctatgttccaacagttgagacttgttagaactgagcaaaccatgttaagatgctgctgtgtgtcattccttaaaaaattgccttgcactttgtgatt

SEQ ID NO: 21096 - DNA, 723 bp, Zea mays
  Clone ID: LIB3279-031-C10_FLI
gtgcttcaggctgtgaagatacaccaaatatactttgcaatggtacatgttctatgtaatatttcttgtcgtgactcaatgtaaaagtataatttgtctgacattttctttgttattatagttgacccagttgtatatgagacccagaagtgtgtattggaagaaaatctttccaggagagctgaacactacttttttgaaatgaagcgggttacaaagggcagggatgcatgggctcatgggaacctacaagaacttggacagctgatctctgaatctggtcgcagctccatactcaactacgaatgtgggagcaaagagatgatccagctgtacgagatcctgctgaaggcccccggcgccctcggcgcccggttcagcggcgccggcttcaggggctgctgcctggccatcgtggagagcgaccgcgcggaggatgcggctgcatacgtccgtgccgagtacgaaaaggcccagcccgagctggtctccaggatccccgcggatcgccgtgttctggtctgcgagcccggggactccgcgcgcgtcatattgcctgatcctcacctgagctcctgatgccatttcgtggcccggacagacggaatgatgactctactagtccattcgctgcgtttggattcgtttttagttaagccccttttgagcatcggatattttcctttcctttattgtttctaataaaaataaattaatttctgt

SEQ ID NO: 21097 - DNA, 1657 bp, Zea mays
  Clone ID: LIB3279-031-F5_FLI
gctcattctgatcaagcgggcgaccacgatgggttcgtcgttgcaatccaacggcggatgctgcgccgcaaggcgcaacttggcttatcagatatctccagcccgcgcgggcgctgcagtggcgcagcacagccacgccgcggcaacagcaacaccgcgcaccatggcgcttcttctccatccccgcctcccctcccatcctttccgcgcggcagcccaccaccaccacgccatcacggacgcctcttgcttccttaccctccgcggccccggaaggaagcgccgcatgatgctcgcggcggtcacgtgccgcgcagccagggtcaaggagcccactccgagcccaggcgcctcgcctgcgccgccgccgcaggcgctgacgaaggaggcgcacaagtacttcgaccacgccgtggtcaccgtccgcgcgggcgacggcgggcacggcgccgtgctcgccatgccgccggcgccctccgcggacgccgccaagccccgcggcaggttcaaccggcgcgagaagaagagcaagaaggtgtcgtacaagcgcaactacgacgggtccgtggcgctgccgacgggtgggcacggcggcgacgttgtggtgtacgccgacgaggccgaggagacgctgctgcggttccacgagaaggcgcggtactgcgccaaacggggagggaacgtgggcgccgctggcggcacgctcagctcgcggatgcacagcgggttcgccggggagacgctcaggatacccgtgcctgtaggtctgtggactcggtgccgtgaatttcgagttttttttttgtgcggggattggcctttttgatggatgcattcgcatcgaattgcaggaactgttgtgaaacgcaagaagggggctgttctggcggatttgactcatcactgtgatgaagtgctcgttgctagaggtggacagggcggaatcagcttgattgatgtgcctgagtacaagaggaggaaagccatggctttatccccaaacatcatgcgagatactagtgacaaagtattaacgcatggccaacctggtgaggaagtaagcttggagttgatcttaagggtagttgctgatgttggccttgtgggacttccaaatgctggaaagtcaacacttctatcagctataacacttgcaagaccagacattgctgattatccattcactacattaatgcccaatcttggccgacttggtggagatcctgctttaggggcgttacagttttcctcagaagcaacattggcagatttgccaggtctaattgagggcgctcatctaggaaagggccttggccgcaatttcttaagacatttaaggagaactagagtaatcgtccatgttgtcgatgctgctgcagatgaccctgtcaatgattataagattgttagagaagtactaatttctaattgctttcatcactctcatgtgctgtttggctttcccgtctcagtattacaatgttcatgatctatctgatctgcttgttaccctagcattaatagtgagattgtttgataaacacatatatatgtttttttgaaggatcaggagggggaaacccctactgcgcattttattagaaagcgaaaagaaaagattagaacctggtacttttacaatcaataaaaagaagag

SEQ ID NO: 21098 - DNA, 817 bp, Zea mays
  Clone ID: LIB3279-033-B1_FLI
ggcccacctgccattgttagaggcggaagcccacaggcggacccgaatccagaattcctgaatcctgtcactgctcgaaaatcgaaatcgatccgatctccgcttgcgctgaagcctgatctccaccgggttcgcagcaggggcgcaggacctcgatcacgaggaggcaggggagcagcatccacaaccacaagccatggcggggagggccaacatccccactaacaactccgccctcatcgcaatcatcgccgacgaggacaccgtcactggcttcttgatggccggcgttggcaatgttgatctgcgcaagaaaaccaactacctcctcgtcgacaacaagacgacagttaaacaaatcgaggatgcgttcaaagaatttactacgagggaggatattgctattgtgctcatcagtcagtatattgccaacatgataaggtttctggtggatagctacaacaagcccgtccctgctattctggagatcccatccaaggaccatccatatgatccagcgcacgactcggtgctctctcgagtgaaatatctgttctctgcagaatcggtggcgtctgataggcgatgaaggcatccttgcgtagcagtacccttcgatgcatctattttgttatggtattgaaaagaagatggcacgtaccattgggtgcgagcgagccagcatgaacaataatgagcttgcaaacaataattggttgaactaaaccaacaccctttttttcataaatggttcgaatgatattttggtgcttgtgtttgattggttattagggaataaaatgcgattgttatgacg

SEQ ID NO: 21099 - DNA, 867 bp, Zea mays
  Clone ID: LIB3279-033-B12_FLI
gaagtgagtgagaaagagagagagaggagggaaaatgctgcgccacgccgcccgccgcctcgtttcccgcgccgtcgctccgcccaccgcgcgccgggcgctcgccacggcggaggtgcccgcggaggccgtcgaggactccacgttcgtcgaggcctggaaaaaggtcgcccccaacatcgagcccccagcgacgcccctctccctcatgcagccgcgcccgcccacgccagctaccatccctaccaagctcaccgtcaacttcgtcctcccctacaagtccgagatcgccaacaaggaggttgacatggtaattgtaccagctacaactggtcagatgggtgttttgccaggccatgttgccacaattgcagagctcaagcctggtgttctctcagtacatgaaggaaacgatgtgagcaagtaccttgtgagcagtgggtttgctttcgtccatgcaaactccattgctgatattgtggctgttgaggctatccctgtggatcagatcgacccagcattggttcagaagggtctcgctgaattcactgccaagcttggtgcggcctctactgacctggagaaggctgaggcccagatcggagtcgatgttcacagtgccctcaatgctgcattgaccggttaattggtggcattttaaattgtcttgtatttttcatctacagttttagagtgagtttaagtttgcaaactcatgggcatgggatggagggaatgatcctaaataaattatactccatctaaaacatggacatatgtttcttgtttcctgaatcctgcatggatttctttttgtactggtgaacattttaactctgagctcaagacctggagctgctttctgcc

SEQ ID NO: 21100 - DNA, 1176 bp, Zea mays
  Clone ID: LIB3279-033-B9_FLI
ccgatccgccacctctcttatctgaaaacctccagagtccagcctcccttccgattccacctccaagctcccagtcccagccatggcgtctcatgatcatcaccactcccactcccacgacgaccaccaccaccattcccacggggacggcggtggccatgcggctgggggatcgtgggtaggggaggacggacgcgtgtggcactcccacgacggcctcgcgccccactcccacgagcccatctactcccccggcgacttcaccaagcgcgcgccgccgctcgcctcgcgcgacttcgctgaccgcgccttcaccgtcggcattggcggccccgtaggcaccgggaaaactgccctcatgctagcattgtgcagatttctacgcgacaagtatagtcttgcagctgtcacaaatgatatattcacaaaagaagatggagaattcttaattaaacatggagcgctccctgaagaacgtatacgtgcagtggaaactggaggctgccctcatgcggctattcgcgaagacatcagcataaatcttggtcctctggaggagctatcgaacttgtacaaagctgatttgctactctgtgaatctggaggagataacttggcagctaacttcagcagagaattagcagactacataatctacattatcgatgtctctggtggggacaagataccaagaaaaggtggccctgggataacccaggccgatctgttggtaataaacaagacagacctagcacctgctgttggagctgatctgtctgtaatggagcgagacgcacttcgcatgcgcgaaggagggccctttgtgtttgcacaggtgaaacatggagtgggcgtggaggggatcgtgaaccatattctgcaggcgtgggagatcgcgactggtaataagcggcgataagatctcacgacttggggccatatgttggatgcagatttgattcagtcggcacttccacatgcatgtgtcatctgttcgtttctcaataaattctgcgtcatttgctgctgattgtacttgacaagtagagacatggatggactcttaaaattccatccatgtgttaaatgacatattcgagacatccttttctcaataaactctgcatcatttggtgaattgcacttgagaagtaaagacatggagccttaaaattc

SEQ ID NO: 21101 - DNA, 885 bp, Zea mays
  Clone ID: LIB3279-033-G10_FLI
ctcacatctttccctcccgtcggccagcagccttccggttcaggccccgtcgcatctctcctcgtcggccagctgcagggcacctagcgcgtggtcggcgagcgcgcgggcgggcggcagggggcgccgcggcggcgagcgcgcaggcccccactcacagacgactgggccggccttcactgctacttcggccccttcgtcgccgacgagaaccaccgcgtgctggttggaatggcaagtacagcatgctttgtgattgtcagtaagaatgacatcccaatctatgaggcagaagttggatctgcacccaaaaaagaagatttgtcttatcaccatcagtttattctgcatgctgcattagatgttgttcaggatctagcatggacaacaaatgcaatgttcctgaagtcagttgatagattcaatgaccttgtggtgtctgtttatgtaactgctggtcataccagattcatgctgcttcatgactcgcgtagcgaggatggaataaaaagcttttttcaagaggtccatgaactttacatcaagatattcctcaacccgctttacctgcccggctctcgcatcacatcctctcatttcgataccaaggtgagggcgctcgcgaggaggtacctgtaatacgggcatatgctggggtttcatcgtaaagcaggcacgccgatttttttgtgccatcatcatctgataacacatacgtctaatttttcttggcgttggctttgttatgaccgacctatggatcattttttttttcgagaacaaaatgacttgtctaatttttcttggcgttggctttgttatgaccgacctatggatcatttttttttcgagaacaaaatgacttggcgataatgttcaaacttt

SEQ ID NO: 21102 - DNA, 1150 bp, Zea mays
  Clone ID: LIB3279-033-H4_FLI
gggctctacctctgcactccaatcagatcatcagatagatcactggccccgtgctgattaccgcgcttcccatctgagcagccagcctcccaggctacagggagagacgcagaggagacagctgctgcctggctgagacgatggccggaggcggcgaccactcccagacgaacggaggccacgtcgaccagagggccttggaggagggcaggaaggaggagttcgctgaccagggctgcgccgccatggtcgtctccgtcccatttatccagaagatcatcgcggagatcttcggcacctacttcctgatgttcgcggggtgcggcgcggtgacgatcaacgcgagcaagaacgggcagatcacgttcccgggcgtggcgatcgtgtgggggctagcggtgatggtgatggtgtacgccgtgggccacatctccggcgcgcacttcaacccggcggtgaccctggccttcgccaccagcgggcggttcccgtggcggcagctgccggcgtacgtgctggcgcagatgctgggcgccacgctcgcctccgggacgctgcgcctcatgttcggcggccggcacgagcacttccccggcacgctgcccacgggctccgaggtgcagtcgctcgtcatcgagatcatcaccacattctacctcatgttcgtcatctccggcgtcgccacggacaacagagcaatcggggagctggctgggctggccgtgggcgcaaccatcctgcttaacgtgctcattgccgggcccgtctccggcgcgtcgatgaacccggcccggagcgtgggcccggcgctggtgagcggggagtacacgtccatctgggtgtacgtggtggggccggtggtgggggccgtggccggggcgtgggcctacaacctcatccgcttcaccaacaagcccctccgcgagatcaccaagagcacgtctttcctcaagagcacgagcaggatgaactccgccgcctccgcctgatggatctccatggccggtaatttagcctacaaaactatatattcacccgtgtcgtcgtgtcagtacgtgagaggatatagatatataattcctgcgtgcgtgtgcgtttgtgtgtggatggaaaacatatggaagaagaggtatggtttgtgtgtggatgg

SEQ ID NO: 21103 - DNA, 1462 bp, Zea mays
  Clone ID: LIB3279-034-B6_FLI
cccaccaagccaccctctgttctcctcttccgtggcggactagcggcgcactggtgtggtgctcctccaagctctgctccgctccccgcctccccgtcgaccggcgactttggccccggcccccgggctaggaagcgagttcaccggtggatccgcgcgtggccctccctgttgcctgcgggcgctggccgttggccaggtcgccccagccggccaccccccgcctctgcaccctgctgacttgggcttgctgtatagcacggaccagatcaagggtcgccatcgaccacatttgaggcttggccatgcctttaaatatagatattgatctgttcaagctggatattgatgagctgatagctgattattccaaggagaactgtacgtcactctttgaattcaaacgagtatggatgggcaagaaattttcttatatctatgaaggcagacctaagacaaactcgggtttattcatgcagtccctctttctgcattgtattggtcatttgacttctcaaagttcactgcaccaaagattggctgggctatactgcctttactgtctgtatgagtgccagccatacaagccgcagttcaagatttacttgtctcttgaggagtgcaggcaactgaaagatatcgttgttatggcgaagcaaaatggactgcagctcgtgcctgcacttgtcaaaaggatgctggataaaaacatgtttttgtttggctacatgaatttgatcgacgacaacggggacaagcaggtcgaggaattgaccgcattgcagaacaagcgagtaaaatttgcatgtgacaagttatttgcaaatacccaagcagaaagatatttgcacatggacttgggtgctgagttcgagcttgatagcatcaagaaattgtcaaaggagtatgcagaagcaaaggaactggcccttgcggaggcaagccaaactgtcgaagttgacgatgctaagcacctccttcagagtgagaggctgttgggcgacaagatagatgaagtcgtcaaagaatgggatgtccagaaggaggggttctacgagaggacaggattatcctcatcccctggcgaccagctcatggccatcgacaacgatgaatcaggagctcaatgtcacgaggatggatcccgtggcgatcagctcatggcggtcgacaatgatgaatcgggagtacaggatcacgaggacctcgatgacgacgacggctttgccgagttagaactgctgctagagtgaagaacatatacaagtctgtaaactcttactaccgccgtataaccgtgtaatcagaacaccgagagatgtaatcctcgctcgtctttactagcctctcctttttaggtgccagaccttctgttcatctacactggctgcagtaactgtacattgaaataatccagtgcgccagcctatgcaggggagaaaagaaagaggtgagcttgagt

SEQ ID NO: 21104 - DNA, 522 bp, Zea mays
  Clone ID: LIB3279-034-F10_FLI
tatagaatagcttgcttgtccatcaattttgaattgttacagtactgaatgagtcctcagagtgcatagtgttgttctctttttatgtgcctgatagttggtcctcttgtatttcagttgctcttgcggtagttcccccaactgtcaccatgcagaacgaggagggtaagactgtggacctctatgtccccaggaagtgctcggccacaaacaggatcatcactgccaaggaccatgcctctgtccagatcaacattggccacttggatgcgaatggcctgtatgatggtcacttcacaacgtttgctctctctgggtttgtccgtgctcagggtgacgcagacagctccttggacaggctgtggcaaaagaagaaggctgatatcaagcagtagattttacatctagtttaccaagaattggacaccgccttagctatgttttgaattcatgtcactatatgcaatgttgtgatttcagctggtaccttaaatctgaagatttagtatctttgttgggttc

SEQ ID NO: 21105 - DNA, 713 bp, Zea mays
  Clone ID: LIB3279-034-G11_FLI
aggccgccacgcgctctcgtcccttctcaacccctccttctcctccgctccccccgcgcggcgcggaagagagaccaaaggggacggcagccaggaaggaagaggaggcttcgagatttttgcggaacccccacgccacccccctctgcacaccaccacaaccttctcctcatagcctgcctctcgcgtagggtttgcgcgcgccaccgtctccactccaatcccagcaccacccgtcctaccgccgccgcattcggagctctgcatctgcctgcagcccgattcgccaatcgccaccgagcctcgagaagcctcgccgtaccggtttggggatttctggtttccctttctcactgttactgttgctgggatctgaggagtgtttgtattggtgctaattgtttctgccgatttgggcgtgattatccaggctgagtggtattggtgatgtcggctgattagatttgggggtgtattggtagaggggattcgttttttttaggagggggacgtctggacgtctaccttctctgctattggattgggctccgtgatcgagactgctccgtgaagtttttggtcctagggattgtgtttttttgatcggcccggaccaggaatagagggttcttctcttgagaagatctagggccgcgtgttctatcgtcgtctgtagataaaatcaaaagaaaaaagaaaaaaagaaaatagag

SEQ ID NO: 21106 - DNA, 1380 bp, Zea mays
  Clone ID: LIB3279-037-E12_FLI
gcaattgcagaacggaattccattccagaaccatccttcgctcgcccccgccgccgcgctgccgcggccatatacggcgaaagccctattcgtgcccgcggccgtggatagataggtcagtgacgattgagaaacccgtagtcggagcagaggaggggtagaggatggtgttcggtcaggtggtgatcggcccgccgggctccggcaagaccacctactgcaacggcatgtcgcagttcctctccctcctcggcaggaaagttgcggttgtcaatttggaccctgcaaatgacgcattgccatatgagtgtgccataaacatcgaggacctcataaaactcagtgatgtcatgtctgagcattcgcttggccctaatggagggcttgtgtattgcatggattacttggagaagaatattgattggcttgaagaaaaactgaagccttttattgaagatcactatctgttatttgattttcctggtcaagtggaattgttcttccttcactcaaatgccagaagtgttattaataaactcatcaaaaagatggacttgaggcttactgctgttcaccttattgatgcccatttatgctgtgatcctggaaagtatgtcagtgctttgcttctttcactatcaacgatgctacacttggaattgccacatatcaatgtcttgtcaaagattgacctcattgagaactatggaaatttagcattcaaccttgacttctacactgatgtccaagatctttcttatttgcaatatcatcttgagcaggatccccgctcagccaagtacaggaaactgactaaggagctctgtgatgtgattgatgattttggtttagtcaatttttcaactttggacatccaggacaaggaaagtgttggcaatcttgtgaagctgattgacaagagcaacggatatatattttcttctattgacagtagtgctgttgagttcagcaaaattgcagcggcgcctcttgattgggactactacagaacagcggaagtgcaggagaagtacatgaaagatgatgagtttgcgcaactgacaagcaggatgcaatgaggctggcggtgccgtcccgcacccccactttggtagcactacgggtgaaccacgacagtgtggcacgttgaacttcggttgccagaacgatgtgaaacctgtctaaattcatgtagctcagttgtaggtgtttactgaagctgattgctgtagttgcctgatcttctgggagtaccctttgggcagtaaaaaaatgcacttgtcaccggtgaccaaccggtcatgtcctgttttgtttgttcgcttcaacctaactgttcgactgcttgtttgaactgctgcagctataatctttagagac

SEQ ID NO: 21107 - DNA, 858 bp, Zea mays
  Clone ID: LIB3279-037-F9_FLI
tcacaaccgatccagacggcccacccagcgcgaaccggatataccacacggatgccgctctataaataagaccccgcggccagcctactgtacttttccggcctcccattcctcgcgcggcgaccacccgattcgaagcgtgcggagagaccgaagaagcgggagagatggctcgtaccaagcagactgctcgcaagtccacgggagggaaggctcccaggaagcagcttgccaccaaggctgcccgtaagtctgcccccaccactggtggagtgaagaagcctcaccgctaccgccctggaactgttgccctccgtgagatccgcaagtatcagaagagcactgagctgctgatcaggaagctgcccttccagaggctcgtcagggaaattgcacaggacttcaaaactgatttgcgtttccagagccatgcggtgcttgccctccaggaggctgctgaggcataccttgttggcctgtttgaggacaccaacctgtgcgccatccatgctaagcgtgtgaccatcatgccaaaggacattcagctggcaaggaggatccgcggcgagagggcctaatcgccacctcaaacatcgtgacaaaaacatgaagtcctggggttattgttaatctggtgccattgtaaggacatatgagtagggtttgttttgtggatcgcaagtttctcttctgctactgttgctgctacctttgctggtgttattgctagggtcgaatacttaagttaactatgcgctgacagtctggactagcagtgttatgtgcgctgctggaccttgcgcgcaatgctgtggccgatttgttcgttaatgtcaagaattgtgttacagtgcgtgt

SEQ ID NO: 21108 - DNA, 906 bp, Zea mays
  Clone ID: LIB3279-038-A1_FLI
cctcgccccagcgacgcggcctcccgtagaccgagcaaggcaacccaccactgagaggcacgcagaggagcaggaagccggagaccaagatgtcgtcggtgttcagcggcgatgagacggcccccttcttcggtttcctcggcgccgccgccgccctcgtcttctcatgcatgggcgcagcgtacgggaccgcgaagagcggcgtcggcgtggcgtcgatgggtgtgatgcggccggagctcgtcatgaagtccatcgtgcccgtggtcatggctggtgtgctcggtatctacgggctcatcatcgccgtcatcatcagcactgggatcaaccccaaggccaagccctactacctttttgatggctacgctcacctttcgtccgggcttgcctgtggccttgctgggcttgcagctggcatggccatcggcattgttggtgatgctggagtcagggcgaatgcacaacagccgaagctttttgtgggcatgatcctcatcctcattttcgcagaagcgcttgctctgtacggtctcattgttggaattatcctttcatcccgtgctggtcaatcccgggcagattaagtgcactaccattctgcaattaccgtactgtttattatgctattctaagagaattgaaaccctatgcccttgtctagtttattcttgttaccatgtattaatgaaacaatttgtagctgaaggaaggtgacacttccagccatgttggttttggcggtgttaagcagaggttatttattgggttaaggttggagggatgcgggttaagattggatggatgctcctgggctaagtggatttaatttttatccttggtgaataatgaacacggaggtgtagccaaataataacgtgatatatatatttctttgcccctttt

SEQ ID NO: 21109 - DNA, 285 bp, Zea mays
  Clone ID: LIB3279-038-B10_FLI
ctcgaacttgtttcaacataggttcaagataaatcgaccactatttcttccgcataatgaaagtttgtggaacaacatgatgattacttcgagcagaagagaaatgcagctcaactcatcaataagggataagttgttttcaaaaggttattgcagttttccgtgtgctaacttatagagtggcagctgatgctacagatgagtacgtacgcattggagaaagtactgcgctggaaagtctaagaatgtttgttaaagctgtaatagaagtttttggagttgagt

SEQ ID NO: 21110 - DNA, 1043 bp, Zea mays
  Clone ID: LIB3279-038-C2_FLI
ggggaaaccaactagtccccaaagtcaataaagcggctacacgtttcgtccaagttcaaatcccatccagagattatcgaagcaacgagcgccgctccccttcacccctccgcctccctccaaaactcaaattgacctagcgagaagcagaagaggcgaagagcgataacgaacctctctcacatcgatttccccaaatcgcctggcgcgatgaccacggcaggagaggtggattcggcagcaggaggtgaggacctggagccgctcttcgactacaagcgagtgcagcccaggacgacgttctgctttgacgacagcgacttggaggtggccgacatcttcaaatactgcaacaagcgcccaaaggtccacacctccacggaggaggagggtaagcctgacgaggaggtcgccgctgccaaggtggtggtcctcgatgaggaggattggttgcagccaccgccacccaaggccgcattcagggcaacggcagaggaagatagtgcgtttcgggaactgaggttgaagaaacaagagtgggcaaaattcgctgaatcagctcaggatatattgcaaaagctggatgaaatcacgaacaaagaagttggtcccaaggaaccacctgaacagataattctagatgaggaatctgaacctcaagtcgagaaagccagggaaaagatagtcatatcaatccaggacaaggatgggcaacaacagatgcgtgtatacaaggacgaaaagttcgacaagcttctcaaggtgtacgccaagaaggcaaagctcaacccatctgatctgtcttttgtgtttgatggtgagaagattaatccatcatctacacctcaggaccttgatctggaggacgaagacatgattgaggtgcgtcgtaagaagagttgaggtcatcctcgatatgctggtttagacaaactcagcctttttgctgtcttcttttgcttccaacaaaggcttatttgtctatatatcatataacaaagacgttgaggccatccttgatatatgcgtgaaaccctcgagat

SEQ ID NO: 21111 - DNA, 680 bp, Zea mays
  Clone ID: LIB3279-038-D3_FLI
ccgccgtcgccgcccaaccgcagtaaggaggaaggagcaggaagatgccggcggggcacgggctgcggtcgcggacccgcgacctgttcgcgcggcccttccgcaagaaggggtacatcccactcaccacgtacctgcgcacctacaagatcggcgactacgtcgacgtcaaggttaacggcgccgtgcacaagggcatgccgcacaagttctaccacggccgcaccgggagcgtctggaacgtcaccaagcgcgccatcggcgtcgagatcaacaagcaggttaatggccgcatcatcaggaagcggatccatgtccgcgtggagcatgtgcagccctcccgttgcacggaggagttccgcttgaggaaagccaagaatgaccagctcaaggcggatgccaaggcccgcggtgaggtgatcagcaccaagaggcagcctgtgggacccaaacctggcttcatggttgagggtgctacactcgagacagtcactcctattccttatgatgtggtcaacgatctcaagggcggttactagagagaatttttgtaccttcagcagttcaaacgagctggcaaacttatctgaatctttttgataattggctagttcttctgttctggtgttatgaactcatgtggctattgctgttggcgtcaaaagattttttttattgcc

SEQ ID NO: 21112 - DNA, 331 bp, Zea mays
  Clone ID: LIB3279-038-H7_FLI
cggccctgctccacgcaatggctagaccattgaaagtgtatggagccgagctcaaggaaactgcatacagctacatcaatgtgtcatgccggattaagtcagatcagtgtgaaatttaagcattcaagattggttgggttgcttttgaatacaaccaaataacaattagtagatgaagttttaattggccatgtaagagtgatcaaggtagcagcagaagctcatatcaaagaaaatagacaagaaattgactgtactctcggagcattttggcggcttttgcaagtcttgtaactgcattctcatatgactatattgtccccaacgaagc

SEQ ID NO: 21113 - DNA, 892 bp, Zea mays
  Clone ID: LIB3279-041-E6_FLI
gtcgcctgttgctaattcagtctcacctgtgactggagctgatgggaaaagcaaagaacccattcaaaggtctggatcatttaaagatagtaagaaaaatgtcactaaaaaggatgtcaggaattcatatgaaccaccaaatccagcttcatttgttgaggataaggttcaaactgtaaaggttggagatgtcgatctccaggaaactaaaaagctgaacaatgagttggatttgaccaactcatcttcagctccaacggttccactggcagttagtacagagaatgccgacagcacagcagtaaccaatacaagctcaagaagaccatcttctgagggtactggtgagcctggagtggaaagcttcactgtttccgctgttgaatgtgacgaaagcaagaggactcacaaagttgtgaaagatcctagcaaggataatatttcttctgatgctaccaaacatgaattgcctaaggaatgtgcagtggactctactgaacaagcatcagcagtgacttctaacactgatgattcatatgcagcacctctagtaactaatcaggagcagttgctgaaagggtctgcttctgagaaacaagctgtgatgaataactcatccaagaattctgatacttcagcacatttttttgatggcaatgatgtgggcgtgacaacttctggaacttcagagcctactgctcaaacttccaatgatgaaggtgactcagatattagtccagaaacagacctagctgtttataatgtccctctaggttcatctgagctacaactgaaatctgagagtagggcaaatgatcaacagcctgctgcaccaacagtatcagttcgaccggtatccagggaaaagcctagtacaaagtccacagctggg

SEQ ID NO: 21114 - DNA, 623 bp, Zea mays
  Clone ID: LIB3279-041-F5_FLI
ctaccaaggagcttggaacggtgatgcgctcccttggccagaaccctaccgaggcagagctgcaggacatgatcaacgaggtcgatgcggatggcaatgggaccatcgacttcccggagttcctgaacctgatggcgaggaagatgaaggacacggactcagaggaggagctcaaggaggccttccgcgtcttcgacaaggaccagaacggtttcatctcggctgccgagctccgccatgtcatgaccaaccttggcgagaagctgaccgacgaggaggtcgacgagatgatccgtgaggccgacgtcgacggcgacggccagatcaactacgaggagttcgtcaaggttatgatggccaagtgaggagcggtccccgtgaaataagtatctatggattgaagcgaattatcaggcacacaagctgtactttgtcatgtccctttgagtacgcatcagtgtcatgcaggtggtaatgtcttgtagtggtccgtttaggcggtgtagtcatgggaacgcgacatcagatacctggtttcttttgattgtgatgttatcttgcattattgcacctgtaggatttgttgaagctcatattttccagggttttggatcttttgtgct

SEQ ID NO: 21115 - DNA, 658 bp, Zea mays
  Clone ID: LIB3279-041-H1_FLI
gaaccgtttgtgtcagttgggcggcgtcggcatggacgaggctacgaagaaggtggaggctacggtgctggagatcccgcgaggctctgatatggagtccgtaacggagaacaaggaggaggcgaaggcggcggaggagggcgacgctggcagggagagcaaggacaaggaacgtaaggaagatgaggaggaggatgaaggtaagggtggcgggaagagagagtacgacgaccaaggggaccttattctgtgccgcttgtcgagcaagaggagggtgactctgtcggagttcaagggcaggtcgctggtgtccatccgagagttctacgtgaaggacggaaaggagatgccctccgccaaaggtattagtatgacaatggagcagtgggaagcattttgcaatgctgtacctgcgatagaggctgccatcaaaaagcttgaagattcagactgaggacttgttttaggaggctcttcttttggcagggagctggacgtgatgcaatatatatatcgctgtagtaaggctgtctgaattacaaacgactttggtgatgttccagcggtcgcacatgggctttagggtggtgtatggctcctcggctctacgttttttagccatgttctacgaagctctactccataaaaaagtcagatc

SEQ ID NO: 21116 - DNA, 604 bp, Zea mays
  Clone ID: LIB3279-043-H12_FLI
gcggcggcggcggcggcgcagcagcggcagcagcatccgaagatggtgaagttcctcaagcccggcaaggccgttatcctcctccagggccgcttcgccggcaggaaggcagttatcgtgcgcgtgttcgaggagggcacccgcgaccgcccctatggccactgcctcgtcgcaggcctcgccaagtacccaaagaaggtgatccgcaaggactccgccaagaagactgcgaagaagtcgcgcgtcaagtgcttcatcaagctcgtcaacttcactcacctcatgcccacccgctacaccctcgacgtcgatttcaaggatgtcgccaccggtgggcccgacgcactctctacccacgacaagaaggtcgccgcctgcaagacggccaaagcgcgccttgaggagaggttcaagaccggcaagaacaggtggttctttaccaagctccgcttctagatgctcggcctcccgaatagtcctgctttagctgtcgatttgttgtatcggacacactccatctctgttttcgtattaccatgaatatttcgtgtttagtcctggggctctcagagataaatttgctaagatatgccgttgttgtgtt

SEQ ID NO: 21117 - DNA, 855 bp, Zea mays
  Clone ID: LIB3279-044-B8_FLI
cccttctttcattcgccgccgccgcctgctctctgctgccgtcgccatggggagaaggcctgcgagatgctatcgccagatcaagaacaagccataccccaagtccaggtactgccgtggtgtccctgaccccaagatcaggatctacgatgttggcatgaagagaaagggtgttgatgagttcccctactgtgtgcaccttgtctcttgggagaaggagaatgtctccagtgaggctcttgaggctgcccgtattgcctgcaacaagtacatgaccaagtctgcaggaaaggatgccttccaccttcgggtccgggttcaccccttccatgtccttcgtatcaacaagatgctttcgtgtgctggggctgataggctccagactggaatgaggggtgcctttggcaagcctcagggcacctgtgctagggtggacattggtcaggtcctcctttctgttcgatgcaaggacaacaatgctgcacatgccagtgaagctctgcgtcgcgccaagttcaagttccctggccgccaaaagattattgagagcagaaagtggggcttcaccaagttcagccgtgccgactacctgaagtacaagagtgagggtagaattgttcctgatggtgtcaacgcaaagctgctcggtaaccatggaagacttgagaagcgtgctcctgggaaggctttcctcgaggccgttgcttaagtccaatctacagttggaatgcgaatccagacgttttggtttagcctatcttattttgctttgtgcaacatgaattttaagtgtatggggtattacagtgccttgtgtgaacctgcttatctcgtgctgaacatcgttatgcatgg

SEQ ID NO: 21118 - DNA, 983 bp, Zea mays
  Clone ID: LIB3279-044-C6_FLI
gatttaatgtgttattatttttgaaatattttttacttgtagtcatttaatttttaataacgcatatgaatctctaaggttttattacgacaaaaaatactcacacgttacgcgtttcggccgatcttgtccgcggtctgcctccctgacttttgttggcgctagccgtgtcgaaccgaaagtcccaagtcccacccaccaaacccaacacatcgtgtctgcgttctccccctttacgccggcgagtgttcgtcgctggctcgctgcagcggggagaatagaggcagagagcagggatgagcgacgagcgggtgaaggcggaggcgctgcagatcctgggcctattccaggtgctcccccgcctcgtcgtcttcgacctcgactataccctctggcccttctactgcgagtgccggtccaagagggattcgccgagccttttcaggcacgccaggggcatcatgtacgccctcaaggagaaggggatcgacatggcgattgcttctcgctcccccaccccggacatagccaaggtgttcctcgacaagttggagttccagtccatgttcgtcgcccaagaaatattctccagctggactcacaagactgagcatttccaaaagatccagaggaaaactgggattccctacaaatccatgctgttctttgatgacgagaacaggaatattgaagcagtatcaaaaatgggagtgacgagtgttttagtagagaacggggtgaaccttgacatgtttaagctgggtctcagtaactttgcaactaactgtgctgcctccagcagaaaggatgatgaataacctcgaggagaagtgatacatagaagaaaataccttcaaaacactgtactcgaattcattgtaatcaatttgcccccattcatgaacaatttattggtgaaagatgacctcacagactagcttttgaactgatgcaacgcctgtctaatatatttatttgaaggc

SEQ ID NO: 21119 - DNA, 644 bp, Zea mays
  Clone ID: LIB3279-044-D9_FLI
gcctcattcatctccattcgaaacaccctcgcacccacactctcccttcgtccccagcctaaatccccgcaacgatggctcgcacgaagcagacggcgcgcaagtccacgggcggcaaggccccgaggaagcagctggcgaccaaggcggcgcgcaagtcggcccctgcgaccggcggcgtgaagaagccgcaccgcttccgcccgggcaccgtggcgctgcgcgagatccgcaagtaccagaagagcacggagcttctcatccgcaagctgcccttccagcgcctggtccgcgagatcgcgcaggacttcaagaccgacctccgcttccagtcctccgccgtcgccgcgctgcaggaggccgccgaggcctacctcgtcggcctgttcgaggacaccaacctctgcgccatccacgccaagcgcgtcaccatcatgcccaaggacatccagctcgcccgccgcatccgcggggagcgcgcctaggcggccggccggataggccgtggcccgtggcgcaggctcttctcggaagtttgtactagtggtcgggtcgtgtggaaggagtggtgtactgatcagcaatgtctcaaaccatgtcaacctctttgttgtcatcaatggaaatcgccacttatgtgtgct

SEQ ID NO: 21120 - DNA, 1392 bp, Zea mays
  Clone ID: LIB3279-044-F5_FLI
cggacgcatgggtcccacaccaccaccacctcctccggtccccaacccctgtcgcaccgcagccgccggccatggcctgcctcaccgacctcgtcaacctcaacctctcggacaacaccgagaagatcatcgcggaatacatatggatcggtggatctggcatggatctcaggagcaaagcaaggaccctctccggcccggtgaccgatcccagcaagctgcccaagtggaactacgacggctccagcacgggccaggcccccggcgaggacagcgaggtcatcttgtacccgcaggccatcttcaaggacccattcaggaggggcaacaacatccttgtgatgtgcgattgctacaccccagccggcgagccaatccccaccaacaagaggtacaacgccgccaagatcttcagcagccctgaggtcgccgccgaggagccgtggtatggtattgagcaggagtacaccctcctccagaaggacaccaactggccccttgggtggcccatcggtggcttccccggccctcagggtccttactactgtggaatcggcgccgaaaagtcgttcggccgcgacatcgtggacgcccactacaaggcctgcttgtatgcgggcatcaacatcagtggcatcaacggggaggtgatgccagggcagtgggagttccaagtcgggccttccgtgggtatatcttcaggcgaccaggtctgggtcgctcgctacattcttgagaggatcacggagatcgccggtgtggtggtgacgttcgacccgaagccgatcccgggcgactggaacggcgccggcgcgcacaccaactacagcacggagtcgatgaggaaggagggcgggtacgaggtgatcaaggcggccatcgagaagctgaagctgcggcacagggagcacatcgcggcatacggcgagggcaacgagcgccggctcaccggcaggcacgagaccgccgacatcaacacgttcagctggggcgtggccaaccgcggcgcgtcggtgcgcgtgggccgggagacggagcagaacggcaagggctacttcgaggaccgccgcccggcgtccaacatggacccctacgtggtcacctccatgatcgccgagaccaccatcatctggaagccctgagggctaaggcggccgttccgtcgcgttgcgttgcgttgcagggtccccgaagcgattgcaaagccattgttccttctgttccgtttgcttattattatcattattatcatctagctagatcatccgggggtcaggtcgtcgtggtgtgccaaaacagaacacagaaagaagaagaaaaaaaaacaagacgtgtggcgttaatgttatgtcatccaataatggccgtaccacacttgtggtacctttcagt

SEQ ID NO: 21121 - DNA, 1411 bp, Zea mays
  Clone ID: LIB3279-044-G12_FLI
ctgctatctatctcttttctgaaggaaaaaaaagttcagcgcgcagttaagcatagcaggacgaccacgacgatgtatcacccgcagtgcgagctcctgacgatggcgcacgaaacgccggacctggacgccggccagccgcacctaaccgtctccggcgtcgccagcatcccggcagagctgagcttccacctgctgcactcgctcgacgccgcggcggcggtcaatcccgtcacggcgccgccgcagtccaccatcgactacttcctcggcggcgccgatccccaccagcaggccatgcagtacgagccgctgccgcccgccgcgggcggccaccaccagtacaccatggacatgttccgcgactactgcgacggccactaccccaccgccgagccgtacatccgcgggacaatgactggagccctcgtgttcggggccaccgacgacgacgactcggccgctgcctacatgcccggggggcactttgagacctccccgccgccgccacgcgccaccggccgcggcaggaagcggggcagggcgctgggcggcggcttccatgcggtgctggccaacggcgtcgagaagaaggagaagcagcgccggctgcggctcaccgagaagtttacggccctcatgcacctcatacccaacgttacgaagactgatagggcgacggtgatctcggacgcgatcgagtacatccaggagctggggaggacggtggaggagctgacgctgctggtggagaagaagcggcgtcggagggagctgcagggggacgtcgtggacgcggcgccggctgcggtggttgctgccgccggtgaggcggagagctcggagggcgaggtggctcctccgccgccggccgtgccgcggcagccgatccgcagcacgtacatccagcgacggagcaaggacacgtccgtggacgtgcggatcgtggaggaggacgtgaacatcaagctcaccaagcgccggcgcgacgggtgcctcgcagccgcgtcgcgcgcgctggacgacctccgccttgacctcgtccacctctccggcggcaagatcggtgactgtcaaatctacatgttcaacaccaagattcacaaggggtcttcagtgtttgcgagtgcagtggccggtaggctgatggaagtggtggacgagtactaggctaccatgcacttgaatttctagctagctctacgtaccgcgctgctatgaatctagctatagcgtttcttggatgaaagactagttagttgttaccttctatctttgcttcaattaaatccgcttgctcgttacagactgagtttgtttctaaatgtcaaggttgttttggtcaaattgaataaattggcacactggcctgtgaggttattatatatatttatgtgtttattactggtct

SEQ ID NO: 21122 - DNA, 343 bp, Zea mays
  Clone ID: LIB3279-045-C3_FLI
cttctcttccctcgttcgaagaagctcgcagcagccgcctaatccagcggcagttgaggatggcggcggcgccgccgccgccgccggacgggcaggagaaggtgatcgcggcggcgcagcacatcgtcaagtcgctcgcgaactccaagaacgccgccgacgacatgatccgcatcctctctcgcttcgacaaccgcttctcgctcatgtccgacctcttccctcctccccctaccgccgtcgattccatactggaggcggacgaggggacctctcagggggaaggggacgagcccgatctcgaccccgaaggcgacgcggcggcccgcgccgaggcggagtg

SEQ ID NO: 21123 - DNA, 1297 bp, Zea mays
  Clone ID: LIB3279-045-E9_FLI
tgtgcttgagctggaggctgttggcaggactgacatccctgtggcagagggatcccatccaacgatcaagaaagccaccaagctgaggatcacaagctttgtccacggttcagacggcctgaggatcgcaagcttcgtccacggttcagacggccactgtggatcgaggtgcggcaggtcggggcgccgccgcggattgtaggctcggccgagactacttcgtcaccaacgtcctcgtatgttctcatatatgggtggaagataaagatttgtccagggttgatggtgaggtatttcgaattgatggccaaaacgcccatgttcgcacaaccaaggggaaggcggtatgtgttgctctgcttttgaagtctgtcacaaaccctttttagtttgttttttagttcttcataatttcatagttctgtttctggcccagagtttctcgcacaaccaatgttgttaactgaatagttaaactgaataaaaggtatgatgtttcacatttttaattttaaaaattatttctattattatagactagaggttacctctattgaaggagatgacaggtgtctattattatagcagtaaatcatctttgttgctcctactacacccgttttgagctagaaattttgtacttaatcaccattacaatatgacaggtgttcactacagttatacttgcattcactttgcaaccaataccgtctcagttatttttaaaatggtctttgactaattccttcaatgtactactgatctactgcatccctgttaaccaataccatcagtttttattaatttaactttgcctagaaacaacatatgtgtaggatatgcacaaaagcacttattgagttgagtggtaatatatactgccaactccaagggaatttgattttattactcaacgtttatgcctttcatttactaccttcatttttttccagaagtgtttagtgcatcaacattgttttcagtaaatgtctttgactgttgccttttattgctatatgtcgggccgttttgttgcgttgttgtgcacgcggttgtagggatggcgtattgtggcggctacgagggaccgatgttcctgtgtggcagtgacaacgataccgtggagccaagacaatgtcagcaagctgatttttcagattggaatctatggttctttttaaagatcgaatatgttctagcatcttataaagatttgtcagaatgtaaacatttgttctgaggtcatttaggcctcaaacagaatttcttggacttatttcgttggagggaatgggac

SEQ ID NO: 21124 - DNA, 892 bp, Zea mays
  Clone ID: LIB3279-045-F5_FLI
ccgccggcgcctccacttcgcgttctcgcctcatctcctcccgctcaggatccggcggcgaaggtaaggcaagatgtacaccgcgaggaagaagatccagaaggataagggccttgagccctccgagttcgaggactccgtcgcccaggctttcttcgacctggagaacggtaaccaggagctcaagagcgacctcaaggacctttacatcaacggtgctatccagctggatgttgccgggagcaggaaggctgttgtgatccacgtcccataccgcttgcgcaaggccttcaggaagatccatgtcaggatcgtcagggagctggagaagaaattcagcggcaaggatgtggtaattgttgccacaaggaggatcgtgaggccgcccaagaagggttcagctgttcagcgccctcgcaccaggactctgactgctgtccatgatggcatcctggaggatgttgtcttcccagctgagattgtggggaagcgtgtcaggtaccgtctggatggtgccaagatcatcaagatcttcttggacccaaaggagaggaacaacaccgaatacaagctggacacctacactacggtctaccgcaggctgtgtgggaaagatgtggtctttgagtaccctatggccgaaaatgcataaatatgacgcccggatatccccattttattttgttgaatctggatgtttctttggggtctcaactagactgctccgtatgtacttcaaaaaccatagttttgatgccaaagttgttgcctaggaatttggtactcgggaattggtagcggacgtgaacaatgttaagttttgagcatttaaatttacctttgtcatgataacatgttgcgagtttttatttaattgctggacgtgtttgat

SEQ ID NO: 21125 - DNA, 1607 bp, Zea mays
  Clone ID: LIB3279-045-F6_FLI
taaaaatccagcagcatttctccgccgcccatacgacgacgacggccactcggcgcagtgatttgggcgccccgcaaagcggtggctccaccggccagcgcatcaaaggccctgtggaatatggcgccgcgccgcttgccggggccggggccggggccgggcccgggccctcctcttatatacggcgtggcgagcaaacccaaaaccctcgcaggcagaaggcaaacgcggctgctagcgcggcgcccctctcccactccgactccccagccgccgccagcccgcacacccctccctcgcgcgctcagggtttcggaatggaagccgaggcggcggccaagaggacgcgggagagcggggaggacgccgccgcggcggggatctccgccgtcatcccgggatggttctccgagatcagccccatgtggcccggtgaggcgcactctttgaaggtggagaaggtgctgttccaagggaagtcagactaccaaaacgttatggtctttcagtcctctacgtacgggaaggtgctcgtccttgatggagttattcaggttacggagagggatgagtgtgcgtaccaagagatgatcactcacctgcccctttgctccatcaaagatcccaagaaggtgttggttattggagggggtgatggtggtgttctgcgtgaggtttcacggcattcctctgtggaacaaattgacatctgtgaaattgacaagatggtggtagatgtatccaaacaatttttccctcatttagctgttggatttgaagaccctcgtgtgtcattacacattggagatggggttgcctttttgaaaaatgctccagaaggtacttatgacgcagtaattgtggactcatctgatccgataggtcctgctcaagagctttttgagaagcctttcttccagttggtggccagagctttgcgtccaggtggagttgtatgcacccaagcagagagcatatggctacatatgcacattattgaagatattgttgtcaattgtcgacaagttttcaaaggctcggttaactatgcttggacaacggtgcctacataccctagcggagttattgggttcatgctttgctccaccgaagggcctgctgttgatttccagcaccctgttttcaacatcgaggaggatgaacatcctatgaaatcaaaaggaccccttaagttctacaactcggagatccacacggcatcattctgtttgccttcttttgcaaagagggtaatcgagtcaaaagcgaactagacgtgaaggtatctccaagggctaagtaccttaggtgcgcaacacagaatttgttgtagtgtgaaaagcggatgcctccctcccttttctccccctttgatgaatagtataagcacaggagatgagatgcaacagttatcggagttatcagtctacatggtcctgaccagtcgtatgtctcggctgcctggtgcagctatgaaaacgttttgcaatagcttttttcggcagtcctcacatcatcacggttgtgtttccgcttccacatcagaatggaatatatatacgtatgaaataaaactgtgtaatggctgctgccatcggatccttttt

SEQ ID NO: 21126 - DNA, 592 bp, Zea mays
  Clone ID: LIB3279-046-A3_FLI
ctgagggctccggctcctctcccgttctgatcgccaattcgccttccaccgcctgcaacccttcttcccttctcggtcatcgtgacggcatcacatgcgtcagcctgctaagtcttaagatggcgtcaaccaatggtcagacagaagctccagcaccatctgtccccaaaaatcccgctatggcatcatgccgaaagaagaaaacagatgatgttaccttccttgaagatctgaaagaccacatggatgagttcattcatgcctccatggatgagcacaagacctgctttaagaagacaattcagaagatgtttgggatgtcgaaggctgttgcagagagatccgcggtggaagcaaacaaagctgaagttgaaagtgctttgccacttcagaccagtgtctcgcagtagaatttcatgttggtagtttcttgctcgtgccaatagttttatataagggtttttgttgctgtgttttctgaaacgcataagggtgcgtttgtttacgccggatttggctgagaatcgttccggctgattaactcttatataaattagataaacaatccaacccggaatcattccgggtgctc

SEQ ID NO: 21127 - DNA, 1174 bp, Zea mays
  Clone ID: LIB3279-046-D6_FLI
cctgtacacgcctccgccaccctaccaactactcaataaccctagctaaaccccacgccgccgcggcgacctcctccgccggcaggatggacagcctcaggggagccaagttgccgggcgtgccgaagggcgggagtgcgctcgtgaaggtggcgctgctcggcggcgcggggctctacgccgtcctcaacagcttctacaacgtcgagggcggacaccgcgccatcgtcttcaaccgcctcgaggggatcaaggacaaggtgtaccccgaaggaactcacctgatgatcccgtggatcgaaaggccgatcatctacgacgtccgcgcccgacccaacctcgtcgagagcacctccggaagccgcgacctccagatggtgagaattggtcttcgtgtccttactcgacccatgccagatcagctacctaaaatctacaggaacttgggggagaacttcaatgagagagttctgccttcaatcattcatgaaacactcaaagctgtggttgctcaatacaatgccagccagctgatcacccagagagaggctgtgagcagggagattaggaagattctgactgagagggccaacaacttcaatattgctctggatgatgtgtccatcacaagcctcagctttggaaaagagtttactcatgccattgaagccaagcaggttgctgcacaagaagctgagcgtgccaagttcattgttgagaaggctgagcaggacaagcgcagtgcagttatcagggcacagggtgaggctaagagcgctgagttgattggccaagccattgccaacaaccccgccttcctggctctgagacagattgaagctgccagggagatctcccacaccatggcggcctccagcaacaaggtgttccttgattccagggaccttctgcttggtcttcagcagctgaacgtgggggccaagcaaaagaagtgaagcggtcgtccccaggccatcgtggatgagagtagtttcaggcgatggttttatctgttacagaatgcgcgtgcgcgggaatgaacaaagtggcaccatgttgcagtctgtatgttctgacaaatttgtctatcgatctttgattctctgctcttgttagtcctgactgatgaatctgttcttgcaattgccttcctggaggcttgctctgtgcgtgt

SEQ ID NO: 21128 - DNA, 1030 bp, Zea mays
  Clone ID: LIB3279-046-F12_FLI
tctgcaggccccgaagcgaggtggcagggcaccggtgccggccaagaagaagacggtatgtattgcgctttcccgcgttcttgctcgaggtgtgggcggcgccatgatggaaatgtgtggtctgattgtgttgggtttggttgggtgcaggataaagtgacgaaccctctgttcgagaaaaggccgaagcagttcggcatcggcggcgcgttgcctcccaagaaggacctgcaccgattcgtcaagtggcccaaggtcgtgcgcatccagcgccagcgtcgcatcctcaagcagcgcctcaaggtgcctccggcgctcaaccagttcacccgcaccctcgacaagaacctcgctaccaacctgttcaagatgcttcttaagtaccggcccgaagacaaggctgccaagaaggagaggcttctgaagagggcccaggctgagaatgaaggaaaaactgttgaatccaagaaaccaattgttgtgaagtatggccttaaccatgtgacttacctcattgagcagaacaaggctcagctcgttgtcatcgctcatgatgtggatccgattgaactggttgtttggcttccagccctgtgcaggaagatggaggtcccatactgcattgttaaaggaaaggctcgccttggatcgatcgttcacaagaagactgcatcagtcttgtgtctgaccactgtcaagaacgaggacaagcttgagttcagcaagatcttggaggctattaaggcgaacttcaatgacaagtttgatgaagtcaggaagaagtggggaggtggcatcatgggctccaagtcgcaggccaagaccaaggccagggaaaagttgctggccaaggaggccgcccagcggatgacgtagattatccactgttgagtttgcccctgtagtttgacgtggaagaaccgatgagcattgtgcactcgtattgtgtttttttgaatctactttcatatgtttctgtccatcagaccgtgtttagaaactttggaagacagttctacagtgtttgtgc

SEQ ID NO: 21129 - DNA, 1408 bp, Zea mays
  Clone ID: LIB3279-046-G5_FLI
ccgcgatgccgccgccgcagcccccgcaccggcatgccaagacggactcggaggtgacgtccagcatggcggcgtcgtccccgccgcgtgcggcctactacgtgcagtcgccgagccacgacgacggcgagaacaagacggccgcgtcctccttccactcgtccccggcggcgtccccgccgcggtcggcgtccaggcactcctcctcctcctcccgcttctccgccagcgcaaagggcaccgcctccgtcgccggaggcgtccccaccggcggtggccggcgacgcggcagcgcgtgggcgaaggaggcggccatcgaggaggagggcctgctcggcgtggacgacggcggcggcggcgacggagacggccgcggcgggatccccaggcgggcgcgctacttgctcggcttcgcgggcgccttcctcggcctgttcctcctcttcgcgctcgtcctctggggcgccagccgcaaccagcgccccgtcgtggccctgcgcgccgtcacgttccaccgcttcgtcgtccaggccggcaccgacgcgtcgctcgtgcccaccgagatggcctcgctcaacgccaccgtcagcctcaccttccgcaacgccggcaccttcttcggcgtccacgtctccgccgaccccgtcacgctccactacgcgcagctccagctcgcgtcgggcaacgtacgttacgtattaagcgccgatcggtgatcattcggccggatcgatgtttgagagagagagagagagagcttcttcattatgttttgtcgcgcgcagatgaagtacttctaccagccccggaggagccagcggagcctggcggtggcggtggtcggcgacaaggtgcccctgtacggcggcggggcggggctgagcagcaccccgacgacgctgccgccgccgaggaagcgcgcgccgccggtggtggtgccgccgccgcccgtgccgctgcggctggccgtgcgggtgcggtcgcgcgcgttcgtgctggggagcctggtcaagcccaagttctacagcgaggcgcagtgcagcgtcaccatggaccaggccaggctcggtaagccagtctccctcaacaaggcatgcacctacacacactagcttggctaggctacatacatacgcctgctgccgtgggtcgtctcgtcgccaccatggtcgtcgtcgtcgtgaactttgcccttcttcttgaacaacacacactctctctctctctcccttcgcttttctgcgtgcgtgcgtttgttggtcgcttgtcttgtacatagaaatttttagtttctggtgtacgtaggagagttttgagtgagatggaataagaatcaggcatttccctcatacggcgtttccgattgcgtgacatgccgtggagggcatgtaaaatgtcggtgaaattc

SEQ ID NO: 21130 - DNA, 1110 bp, Zea mays
  Clone ID: LIB3279-047-A7_FLI
cccacacccacctacctacctacctaccaccaacgcctcggctcccctctccagcgagccgcgaccgcgcggcaggggaagcttagcacggacgggaccagctgacgaccaggccatggggaagtacatgcgcaagggcaagatgtccggggaggtggccgtcatggaggtccccggcggcgcgctgctgggtgtccgcacccgctcccgcacgctcgcgctgcagagggcgcagaggccgctcgacaagggggacgcggatgacgccgccggacagtacctcgagctcaggagccggaggctcgagaagcctcataaggaccatcagccgctgccgctgccgctgccgccgcccgcccccgcagccaagaggggcgccgggaggaaggccgcctccaccgccgccgcgccaaacgcgctggcggaggacgaggtcgaggtcgaggtctccttcggggagaacgtgcttgacttggacgccatggaaaggagtaccagagagacaacaccgtgtagtttgatcaggaacccagagatgataagcaccccaggatccacaactaaaagtaaaaccagcaactcgacgacttcccgtcgcaggatggaaacctcagtctgccgtttcataccgagttcgctcgagatggaagagttcttctcggccgctgaacaacaggagcagcataacttcagggagaagtataacttctgtcctgtgaacgactgccctctcccgggtcgatatgagtgggcgaggctagactgttagattcctccaagcacaagagcaccatttatctgatgtgtctaccacatgactagcgccgccgccgccgccgaggaggcgtaatcaactggatcgcattagctttcttgcctgttgtaaaaattagagtagttagcctgtagttgaatggtcctgtgtaacgaaacaggcgtggttctgagttacaccccgatccccaacctcactgtaaccgtttgactgctcgctcaagctgtagccgaaccatccatctcaagtagcgtaggcctagcgtattcatctgttcctagttctagttcttgaatggattaatcgaatgagatcattgttagaatctgcatggc

SEQ ID NO: 21131 - DNA, 1235 bp, Zea mays
  Clone ID: LIB3279-047-D11_FLI
ctccgaattcgaccccgccgctaaaccccgcaccggttgccgaggcgtctcccgctccagctccgactctcacgcgactagggttctgtgcgtccacttccccgtcggcgcaatggaggtcaagaagtgaagccaggagccacggtttcttgcaaagttggtgatggcttggttatccacctttcacaggctgcactgggggaatcaaagaaagcgagtgagaatgccattttgtctgttaatattgatgataagaaactagtgcttggaaccttatcagttgagaagcatcctcagatctcttgtgatcttgtatttgataaggattttgagctaccacacaattcaaaaacacgtagcgttttcttccgtggctacaagtcccctgttcctctgtttgagtctaattctggtgaagatagttccgatgaagagctaaaaaccgatcaaattccattgcagaataatgaaattaaaatttctgcggcaaaggttcctgcgaaggatgatgatgatgatgttttcattattctagcgatgatgatgatgatttatagcagtgatgatgatgatgatgatttcactactagtgatagtgataatgaaatgtctgaggaagatgactccagtgatgaagatgaaatgtctgaggaagatgactccagtgatgaagatgaaatgtcaggtggtgctgatcctagtgatgattccagtgatgaatctggttcagaacatacttctgccccaaagaagactgatgtagtagttggcaagaagagagcaatcaaagctgaggcaccttatggtaagaaggctaagtctgaacaatcttctcagaaaacaggtgacaaggcttcaacttctcatcctgcaaagcagtccatcaagactcctgcagacaaatctaggaagacccccacagctgacaagaaatcccccaaatctgggagccatggctgcaagtaacgcaacaaatctttcagcagtgcgtcagcactttagtcccatcagaagccaaaaaagcatgaagcctagaggagcatgtgctgtaccttataggttgatctacttgaattatcaaaatcagtggtcttatttttgaacttgaaaatatcaagtttggaacttgcctagtagttatgcgattagtggtcttactatttttaaacttaggaaatctcaagtttggaacatacctggtatgtcttgttaataacatgggtgtgagaggagag

SEQ ID NO: 21132 - DNA, 1224 bp, Zea mays
  Clone ID: LIB3279-048-A2_FLI
cccgctcccttccttcctcctcatcctcctcatggctctgtcgtccgccggctcgttcgtggcctgcagcctccggccaagcggagctagcatccatgccccgaggtcgacgccgcacctgaagccgggtgctgcggcggcgtcgttcacgaggacgccgcagcgccgggcgaacgcgaccaagggcggcgtgtccaccgtgtgcgagccgctgggccccgaccggccgatctggttccccggcagctcccctccgccgtggctggacggaagccttccaggagactttggatttgaccctctcggactaggttcggagccggagctgctgcggtggttcgcgcaggcggagctgatgcacgggcggtgggcgatgctggcggcggcgggcatcctggtcccggacctgctggcgcggtggggcttcatcgacgcggggttctcgtggttcgacgccgggtcccgcgagtacttcgcggacccctggacgctgttcgtgtcgcagatggcgctgatggggtgggcggaggggcggcggtgggcggactacctgaggcccgggtgcgtggacatcgagccgcgcttcccgaaccgcaagaacccggtgcccgacgtggggtaccccggcgggctgtggttcgactgggccaactggggccgcgggtccccggagcccgtgatggtgctgcgcaccaaggagatcaagaacgggcggctcgccatgctcgccttcgtcggcttctggttccaggccgtgtacacgggccagggccccatcgacaacctgctcgcgcacctcgccgaccccggccactgcaacatcttctcggcgttcacgtcccactgatccgatgttgcttcggagctggcggagagactgcgaagaattaaaaaaaaaagtgcatcctgttgagggagaaagaacttcgcttggtcggtatcattttggccctgctggacatgtcaacattttgtttgtagtacctgcgtagaaatgtcaaaccacctgtacaaacgtacaaataccaccccagggatcgcgatgatgctagccagcagtccagcacacactagcttgtcctgaagatccatgcaacaccgtatacgagacaattgtatttttgggactacaaacagtgtgctttgcaataatgtcattccaaacaattagctcgcagaaatgggattataaagatcttataattgattaagatgccatttagt

SEQ ID NO: 21133 - DNA, 486 bp, Zea mays
  Clone ID: LIB3279-048-C5_FLI
gtcgtgctataacggatagcgctcctcgttggcgccactggcgggtggttctgcctctggtctggtgtgtttgtgtgtggtcacacttgccagctagcagaggcgcctgcttgtacctagattactgtttccattgtcgtcgtcatcggctaacattgtcataatgtcagtttgggtaatgttagattaagtaattattgtgttcaaaaaaaaggagcctatatccatgtactagaattattcagtttcactccacatcgtgatgttttatttttacttttgtcgtgctataacggatagcgctcctcgttggcgccactggcgggtggttctgcctctggtctggtgtgtttgtgtgtggtcacacttgccagctagcagaggcgcctgcttgtacctagattactgtttccattgtcgtcgtcatcggctaacattgtcataatgtcagtttgggtaatgttagattaagtaattattgtgttc

SEQ ID NO: 21134 - DNA, 1277 bp, Zea mays
  Clone ID: LIB3279-048-F11_FLI
gggtgcagttggatactgttgcaggtaacaactactcttctccggactctcggggtttcccgacgtccaccacccatcctcgcttctctcgagtcctcaatccatcctccggctgctccctcccagcgacgaaaccctagcccgtcacctcgacgcctagcccgccaccttgccgctcgtcgctgcaggtttatggcgcctgtgtgatcggatcagcagtccgctccgtctccctcggcccacgcatctgatgttcctctcccgcatcgtactccgcgacctggattccatcgactctccggcctccatggcgtcctcgaagaaggttgtgacccgtgacgagtgggagctgaagctccgcgacgtcaagatccgcaaggaggacatgaaccgcctcgtcatgaacttcctcgtcaccgagggcttcgtcgacgccgccgacaagtttcgcatcgagtccggcacccagccggagattgacctagcgaccatcactgatcgaatggaggttaagagagcagtacagtcgggtaatgttcaggaggcgatcgagaaaatcaacgaccttaaccccacgattttggacacgaatccccaactatactttcatctccagcaacagaaactaatagagttgattcgcgtgggaaaaataaatgaagctttggagttcgctcaagaagaacttgcaccgagaggcgaagaaaatcaaacatttctcgaggaaatagaaaaaactgtagcactactggtttttgaagatgtaaaaaattgcccttatggggaactattggatgtttctcaacgtttgaagactgcaagtgaagttaatgctgctattcttacaagccaaagtcatgagaaagatccgaagcttccaagcttgttaaagatgttgaaatggacccaaaatcaactggacgaaaaggcggcttatcctcgaatcaacgacttcaccactgccgcgctggaagatccatcgatatgaatctgctgtgaaggaactgagggtatgcaccaagcctgcctggtgcctacacgtggttgccccggatctgtcaatagatcatcgtctgcagcgatcgagttcacccccttgcactagtgtttaagctcaatgcaagcaattgatccgaaaacatcacctgtgttctacctgtacatgatgtagaagacatgtttgaaccctttttaagttagtgaaatgttggatttttttcatggacatatattcgtttcaaacctgtggtacttgcaacacgcaaattgtttcagtc

SEQ ID NO: 21135 - DNA, 1301 bp, Zea mays
  Clone ID: LIB3279-050-G5_FLI
gcagcaggcgaagcatcgccagattggtatatcgatcgattgatcggtggcggaggaaggggaggacggggggcagatggcggcgtgccggggcttcttcgagtgcctgctcaggctgctcaacttcatcctcaccgtcgccggcctcgctatggttggctacgggatctacctgctcgtcgagtggatgaagatatccgaggacggcatcggcggggcatcgacggcggaggtgctcgtctccggccggccgttgttgggggctatcgttctcggtgacagcttcctcgacaatctacccaaagcatggtttatttatttgtttattggtattggcaccatcgtcttcttcgtgtctctgtttggctgcattggagcagggacaagaaacacctgctgtttgtgtttctatgctttcttggtcatattgttgatccttgctgaagctgcagctgctgcattcattttctttgaccatggctggaaagatgtaattccagtggacaaaacacataactttgatgttatgtatgactttctgaaggaaaactgggagattgcaagatgggtcgctctgggcgttgttgtttttgaggcagtgctcttgctgttagctctggctgtcagggcaatgaacaaacctgctgagtatgacagtgatgacgaaattatagcaattggccgaagccctaccatccggcagccattgatccatacccaaaatgttcctgccactggtgttcctgtcccaacacttgatcaacgtgcaagtagaaatgatgcctggagtcaaaggatgcgggagaagtatggtctggacacgagccagttcacatacaacccttcagacccaagcaggtaccagcaaaatggcacgccacgggctgaagaaaggagtcgatgcactataatgtgaagaattcttcatgaggtcctacgagataatagactttcttgaaggcggctactgtagtttggtgttaccagtgttgttcagacttcacagcggtgtgtggaatagaagaatcccgaccatattgtttgtcacgctcgatatgacttctcagcaaatgctctatgcacctaattttactgtgaatgaggaactgctagccgttggcatcatctattttgaattttttgggggtttgtttcttgttggcaatcagcccccctttcatccttctacgtaagttccagattgtcactccgtttgatttagatgctttactcaaatgtgtgtaagatttggttgtgacgtgaagtgagatgggaatgggagaatctattttgctttcaat

SEQ ID NO: 21136 - DNA, 542 bp, Zea mays
  Clone ID: LIB3279-051-A4_FLI
cccttttacagcagcgtctgatctttgctggcaagcagctggaggatggtcgcaccctcgcggactacaacatccagaaggagagtacccttcaccttgttctccgcctcaggggtggtatgcagatctttgtgaagaccctgactggaaaaaccataaccctggaggttgagagctcggacaccatcgacaatgtgaaggcgaagatccaggacaaggagggcatccccccggaccagcagcgtctgatcttcgccggcaaacagctggaggatggccgcaccttagcagactacaacatccaaaaggagagcaccctccaccttgtgctccgtctccgtggtggtcagtaagtcatgggtcgtttaagctgccgatgtgcctgcgtcgtctggtgccctctccatatggaggttgtcaaagtatctgctgttcgtgtcatgagtcgtgtcagtgttggtttaataatggaccggttgtgttgtgtgtgcgtactacccagaactatgacaaatcatgaataagtttgttgtttgaaattg

SEQ ID NO: 21137 - DNA, 1080 bp, Zea mays
  Clone ID: LIB3279-054-A1_FLI
ctctgattgggatcttaacttacaatcaactaacctagacttgtcagctccagttcatgctgctttccattccatcagtaatgtagcatgcatcagtactgtaatcaatcgatggacgaataattgtgcttcattgttgtagtgactaatcaaatggcctgctgctttctgtacttgtgagtaggtattcaagacgtacggattcatgctaccggtgatgcttgcatccatgtttgctgtaacagggctaaaggcctttctaatggccatggcgatcccgctcggtcagtcggccatatcatttataattgacgctgtatggccaaggagaaaaggcaaccgtgacgacaggtggaggagaccagtccaagaggaggaggaggaggaggaagatttccctagggacgccactgactttgcaacaggtggtcgaggcagatacagcagcagctattatgaggggaggagagggaggcagagctaccagtcaagtgtctctaacgattttgctgatgctgcctcagctgctgttggagctgatgatagcaccaagagcagcagcagtggagatggcggaggcaacaaaagcagcggtggatatggaggatgggatgagcttctggacaacaataacaacactgctgctgcccgggaggcaaagaggagcagcaactcattctcagctggcaacacttattacagcacgaaatcgcggccttcggcgactggggaggcagatgcggattataccgccgctggcggtggcggaagagcggagcagggagtaggagctcctccggaaagaatgagaatgagacgacggcgggtgccgagaacgatggggctgggcagtaccaggtacaagcaggcgccactcttgatgcgcctgttggtggcagtattcccattcctgggatcatggttcagtgtgctctgaactgtgctccttcgttccaaattataagacgttttggttgtcggctttctctagattcatagctttttgctatgtacttggatatacactatgtctacaaacgttataaaagcaatgtgtatagaaatgtcataatttggaac

SEQ ID NO: 21138 - DNA, 1224 bp, Zea mays
  Clone ID: LIB3279-054-C9_FLI
ctcacatcgacgcggttcggttccagtttcactcccactgccgtctcggcaacctcccctgttccacgcttcgtcctcgcctgccaggctgccatggccgcgacgtcccccttcgactgcgtcctcctagacctcgacgacaccctgtacccgggcgacaccggcatcggcgcggccctgaggcgcaacatcgacgagttcctccaggccaagctcggcgtgtcggccgacgaggccgccgccacgcgcgccgagctcttccgcgcgcacggcagctccctcgccgggctcatcgcgctcggctacgacgtgcacccggacgagtaccacagctacgtgcacggcaggctaccgtacgacaggatcgcgcgcgacccgcagctggcgcggctgctgcagagcatcccgcagcgcaaagtgctgttcaccaactcggaccgcgcgcacatggagcgggcgctggagcggctgggcgtggacgaggccgccttcgacgccgtcgtgtgcttcgagaccatgaacccgcacctgttcggcgacgacggtggcgaccggcgcccggccgtggtgctcaaaccggcggtggacgcaatcgtcgccgggctgcgcgccgctggctccaacccacgccggacgctgttcctggacgacagcgagaggaacatcgccgcggggaaagcgctcggcctccgcaccgccctggttggcaagagggcgaggagcaaggaagcggactacgcggtggagagcatcggcgcgctccggcgggccatcccggagatctggggcgaggccgctgaacgctcctccgacaagctgccggtgccggccgtgagcgtggtgaggtcgacgacgtccgacctggactccatcatcatccagcccacgtccatccacgcctaatatataacctcatcgtccctagctccccacccccaatcagaatcagcgggtgcgtgcgtgcgtgtgtgaatatctctctctctctctctctctctctctctctctctctgcctgcctgcctcacaggctgaaaggcgtgtacatttctgatcagcaccaccggtcgcccgtcggtgcgcgcgtgcatgtaaagcaggcaccaccagctgcagcccaagtgcgtgcatgagcatgacgagtcatgcaatgtgttgtacgtattttacatgatgataagaataacaaaccgtgtttagctgcagagacccgagcagcggtttt

SEQ ID NO: 21139 - DNA, 377 bp, Zea mays
  Clone ID: LIB3279-055-D12_FLI
cgaaaaaagggtgtctccactacacctgtgtatcctcctgtttttcgcgagctgctggagctgctgctttttccgcatcgggcaatagcctctgccgccgtgagtttccgtgtccgcgaccgcatgctggagtcagcctgagcaaaggtgtgttatgcagagcgtgattatgacgctgttttgcactgaagtctaaagagtaagtaagataggtgtcagataggaaggctgctgaatggactctaaattgtacactataaaatttatatggtgtttggtttgtttcattcaaatttaggtggtcatcatgagttcatttcttaaatatggtgtgatgactcaattctttatattagtactaactggtgtgatgactc

SEQ ID NO: 21140 - DNA, 980 bp, Zea mays
  Clone ID: LIB3279-055-D2_FLI
tcccgccgcgccgcctcaccgccgccggagaagatgggtcgcgtgatccgcgcgcagcgtaagggtgcggggtccgtgttcaagtcccacacccaccaccgcaagggccccgcccgcttccgctccctcgacttcggcgagcgcaacgggtacctcaagggcgtcgtcaccgacgtcatccacgaccccggccgtggcgcgccgctcgccaaggtcactttccgccacccattcaggtacaagcaccagaaggagctctttgtcgcagccgagggcatgtacacgggccagttcgtctactgcggtcgccgcgccaccctctccatcggcaacgtgctgcccctccgcgggatccctgagggtgccgtcgtctgcaacgtcgagcaccacgtcggtgaccgcggtgtcttcgccagggcctctggggactacgccattgtgatcagccacaaccctgacaacggcacatcgaggattaagctgccctctggcgccaagaagattgtccccagcagctgccgtgctatgattgggcaggttgctggtggaggcaggactgagaagccgatgctcaaggctggtaacgcgtaccacaagtaccgtgtgaagaggaacagctggcccaaggtgcgtggtgtggccatgaaccctgtggagcatccccacggaggaggtaaccaccaacacatcggtcacgcctctactgtccgccgagacgctccccctggccagaaggttggtctcattgccgctaggaggactggaaggctcaggggtcaagctgctgccacagcctccaaggctgacaaggccacctagagttattgtcgttgtttatctgtctactgtgctttagattgttaaaggacatgtgtttcagaacggatgtgttgttgcctcgtactatggtgaaacattgtctcagtttttgtggtcgctgtcaggattttgcattatgcctaaagatgtttactttggat

SEQ ID NO: 21141 - DNA, 514 bp, Zea mays
  Clone ID: LIB3279-055-G2_FLI
gtcgaaccagtacgagactacgtcgctggtgcagatcgagggggtgaacaccaaggaggacgtcgcgtggtactgcgggaagcggatggcctacatctacaaggccaagaccaagagcagcggcacccactaccgctgcatctggggcaaggtcgcccgcccgcatggcaactccggcgtcgtccgcgccaagttcaggtccaacctgccgccggaatccatgggccgtaaggtcagggtgttcatgtaccccagcagcatctaaagataatctgaatgtgtggaggacccttttcttctagattttatcttcagctgtccttgtaagggttgtgttcaggttgagagttagcaggttgagctgtctatctgagaaccatttaaagttctctgagttttggtgttatggatcactggaagtattatatgaagtttaagttagaactaatttgtttgccatacttttgtatgatgactctttaatcgcataatatgctcttattgcatcttgatc

SEQ ID NO: 21142 - DNA, 506 bp, Zea mays
  Clone ID: LIB3279-057-C11_FLI
gaaaaatatgcagcgacttcagttaacctataatataggtttgcacgagggagtcaaggcgaacaagggaattaagggtctgtttggttcgtggctaactatgccacactttgcctaaggttagtcgttcgaattgaagaactaaccttaggcagaaaagttaggcaaagtgtggcaagtgaggctgcgatccaaacatgccctaaacctcctattccatctttccaaaccccaccgtctctattcctcttctatagttctatttataatcttgaacaagaaactaggacaaaactcctgcacttcatgtgcatgtcatatataataaagagctaaaaacatcttgaacaagaaacttttaaaagagatagatttaagtgcatgatttttgcttagcttctgccctgtggtacatatgttgcatgctctgttctcttaaaatatttaggtaaatcaggaaatgaaaaaaaatctttttcatgaaatggcatgcagcatcgatcgag

SEQ ID NO: 21143 - DNA, 713 bp, Zea mays
  Clone ID: LIB3279-057-D4_FLI
gacattgagcaagtaaaagctgatgctgagggcctggcaaagaaactggaagcacttgaagcttacaaaagaaaacttttgggtgagaggttggaagaatgctcctttgaagaactgcacagtttggaagtgaaactcgaaaagagccttcattgcatcaggggaagaaagactcagctgctggaggagcaactccataagctgaaggagaaggagatgaatctgcgcaagagcaacgaagatttacgtgaaaagtgcaagaagcagccgccgccgccgccgcctatgctgatggctcctccgccgcctccagcgccggcagccatcgatcacacggggccgaaggatgtcgggatggacgtggagacggagctgtacataggattgcccggcagagattaccgctcaaacaacaaagacatgactgcacagtagctgtcaggtcaggtcaggtcaggctagccagcagtgcagagaataatcttagatctgtggtgcggagaactggagatgcaagccaagcccaagccaatcaacatgataaggatcatgagtgtcgcgtcgtgttttacaaacctgtccaccgtccgtcaaaggcacatgcgccagaacgtccgtcagagaacacttaccccctcatctccctctattagctagctgctccggcctgctcatgtcgaaaccttctgttcaagtatgttctcctcctgatg

SEQ ID NO: 21144 - DNA, 1396 bp, Zea mays
  Clone ID: LIB3279-057-D9_FLI
gtctcctctccccatcttctctcctggaagccgcctcggtcggacccggacaagatggccgccttcttcggtgctgcaccgccgccggctctcgcttcgttccgccacgaggaggaggaggagcagcatcaggacgccgccgaggaggtgtaccacgtggacgatgtcgacgagggcagcggtgacggccgtggccacggcggcgccggccaggggaagctgtgcgccaggggccactggcgccccgccgaggacgccaagctcaaggagctcgtcgcgcagttcgggccccagaactggaacctcatcgccgagaggctggacggcagatcagggaagagctgccgcctgcggtggttcaaccagctggacccgcggatcaaccggcgcgccttctcggaggaggaggaggagcggctcctggcggcgcaccgcgcgtacggcaacaagtgggctctcatcgcgcgcctcttcccgggccgcaccgacaacgccgtcaagaaccactggcacgtcctcatggcgcgcaggcagcgggagcactcgggcgcgctccgccgccgcaagccctcctcgacctcgccctcgccggcgccggcgccggcgccgcacctggcgcccgtcgtcgtcctccaccaccaccaccactacgccggcggctcccctcccatgccgccgttgcacgccgccgacgcccacacgcagtacacggcagcggcggcggcagcggacacccgcgcgcacagcggcggcgagtccgacgagaccgcctccacgtgcaccaccgacctctccctcgcttccgccgccccctgcttctaccagagtggctacgacgtggccccgcgcgccgcggcgttcgcaccgagcgcgcgctccgccttctccgcgccgccggcgacggcgcgctccgacgacaaggtctcgctgcccttcttcgacttcctcggcgtcggcgcggcgtgatgggggggccggcccgggccggccaggcggcggtgtacaggagggcggaggcggtcaaaggacgagagccccggcggcggtgaacccgtgcccgcgcgtagtttagctttagagcccgagttaaatcatcgagaacagaacatggcctgagcctgagagaggaggagaatggcgatccaccattgaactggtgcccgtggcattgcagactaacagctccgcatccgttcggctgctgatgttgctagtagtaatggtacggtgattactctctgctttgggttgggagagacgaatctgcaagcaccaccagaccaagcaagggcgacgatgggtatgggtggatgtttgcagaagaagaaaaaaccgcttgtaacacaaactgcaggacaaaggcagatcagagatcctctgctaactctctttttac

SEQ ID NO: 21145 - DNA, 1123 bp, Zea mays
  Clone ID: LIB3279-059-F3_FLI
tacagattgacagcgtcatctatgtcaagatcatggacccctaccttgcttcctatggtgtggagaatccaatctatgctgtcctacaacttgcacaaacaaccatgagaagtgaactcgggaagataaccttagataagacttttgaggagagagatgcattaaatgagaaaattgtgagtgccatcaatgaagcagccacagattggggcctgaagtgtatccgctatgagatcagggacataaatcctccagcagggattaggcaggctatggagatgcaggctgaggcagaaaggaaaaaacgcgctcaaatccttgagtcagaagggatgaaacaggcccaaatccttgaatcagaagggaaaaagactgcccagatccttgaatctgaaggagctatgttggatctagcaaaccgtgccaagggtgcggctgaagcaattcttgccaagtcagaagctactgctcgtggaatgagattggtttcagatgcgatgacaactgaaggcagtgccaaggctgctagcctgaaacttgcagagcaatacatcgaagcattctcaaatctggcacaaaagacaaatacaatgcttcttccaggtgatagtgccagcccagcatctttcgtggcccaggcaatgaagacgtatgagcaaatccattcccacagccaggcattaaagagccacccccagatagaagagctgaaggaatcaggagagaccagtcctgctccatcttctgaggcgagcaagacaccaccactcattgaggaagcagattctaaccagaccttctcactgcaacgccccaagaacaagcagtgagcttcgctcaagtgtttgaagtccttttttctatctgttgttctgaaacatgagtgccactgagaaacaccactagtaggttttagttttctttagtctgagagagctgatatgtggcggagaagggatagacccctaggcatttggtttctgggagctaaatgcgaccggagagacctagagagattttgattctcgtgaaggttatactttggttccttgttggaatgaagtttgtaaaaaggcaaggttgggttaacgttggttagacaaaatgcataaatgcttaagtt

SEQ ID NO: 21146 - DNA, 1242 bp, Zea mays
  Clone ID: LIB3279-059-G4_FLI
ggcacgtgcagtggagttattaggctttagagcgtgtttgacaaagtcaacaatggattgtggtgacggtttgcctccaaattggagttgctgctccactgatgattgcattcagtcacagaaggaactatatgaaaagcatcataatacagctgatgggcgtatcaggatatggtttgggttgagacagataatgaatgcaactgatcgtttactgcttgaaacaagagatattgcccagaagctaaatactggaatccatatgcatattgcagaaataccatatgaaaatcaacttatacttcggaccaaaggaattgatcatggcacagtgacatatttagacaaaattgatttcctgaggagtaatttactggctgcccattctgtttggttgaatgcacctgagataggctttttttcaaaggctggtgttaaggtttctcactgtcctgcatctgccatgcgtatgttggggtttgctcctattagagaaatgctggattctggtgtttgtgtctcccttggtacagatggagcaccgagcaataatagaatgagcattgtggatgagatgtacttagcgtccctaattaacaaaggtcgtgaggcatatatcagtggaacaacaaacccaactgctcttcccgctgagacggtgctgaagatggctactattaatggtgcaaaagcagttctgtgggacaatgaaataggttcgctggaggttggcaaaaaggcggacttggtggtggtgaatccatttacatggtccatggtccccttacatgacagcattgccaacattgtctactgcatgcgaacagagaatattgagtctgttatgtgcaatggtcggtggatcatgaaggatcataaaatcatgaatctcaatgaggaggaggtaatttcttcagctgtgaaaagagcgaacgacctccttgcacgagctggcatcaatctccccagacggatgaactacgtatagtttttctcttgctattttgtcatgtattgccaattgccaccatgccgcgctaatcctagtgctgcaagcttgcatgttggcccggagacatgtttgcaggatcgtagtcatcgcttgcagtttctaccagtgttgaatagaaaataatgtgcagttgtacatgtggcttcagtaataaaagcaccatggaagtatcaaattgtaccaacagtaaaaaaggattataataatggatggtttttaatgtgatgttg

SEQ ID NO: 21147 - DNA, 644 bp, Zea mays; identical to SEQ ID NO: 21119
  Clone ID: LIB3279-059-H8_FLI

SEQ ID NO: 21148 - DNA, 1089 bp, Zea mays
  Clone ID: LIB3279-060-A7_FLI
gtggcatggcacaggttttgaacacggctccagtagcaccagcaaatctccctatgccaaatccagcaccggcaatttcatctgtggcgccttcagaacaatctgcacccagcaaggaggatgttgaattagcaatggctatcaatgcctccattcaatcagctattgcagagggagtatcagtgcccaatgttcaaccaaatgcatccacccccaacaacaatggctgggctgcccctccaagtaattctcacaacggatggggaccaccagccactcctgcaccatcaaagacgagcggtcagtcccaggtccgggtagacgccccaagcagcagcacttacaatggatgggatgtgcccggaacaagctctagtcaaagttcatcgaaaccccaccaaacccaaaccaaccctcctccagtcttgattccacaggaagcacttcaggctctcccaaccccaaccgcgccaccgtttgctgaagaaaccttctacaacggtcctgttcactatccatccatagactctacgcctgtcgatgtaaccatgccggctaccactggaggcggtagtacaacagtcatcgcaacggcagcacctacagaacagttagaaaatgaagctgatgcaagtgacagcggcaaaactccctctggtacttgcgttatatgtctggatgcccctgtggaaggtgcctgcatcccgtgcggccacatggctggttgcatgtcctgtttgaaggacatagaatccaagaagtggggatgccctatctgccgtgccacgattaaccaggttgttcgcctctatgctgtttgaggagttgaaacggtgggttcagaaagttggcaatggattggagggttctcgcaacaaatgttgatgggaacgtctctatctcaaaattgtgcaattatgctatttttgcacttcgtactgcactacaaatatgacttccgtgtaatgtatgtggctgacgcctttatgtacataggtagtactatacaagacaattctataaaaatctgggtattgttgcaagttgcaactcacgttcaaagttgcacgattgtggagcttttccaat

SEQ ID NO: 21149 - DNA, 1005 bp, Zea mays
  Clone ID: LIB3279-060-C7_FLI
ccgtagcatatgcatatgagcatatcctaaccacgattcggggggcaagcgaacggacacgatggtggccttgaccgcggggatttccgtagccaccggcgtcgtgttcagccccgccggccgccggcgaggccgcggacacgccgcctttcgctgctcgtcgtcctctgccggagagaggcaggctctcttcagccgcatcgcccccgtctacgatcatctgaacgacgtgctcagcctgggacagcaccggacgtggaagcgcatatgcgtctcttggtcgagagcgaagatgggggatcgagttcttgatctctgctgcgggagcggggatttggcgttcctgctgtctcagaaggtcggcttagatggagaggtgatggctgtcgatttttcaagtcagcaactacagactgctgctgggcgtcaggagcaacggtggaagctgtgttacaagaacatcaaatggatcgagggtgatgcacttgatttaccattcacagactgctacttcgatgctgtaacagttggctacggattgcgcaatgtggttgataaaccgaaagcgatgcaagaaatatatagggtcctgaaaccaggatcaagagcctctattcttgattttaacaagagctcgtcacttttcacagcatcattacagagttgggcgatagacaatgttgtggttcctttagctagtggctatggactaactgaagaatacaagtacttgaaaagctccatatcacagtatctaacaggagaagagttggagaaactggccagagaagctgggttctgtgcagcgaagcactacgagcttggtggagggcttatggggaatctagtagcgactcgatgagtagaatgtagaacggaaactcgagttgcatggttcctctgcatcattttagctgattgtacgctcttcttctatgtatcggcctcagatgaggtcaatgacaagtgttgattacagaggggcctgaacggcttggttttcac

SEQ ID NO: 21150 - DNA, 736 bp, Zea mays
  Clone ID: LIB3279-060-D12_FLI
cctgcacacgaagcctagaatagccctcccctgctccgccacctcctcggatcccgaccaccccacccccaccccagacaacaggttgatggaggctaagatgggacgcttcttcgagtccgtgagcaatttcttcaccggaggcgaccacatcccctggtgcgaccgcgacctcatcgccggctgtgaaggagagcttgtcaatgctgcaaatgaggaacagaggaatgaaagccttatgaggttgtcatgggcccttgtgcactccaggcagacagacgatgtaaaccgtggaatcagcatgcttcaagcttctttggataattctgccagtcctctgcagactagggaaaagctgtacttgttggctgttggattctacaggattggcgactactcaaaaagcaggcaacttgcagatcgttgtttggagattcaagcggattggcggcaggccatatcgctgaagaaggcaatagaagataaaattgccaaagatggtctgattggaataggaattgcgacaactgcggtcggacttctggttggtggaattgcagctgctgttgccaggaagaagtgaggtcaatatattggatcggcagctcattgaactaggggagctcccgtctctgtaattccaacttttctgttgttaccttggtgatattacagttgaattgccactctttatatgtacgaagtaatcgtatgataatgataacaccattgtgac

SEQ ID NO: 21151 - DNA, 3273 bp, Zea mays
  Clone ID: LIB3279-173-F6_FLI
gcccaaagacagccagcgccgtgccgcggtctgctagatacagtgacagaaacgatccgcaacgcaggcaggcccgccgcgcagcccaggatccatccatccacctcacaccgcgtcgtcgtccagctcacactccccggccgcgcccccgctgctcctcgccgcggggtcacgcgcgcaggcaggcgagcgaccagtaactgacgtctctccttccttcccccctgctccggcccctctacaaatccccgattaaaccctagacttccctccccacccaaatgcgcgccccctcctaggcggcgcccctcgaattcggcaccggctccgccgtagccagggtgcgtacaatgagtgcgggtttcgacaagcagatattggctcagaagctttcgaagcttaatagctcacagcagaccatagagactttatcacattggtgtgtctttcatcatcgttgctgccaacaagttgtagaaacatgggattctgagttccatgcagctcctggagagaggagggtgtctttgctgtaccttgcgaatgatattatgcagaatagcagaaaagaaggtaatggatatatagctgaattcatgagggtcatccctgctgccttgaatggagtgttgactgtaagagatgattttgggcggaatgtcccaaaaagactgattgacatatgggaagaccgtaaaatatttgatacccaggcacaaagcctgaaagatgattttttcaggaggttaaaggacattagaaaccagttgaaaaatacaggcagtgagcagctggagaaggttgtctctagctacaaacatgtcctgaatgctcctatggatgaggatactctgatgcgaaaatgccaagcagctcttatcaattttgatgaactcaataaaacatatggaaataactccattttaggtaagctatatgtattcaaaggatattctcacatgtgcagttattattattttctagttaatatgtagctaatagcatgcagaaactagtgattatgtggacttcacctctgagctgtgcgtcacagctgcagggtttccataaaaccaacaaactaccatggcgtcaagccttaccacattgatgttgatctgggcatgggtttgttttacctaggtggatgtagctattgtgcaaatggtttgcatcatacctttgttgcaactgagatatccttgagcctagatggtttgtataaagagatgcactgtatgttcaaatccctcatttccatctgagtattttctaccttgagttgccttacaacagatacagcaattgcattcttccactgcttagtttcttcagccttaactagattcaggggttggtggtgtcatggtcctctgaaatatgggcagcaaaaggacctacgcttttgatgatccttgcatactcactgttggtttataagggcgataacaaacaacttcaagcttagctttgtgaccacaatgaattgtccccttggcttttgtgagcacacactaaataaaatctgaacaactgaaattgaatataatatgccacacgatatgcgatggagaattgattcatagccttataggctggcttggcagttggcacaaccaaattcttgtcccaacgtcagtgcaacctgcttacttgcttagatccagctaactttaacgaggttgcaagatgataactagattgtttgtcttctttgtcctgtagcttgaattttctgttgcatattgccaggtagttgcaatcgttcgggctttatgcaggagctgcaggaacaacataacattctcagaaactccatcgaacaacttaaagtgtcagaatcactcagggccaccctgatttttcatttgaaggaagcgttgaatgagcaggagttcaaagtggaacaagtcagaagccagcttcaggcagctcagccccgattcaagagagcttctgagctctgcgtggggcttggaagcaacatggaaaggcgtcagccatcaaatcaagggcttaagaggtccagcctctccgatccacttagcactgttgctccagaagctgtgaaatctcttcaaaagggacattcaagtgcagtgctgtattcacaggagggaaatggtgttgagcacagcgtgacagagacaaagcttgctgcaggtgctgcttcagataatatacgtggtggtgctttgtcttcacgagtcaatgggggcaacaccatgctgaaaatagaagagcacacttctggtaacaagaggcagaagctagaggatgacgcacatgtttctcagcctcggtcagagtcaccgccgccaccgccacccccattccctcatcctgatacatttcaaccgcctccgccaccacctgagtatcctcgatcaccagatcctagcccaccaccgccacggacttcactgccaccccatataatccccccaccgccgccgccaccacccgcaatgccactccatatgttctcacatctaccacctccagctggtacatttgtaccttttcctgctggaccacctggcccaatgtattgcacttatccatcttttactcctgttgtcaactttcccatgaccagcccacctggtttccgtaatctaaccccgcctccatcttttcgtggattagctggtacattctatggccctcagttccccacggcgcccccaccagcagacaggaaataagagtagtaacttacctgcagacttacagtgccagcagctttggcaagtatcataccagtttttttctgtttcaacagaggatacaaacttgtggggatgcgtcaccatgtgttgtagagctcaggagactgttctattgttgtacattcagccagtcagcgtgcaacagtcaattttctgaactagttctggtcttggtcccagagtagaaagtgtagagcctgtacatgtcggctgctagaggggatttggaattccgagagcccggacccggagcaaatggctgcgtcagtttaatgatcgactgatccagtagttcctggtctaggcggtggagtaaaaactgtagattccgacagcttagggagaagatatggaacccaatagccgaagacagatgttgtagcatgacatgttgtaactcatcacagttgtgctcttcgctagatcatccgagaacacctagatgttcttgtgatgtctttgagcgtgtaatactgctgtttggtgtaagatatggcttcagctgctgtcgatggtcgaatctcttgctctgtttttaatt

SEQ ID NO: 21152 - DNA, 659 bp, Zea mays
  Clone ID: LIB3279-173-G8_FLI
aataatgcatatttttaaaactagatgagtctgattatgcatagaagagataagacttattttatcgtggttgttagacgagacatggtggacaaatatatctgtacgtgacgcacgacacacgaagcttgagctgagctgagactcaaataagatcattaacctctccgtgctattatcgaccccaaacatcttgtttgacttggatcccgaaggaattcgtactgttatcaccaccaaacatcttgtttgacttcgctttgttgctgaagcgtccccaatcctctgggactcaaatgtgatacaattactagtctcaggaggctagtaaacacatttatacatcagatgatttcagatctgcttaaacgagacaaacctataaaggtggcgatcaactttaagagttggtccacaactcgggacatatcatcagagtggggctgaagcagctcgatatacgcagcgaagcaaatcagcggtccaacagccacaggcaaggttgggaacagtcgtaactcttactcgatctccttttttctgaaaaacaacaaataagcaagggtgagtacaaacgtactcagcagcccaccttcacccacggaatggggaaatcagatataatgcatggaatatgtggagctcaagatattttgcag

SEQ ID NO: 21153 - DNA, 543 bp, Zea mays
  Clone ID: LIB3279-174-A4_FLI
aaggaaacatggcccaccatatatttcgtaaaacactttgatgttccaaaagataagcagcatcgtgagctctgcagtaacactagtcaaattttacgtaacttgcgtggttctcttcctgcgacggaagcaaacactgcccgagacatagacagcgggacgtcgagatggccgacggggaggacgccgccgccgcgcgccgccgggccgccatcacagactaccgcaagaagctgctcaactgcagggagctagagtcgcgcgtcggcaccggtgagtcgtcccgctcccctccccttctgccctcacccactttgctcggctccagtctccctagggttcggagggcccgattcccgtgtctcactagggggatcatggctgtatgtgcgggatctagctggaggtttggatgccgagtagtttttgtgtagattcactggccatgccgcggcgtactcggtgatttcaaggctttactagggagggtgatgatttccttcgcggctccttcggtactagaccgtgaccagtggcgttggg

SEQ ID NO: 21154 - DNA, 1143 bp, Zea mays
  Clone ID: LIB3279-174-C7_FLI
taaaatttactattattttgacttccttttttacttttaatgccttaggccatccctctttggtggtgctcgcccccgtgaacaagttctcaaagaacgtggagtggatgttttggccagtgatcttgagcggatttcaccagttggcaggtctaaaggtgaatttgcaaaggtcgagcagaaggttgaagctttgtccattaacccttctcttgaaagagctgatggtttttcagctggtcatagaggcccaaggagtgttgataagaaggattacaggcgggatactgagaaggctgatgcatataggccttctcgtcgggaggataacagggtcgctagagatatggagaagccacaggagcaaccacgcccagagcctgagacatggcgtaagccagtggagcctccaaagccagaggttgcaacacctcgttttgggaaagcagcaaccgcgttggagcttgcgcaggccttctcaacgtccatgtctgataccgcaccacagaaccggttgaccagcgttcccagtccaagagttcctcttagcccaggggctagggatcagtctggcttctcaaggctcactgacagcaggacgttacgctccagcccttcccagcgaaagataaatggctactgatcgcttggcacacatattacacgtgtcacgatgacagttggcctcgatgaagcgccccgctgtatcttcatactcaactgcccctgcgtggagaagtccaattgttgctctgtcagatggtggcacgtgagtggtgataatctcattgatagcaaacaaaaggctcctcttccacaagtttctggtcagtgatttatgactcagggttcatttttcctctattgataacaaagatgtgaatttgtggactatttctgcttatgttcgccagccagccctgatttgttgctggggaataattgccacctgcgcatcttagttggatgtgctctgccgtgcttggttttatgatgttgccagatcggtgatcggtggtatgtagcctgcgtcataatgcaattttcaggccttctcttcataagctgcaaaattgggattttactgcgagaacaaactattggtcttgtacggttgaatcatgattaaaggatataactttc

SEQ ID NO: 21155 - DNA, 1313 bp, Zea mays
  Clone ID: LIB3279-174-H2_FLI
ttctctcggtctctaccaaaaaaacagcgacctctaacgcttagctagctctttgtgtcagcgcctgagcatcgagctattggcatggcgcactccaccaccttggccctggtgattgtcgttgtgctggcgctcacctttggtgccacggtcagtgtctccgctcccgtgaacaagtcgtgcgtcagcggtagcgccggcgccagcgtgagcattggctacggcggggcaagagccagcgccggcgctggcgtgtcccttggcgccgacgcgtaccggagcacgtgcccccgtgccgaggagatcatccgtgcggccgttgagagggccgtcgctgccgacccacgcatggcagcgtctctcctgcgcctccatttccatgactgcttcgtcaacccgttcttcatcggcgagaagacggctgtgcccaacgccaactcaatcaggggcttcgaggtcattgacgccatcaagaccgagctggagcgggagtgcccagatacagtttcctgtgccgacctccttgccatcgctgcccgtgactccgtcgttgtgtctggcgggccgagctgggagattgaggtcggccggaaggacagccgcaccgccagcctgcagggcgccaacaccaacctcccagcaccgacgtctggcgtcgacaccctcgtgcagaagttcaggaacgtgggcctctctaccaaggacatggtcgcactctccggcgcgcacaccatcgggaaagcgcggtgcacttcgttcagtgcgcgccttgccggcgccggcggcgtctcggaaggcggcgcgggcgccttcaaggacctcaccttcttgcagtcgctgcagcagctgtgcacggggtcggctgggtccgcgctggcacacctggacctcgccaccccggcgaccttcgacaaccagtactacatcaacctgctctctggcgacggtctgctgccgtcagaccaggcactggcgtcgtcggctgccgtgcctggggtagaggcggacgtcgccagcctcgtcgccacctacgccttcgacgcctccgtattcttccaggacttcgcggagtccatgctgcggatggggaggcttgcaccgggcgtcggcaccagcggcgaggtccgccggaactgccgggtggtgaacagctccgaataaagtcatgcatgctcacgctcaactatctggtcgtccgtgcggcttgcattgctgatttgttatcagctaagtcaagccagtaagtttgtttgggttaaaaaataatcggctttggcatgggaattatgataatggccatcgtttaaatagct

SEQ ID NO: 21156 - DNA, 1283 bp, Zea mays
  Clone ID: LIB3279-175-F1_FLI
ggcaccgcgcgggactagggctgccatcgtggcgccgacacgcgtcatcatctcattgggccgcgggactcggcgacaggccttttgtagaccgcagccggcaccatctcttcccgcaccccccattcgaacgccggagctcgacgaggacgaccgacgacgcacgcagagatccggcgtactgcaaattttgaaaactgaactgtaagatggcatcagcagagctttcccgtgaggaaaatgtgtacatggcgaagctcgccgagcaggcggagaggtacgaggagatggttgagttcatggagaaggtagccaagactgttgactcggaggagctcactgtggaggagcgaaacctcctgtctgttgcatacaagaacgtcattggagcccgccgcgcctcatggcgcatcatctcctccatcagcagaaggaggagggccgaggcaatgaggaccgagtaacactcatcaaggattatcgtggcaagattgagactgagctgaccaagatctgtgatggcatcctcaagctgcttgagacccatcttgtgccgtcttccactgcccccgagtccaaggtcttctatctcaagatgaagggtgattactacagatacctcgctgagttcaagactggagctgagagaaaggacgctgctgagaacacgatggtggcatacaaggctgcccaggacattgctctggctgagcttgctccaactcaccctattaggcttggactggcacttaacttctcagtgttctactatgagattctgaactcacctgatcgcgcctgcagtcttgcaaagcaggcttttgacgaggccatctcggaactggacaccctgagcgaggagtcctacaaggacagcactttgatcatgcagctccttcgtgataacttgaccctatggacttctgacatctcggaggaccctgctgaagagattagggaggcacccaagcgcgactcgagtgaggggcagtaaagccggctttatgtgcctagaaactagtagctagtgtttgctgctgtcgaatgacactatgcaatgtgatctggaacctggtttcttgggtgcgacgcttgttatgactgtcgtcagtaaaatttgggggctccccgtatgagatgctgccgggcaaggcctcggtgtcccacctcgtttgtggcggggggcgctggagcccggtctggttgggttgggaagccctttaaactgttgtcacttgcattttaccttttccatcgctgtttattgtgagtggtcctatatc

SEQ ID NO: 21157 - DNA, 1348 bp, Zea mays
  Clone ID: LIB3279-176-A1_FLI
gcgacgttcgacggccgtagccaagaaggtatctcgcccaaacaaaggccgtcaagccaccatggccgtgtccggcgagaagccgccaccgccaccgccaccggccacggcgtccggcggaacggcaaggaagctcatcctagcgctgcttacatgtctgtcgtcggcgctgctgtacaggcagattcagccgctaccgcccaagatccccggcacgccgggcggcccgccggtgacggcgaccaggacgaggctcagcgacggcaggtacctggcctatctggaaaccggcgtcccgagggagaaggccaagcacaggctcgtctttgtccatgggttcgactcctgcagacacgacgcgcttccgatctccacggagcttgcgcaagagctgggcgtttacatgttgtccttcgatcgccccgggtacgccgagagcgacccgcacccggccaggaccgaggagagcatcgccctcgacatcgccgagctcgccgacaacctgcagctgggtcgcaagttctaccttgctggcttctccatgggcggcgagatcatgtggagctgcctcaagtacatcccacacaggctctccggcgtggccattctcggccccgtaggcaactactggtggcccggcttgccgtcgaacgtgtcgcgggacgcctggtaccagcagctccctcgggaccagtgggcggtctgggtcgcgcatcacctgccgtggctcacctactggtggaacacccagaagctcttcccggcctccagcgtcatcgcctacaaccctgccctcctgtcccaagaggacgagatgctcatggccaagtttggctatagagcctacatgccgcagatcaggcaacagggggagcacgagtgcctgcaccgggacatgatggtcgggttcggcaagtggagctggagcccgctgcagctggagaacccgttcgccgacgccgacgccgacgatggccagggggcggggaaggtgcacctgtggcacggcgccgaggacctcatcgtgccggtcagcctgtccaggtacatcagccagaagctgccgtgggtcgtctaccacgagctccccaagtcgggacatctcttcccgatcgccgaggggatggctgacatcattgtcaagtccctgctgctcggagacgatcatctgtcgtcgtcggcctcacagcctcctcattctccatgaatccaggtcgtcacgtgtagtccgttcgcatttcgttgcccgtctctcactgtttctgtaaagggaccgatgctgcaggattctctagcgttgtagctaggatgctctgtttttttaaataatggaactaagttttagcct

SEQ ID NO: 21158 - DNA, 535 bp, Zea mays
  Clone ID: LIB3279-176-B5_FLI
caccgactggcacatggagccatcgaggatgaccctgtacaggtttggcaacacatcaagcagctcactctggtacgagctggcgtacactgaggcaaagggtaggatcaggaagcgcgacaggatctggcagatcgcatttggttctggattcaagtgcaacagcgccgtctggaaggcactccggacggtgaacccggccaaggagaagagcccctggatggatgagattgacaacttcccggtggatgttccaaagatttcaaaggttggtggcgcttgaagaaccattcttcttattattaggtggcaagtggagttgggtgattgtcaggggctgggcagagatttattccatcgtttccaccgttggttcttgtattcagttgtagcatggcatctgtgaaggaacttgagtagatgattcggttaggtagaaagggtgtgttcttcggctcgctagggttgtctgaatgcctgatatgtcctatttattcagattggagagagcaatcgatttgcattctttgctgcg

SEQ ID NO: 21159 - DNA, 653 bp, Zea mays
  Clone ID: LIB3279-176-E1_FLI
gcgccgccgcccaaagaaagacgtcaactccaggagacaagatagtgagaactgaagagaaggatgggcttcgagaagcagatcctgagatccggcaccggccccaagccgataaagggccagaaggtcaccgttcactgcaccggctacgggaaggatcgtgatctgtccaagaaattttggagcaccaaggaccctgggcagcagccattcagtttcagcattggtcagggttcagtgatcaaaggatgggacgagggagttatgaccatgcaagtgggtgaagttgctcgtatccagtgcacgcctgattatgcttatggagccggcgggttcccagcctggggaattcaaccaaactcagtgcttgtgttcgagattgaagtcctcagtgcccagtaattcgcatctgtcagctatggaaacgttggccatgcttctcaagtaatgaaataattccgttgtcacctcatgctacatacagcagattggtgttacgagttaaatcctgtgaaactttagcattctgtaaccgtggatgtcgagtttatggagttccttgtgtggcgcctcaagtcaagttctcgtcaaagattgtaatctgatggcttccattgtgacttgtaggcggctgcaataaacttacttgatgc

SEQ ID NO: 21160 - DNA, 803 bp, Zea mays
  Clone ID: LIB3279-176-G2_FLI
gaaaaatatccccaaaccctagctcccgatctcgatggcgaaccctcgcgtcttcttcgacatgaccgtcggcggcgccccggcgggccggatcgtgatggagctgtacgccaacgaggtgcccaagaccgcggagaacttccgcgcgctgtgcacgggcgagaagggcgtgggcaagtccgggaagccgctccactacaagggctccaccttccaccgcgtcatccccgagttcatgtgccagggcggcgacttcacccgcggcaacggcaccggcggcgagtccatctacggcgagaagttccccgacgagaagttcgtgcgcaagcacaccgcccccggtgtgctctccatggccaacgccgggcccaacaccaacggctcccagttcttcatctgcaccgtcgcgaccccttggctcgacggcaagcacgtcgtcttcggccaggtcgtcgagggcatggacgtcgtcaaggccatcgagaaggtgggcacccgcaacggctccacctccaaggtggtcaaggtcgctgactgcggacagctctcctagatctctctgatctggtctgttcggccgccctccctccgtcatcgtcgactccccctgcgtccgttcctttggatctgaataagatggtggtgatctgagtggtggtcttagtttatcatgtatcgctcgcagtttaatttagcggtttaggtgtggatctgtgaaccccatggcgcctctgcttgattcgtgtttcacctgttatgttctgagattcatgataatgctatgagaactgaaattcccgttt

SEQ ID NO: 21161 - DNA, 1657 bp, Zea mays
  Clone ID: LIB3279-176-G5_FLI
gtaaaacaagctgagactctaacttcaaaggaagatacacacacaaaggacagtgagaaggaggccaagaagcttgctcgcaaggcgctagggaggaagaagacaaccacgcactattgctgttgcttgtgcttagtgtgtgctcgcggctagaagcagacaagcagctgcgggagcataagggcggcatggcttcttgcggtagcttctactttgttcccttgctcctgctgatgctcctgctcgcttctcccgccactgctgcactggtgacatcctcccagcctggcggcaatgccactgctgcaaggccgaggccggggatggagcagctcaagcgcaagaggatcagggctctgctcaccaagcttaacaagcctgctctcaagactatccagagctcggatggcgacatcatagactgtgttccctctcacctccagcccgcatttgaccacccaaagctcaggggcgaaaagattctggatccgccggagaggcccaagaaccgcaacttcacctttggcggcagcggcagaagcagggtcggcgaggtggtggtgcaggcgtggcacgccaccggcgaggcgtgtccagaggggaccgtgccgatacggcggacgacggagaaggatctgctcagggctagctccctcaggaggtacggcaggaagccagcgcgccggggtgttcgccgtgattccacaagcagcggccatgagcatgcagttgggtatgtaaactcagaacagtactatggggccaaggccagtgttaatgtgtggtcgccaaggataggtgacccatctgagttcagcctgtctcagatctgggtcctctctggctccttcggcaatgatctcaacaccatcgaagctggatggcaggtaagcccagagctatacggagacagtaacccaagattcttcacctactggacaactgacgcgtaccaagaaaccgggtgctacaaccacaattgccgcggattcgtgcagacgacgaacaagattgcaattggggcggctatcaccccggagtcggtgtacaatggcaggcagttcgacatcactctcatgctatggaaggacccaaagcacgggcactggtggctggagctgggcccgggcctcgtagtcgggtactggccgtcgcacctcttcagccacctggctcgccacgccaacatggtgcagttcggcggcgaggtcgtcaacacccggccgtcggggtcgcataccgcgacgcagatgggcagcggccacttccccagagagggcttcgaccgcgccgcctacttccggaacctgcaggtggtggactgggacaacaacctcatcccggcggccaacctgaaactcctcgccgaccatcctggatgctacgatatccagggaggcactaacagctactggggaagctacttctactacggaggacccgggaggaacgccaaatgtccctgagatcaattcggaccggatgtctctttcttgttcgatgttcttttttcgttgccctttctaggatttggtaggtcttatacgtctttaacgaaagaatgcatccacggttgagacttgggaggaatttgtaaatttggcaagtacctgttatatttaatatccctatggctcatattttattttatttattt

SEQ ID NO: 21162 - DNA, 1258 bp, Zea mays
  Clone ID: LIB3279-177-D1_FLI
gccgccttcacggccgtggtctacatccagatgcagcacggctgggcggcggcgttcggcacgctggcgctggccatgggcacctccaacgcgctcttcttcgtgggcacgccgctgtaccgccaccggctgccggggggcagcccgctcacgcgggtggcgcaggtgctcgtcgccgccttcaggaagcgggacgcggccttcgacagcggcgacttcgtcggcctgtacgaggtcgccggcgccaagtccgccatccgtggcagcgccaagatcgaccacaccgacgacttcagatggctcgacaaggccgcgctgcagctggagggtgacctcgccggcggcgaggacgaggaggcggtgaacccgtggcgtctgtgcacggtgacgcaggtggaggaggtgaagatcctgctgcggctgctgccggtgccggcgtgcacggtgatgctgagcgtggtcctcaccgagttcctcacgctgtcggtgcagcaggcctacacgctgaacacccgcgtggcggcgctgcacctgcccgtgacgtgcatgccggtgttcccctgcctggccatcttcctcatcctggcgctctactaccagaccttcgccccgctggcgcgccgcctgacgggccacccgcacggcgcctcccagctgcagcgcgtcgggctgggcctcttcttctccatcctgtccgtggcctgggcggggctcttcgagcggtaccgccgcgggtatgccgtccgccacggatacctcggcctcttcctcacgcccatgccggacctcagcgcctactggctgctcatccagtactgcctcatcggcgtggccgaggtgttctgcctcgtcgcgctcctggagttcctgtaccaggaggcgcccgacgcgatgcgcagcgtcgggtccgcgtacgccgccgtcgccggcgggctcggctgctttgtggcgtcggcgatcaacaccgcggtggacgccgcgacgcgggacgatgaggaggggcggccgtcgtggctggcgcagaacatcaacgtgggcaggttcgactacctgtactggctgctcgccgtgctcagcacagtcaacctgctcgttttcgtcttctttgccaagcggtacaagtacagggtcagggtcgacgtgccgaccacagttgctgttgataagcagtagctagccgctagcgccattacaaggatttgagtttggatgtgctgtaactattgattactgggaataccataaaacatagatcttg

SEQ ID NO: 21163 - DNA, 837 bp, Zea mays
  Clone ID: LIB3279-177-E3_FLI
gagagagagagagagagagagagggggacaggatgccccgcagcggcatttcggggaccctcaggtcgccccagatcgacgtggtcatcgacacggggaaccccttcctgaaccgcaccgtcgacggcttcctcaagatcggcgctgtcggcgcctgcaaggtggcggccgaggagaccttcgactgcctccacaggggggatgtttcaaagcgcaaggttgagcatgccctgaagaagatgtgcaaggagggcgcatattgggggactgttgctggcgtctacgtgggcgtggtgtatggcgtggagagggtccgtgggcgcagtgactggaagaacgcgatggtcggaggcgccttgtccggcgcgctggtctccgccgccagcagcaaccacggagacaagatcgtcaaggacgccatcaccgccggcgccgtcgcaacggccgtcgagttcgccaactacctcacctagctgagcaaactgcatctgcagcgccgctgttcataagccagcgtcttcaggcttcgtttcttctgacaggcaggcagcagtttcgctttgcgtgagtgtctcctgaatccgttgcctctgcggttcgcaaatgcagccgtggggttggagctggagccgtagctacggacaaacaaaaatcacattacgcaattgtttcagacctgataagacactgcctgcaatttgccaaaacttggtttcggagttccaaaataaacttgtaatgttagccacggtgtataaggccttttgtattgccatttttttattatgttttgcttcctcctcttttttatgaaacaggggcgttgtttgttgtttc

SEQ ID NO: 21164 - DNA, 2134 bp, Zea mays
  Clone ID: LIB3279-177-E8_FLI
cggcgatccaccggcacggcaccgaaacacctcgtctcgatttcgaaccaaaccctccagtgtccagccccgtctcgttcgccgcggcaggagcgagcgagcgaccgagcgagcagccatgacgccggtcgatccccactcctacaccgacggcgcgcacccggtggtctcgcgcgcggcgctcgccttctacctcgacttcgccgcctccaccatacacgcctccgtggtgctcaccctctccgcgccgcactccggcgacctcctcctcgacacccgcgctctcgccgtccactccgcctccaccgacgccgacccgccggagcccatccccttctccctcgccgcggcgcccgacccggtcctcggcacggcgctgaccctcgccctgccccgcgacaccgcctccttccggctcaccttctccacctcccccgccgcctccgcgctgcagtggttggccccgccgcagaccgcctccgcgcagcccttcgtcttctcgcagtgccagtccatccacgcccgctccgtcttcccctgccacgacacccccgccgcgcgcatcaccttctcgctcctcctcaacgtccccgagcagctctccgccgtcgccgccgcgcgccacgtcgcgcgccgggacccgctgccctccgaccaccgcggggcgtgcgacgacgggctctggtgcgcgcccggccgcatcgtcgaggagttccagatggaccagtccgtgccgccctacctcttcgcgttcgccgctggcagcatcgggttcagggacctcggcccgaggacgcgggtgtacgcggagggaggggacacggtgttggacgaggcggccagggagttcgcgggggtggaggagatggtcaaggttggggaggggctctttgggccgtatgaatgggagagattcgatctgctcgtgctgccaccgagcttcccctatggaggcatggagaaccccaggatggtgttcctcactcccacggtcatcaaaggggatgctgcaggggctcaggttgtggcccatgagctcgcacatagctggactggcaatctgattactaacaaaaccaatgaagatttctggctaaatgagggattcacaacatatgctgagaggaggattgttgaggttgtgcaaggggaggagcgggcagccttaaacatggggattggatggagggggttgaacaggatgatggagaggtttaaggataacatggagttcaccaagttgaagccgaagatggcagggattgaccctgatgatgtttactctgaagtgccctatgagaaaggtttccagttcctttggagaattgagcgtgagattggcaggcctgctttcgacgagtttttaaagaagtatattgcaaccttcaagttccaatcgatagatacagagacatttcttgaattcctcaaaaccaatgtacctgggatagaaaacaaaattgaccttcacctgtgggttgaggggaccggtatccctcctgatgccatggaaccagattcagctacttacaaaaagatctgctccttagctgcagaattcaaatctggaaaacttccaagtgaagatgaggtggcaaggtggagtgggcaagaatgggaactttacttagaaaatctaccagcagatgttgaagcctcacaggtcactgctctcgacgagcggtacaagctatctgaaagccgtgactacgaggtcaaagtggcgttcctccagctggcgatccccaccgggtgcaagtgctacttcaacgaggttgagaaatgcttgaagcaggtgggaaggatgaagtacctccgcccgctctacagctcgctggccaagtgctccagcgaggagaagatgctggcccagaggatattctcggaggctcaagagttctaccacccaatagctcgaagtgttgcggaggccattttgtcgaagcatagctaagcaagccaagactcttgcttagcgattcacgcttgatctggtgactgctgctcagtttgcttctttcgcataaaattatcgtctgctctggaaaagaaacttaggaaaaacttgaggcttgtattgcatatttgataacataatattataactagatgagtgccccgtgcgttgcaacgg

SEQ ID NO: 21165 - DNA, 2059 bp, Zea mays
  Clone ID: LIB3279-178-C2_FLI
cccctcctcacctcaccaccatctccagctccatccgcaccaacatctccaccaaccgacacggcgaggagatgaacgcgtcgcagttcatggacaagcagatcctcggcctcgccgcctccgcctccccgtccggcggcggcgcggggggcggtgggggtgtgaatctcagcgatctgatgatcccgatcccccaggaggacggcgaggaccgtctccgtcgccggcgtagcagtagcagcgtcaacggcacatcagacgacatgctacccagctacgatttccagccgatccgcaccggcggcgccaccgccgccgcccccgtgtctcaggcctcgtggggatcgctcgactccaaggcaccctccgcctctgcctctgcctccgccgccgcctcatacaacctcaagagtgctggtatattggagccacatgtgctgaagaaagttagtcatgaggaagacaggagtaacttccctacagttactatcgcagatattgatcgaaccatgaagaagtactctgataaccttttgcatgcactggaaggtgtaagctcaaggctttcacagatggagggcagaacacaccaactcgaaaactctgttgatgagttgaagttaacaattggtaactataatggtagcactgatggaaaactcaggcaccttgagaacatgctcagagaggtccaagcaggtgtgcagattttgcgagacaagcaggaaattgtcgaggcacaactccaccttgcaaagctccagacaaccaaaactgatgcccactcatcagaaaatagtgggtctggacatgctggctctcagccggtgcctcctccacaagcagccattcagccacagcaagtcttaaccccttcgcaaccacctgcacttcctgcccttcctgctccaaatgcaccacttccaacgcttcaaagccaaccaccatcacagtttccaagtcatttacaacattcacatgtaccatctgtgccttctgttgcaccggttccctcagttccggctttaccaagggatgcttactatgctccatcttctcagccgaccgaaaccatgcaccagcagtatcaagctccgccagttccacagcctcaggcccctcctgcacctcagcagtaccaatccccatcccagttccctcaatattcacagccatctcagccttcaaatgttaaccctccaactccacatgtgccccctgcaccccagcaaccagaggaaactatgccttacgcaccgcctcagagctatgcacctaatgcacgccctccttcaccttatatgcaaccgcctagtggacctgctcctccttactatggacaacaaaaccctaccatgtatgaacctcccgcaggccgggctaaccctgggccgccatcatcatacggttctggtggctatggaccacagggtgggagtggtttctctgactcatatggttacactggatctccttcccaccgcggcaatgctggaatgaagccgtctacaccttttgctcaatcctctgggggaagtggcggctatggcagtggcaggctccccacggctcagatactaccacaagcagtgccggtaagctcctccagcaccagcggtgcttcaggcaatagagtgccacttgacgatgtagttgagaaggttgccacgatgggattctcaagagagcaggtgagagcaaccgtgcggaggctgacggaaaatgggcagaatgtggacctgaacgtggttctcgacaagctgatgaacggcagataagttgagcagtagtgccatttcaacagtatatgtatagtatggagacttgggaagtgtcagctgaaccgattttctgtctgcaactttgtaaacctggagaactctgatgaccgaacagccgctcatcctgatgtcatggttgctccatctgaaatggaaacagctcagtgtgcctgtcagtgaactatagtattattgcaatctgaatacgttattcatttgatgtatatgtggtgctgatgatattttaaaacatataccgtggtttcttgtgatatgtt

SEQ ID NO: 21166 - DNA, 1252 bp, Zea mays
  Clone ID: LIB3279-178-C9_FLI
gttctgggtctcaaaaaactcgagtgtgattttagaagatgaaatggtcctgaggcgaaggcattattcacgtggacccggagtccaacctgcagaaaatccacaagcgaaattggctgccagctttaattctgtgtctggaacttcgtttccttcctaaacagaaagaggcgtaaagaaaacgaaagcaaatttcgcaggtggaaagaagaggaagcgaacgagaggcaacggtggccggtcgcgggacgggtggggccacgcctggcctgacgcgggaagccggccggaaccatccaactccgccgcgtcgtcgtcgccttcgtctcgcgtgctcaccaagagaacaaaacgcgagcagccaagaattcaacgtccacggtccgcccaccctccgtttccgcttcctccctccacgtcgtctcggtcttcctctcctgtaatcccgtgacacgggtggctgcgacggcgaatcagatccctacccgtggcgttggtcgtgaattggcgccgtctccccctgccagccggattccctgctttgttctcaggcaacattttgttcactagtgtggtagctttgttgattggagtgcgcaatgggaggctgtgcgggaaaggtacgtcgtgatgacgaagaaaagcttgattttaaaggtggaaatgttcatattataacaagcaatgagggctgggaccagaagattgcagaagcaaacagagatgggaaaactgttgttgcaaatttcagcgcttcctggtgtgggccatgccgtgtcattgctcctgtctatgctgaaatgtcaaagacttatcctcaactcatgttcttgacaatagacgttgatgacctgatggacttcagctcttcatgggacatccgtgcaaccccgacattcttcttcctcaagaacgggcagcagatcgacaagctcgtgggcgcgaacaaacctgagctcgagaagaaagtgctagcagccgctgatgccagtacgtcctagtgacacaagtggaagtgggcaaacgatctgtgatggcttcccggtgtatagtttccatggttcatttgtgtgcttgtcccatgtttgcctggggacgatgacgttttacaattttggcccccatcgcgcgcactcgtctgtttctctcatggaagccgtgtgaacctgtgcgtgtgtgtgacgaatgaacggaactttatatggaccagtgcttaagagtctttgcaacataattatgaaggtttgtttgc

SEQ ID NO: 21167 - DNA, 950 bp, Zea mays
  Clone ID: LIB3279-179-E1_FLI
ccaaaccttcgacgttttgcatctccaagcagcagcgtctcctccccagatccatcaattcgttcggaccgcccttctcgtgtccccgttccaaagcgcggcaggctgagcggttccgtcagatttgagtcgtcatgaatcccgagtatgattaccttttcaaacttctgcttatcggtgattctggtgttggaaaatcatgcttgcttctcagatttgcagatgattcatatctggacagctacatcagcacaattggagttgacttcaaaattaggacagtagagcaagacgggaagaccataaagcttcaaatttgggatactgctggacaagagcgcttcaggacaatcactagcagctactaccgcggagctcacggaatcattattgtatatgacgtgacagaccaagaaagcttcaataatgtgaagcaatggttaaacgagattgaccgttatgcaagcgacaatgttaacaagctccttgttgggaacaagagcgatctaactgctaacaaagttgtggcaaccgagacagcaaaggcgtttgctgatgagatgggcatctcattcatggagacgagtgccaaaaacgccatcaatgtggagcaggccttcatggctatggctgcatccatcaaggacaggatggccagccaaccagctgcggctaacgcaaggccagcgaccgtgcagatccgcggtcaacccgtcaaccagaagacgtcttgctgctcatcctaaggttgcctgattttttttgtactttgtgtaaactcaaacacacaactactaccttttgtgtgcgcttgcaaatgtatttgcattattttcagaagacgctgctgatagcatctattcattgatcggacgattagggctagtttgtcgaactccgtttttttaagggatttctattttctaagagaaattattttattttttctt

SEQ ID NO: 21168 - DNA, 1015 bp, Zea mays
  Clone ID: LIB3279-179-G10_FLI
aaatttttttccctgcctccagccctccaccgccgccacccgcacatccatcgtcgccgttcgcgtctccggatcccgagaccggagtccggatcctcgtcccgcgcccgcatattctcccgtccgtgccctcgcgtgcgctctgcccctctggcgtccgccgccgccgccgccctaccccaggtgccgtggtctccatctcccggagcttcgccggcgacgagaatcctccagagccatgctgggcgcgcgtgtgcagctgaaggggtggcaacaggcagctgttgcatttggttctgcgtttggggccttgcttgacccaaggagggctgatcttatagctgctcttggagagactactgggaaaccagcgtttgagcgtgtgctgcaacgaatgaagaacagtgcagaaggcaggttctttcggagtgtccccgcgtggtatcctcgcaggtttcccatgcctgggacctgcctcagaacacatttggcgcggcgtatgctcagttcatgggatcaaggaacttctcaccagacgatcgcccgcctgtccgtttcatggacaccgatgagctcgcctacgtcgcgacacgtgctcgcgaggtgcacgacttttggcacgtgctgtttggtcttccgacgaacctgattggggagaccgccctcaaggtgatagagtttgaacagatgttcctcccaatgtgcatgatgtcagtcgtcgggggctctgcgaggttcagcgacaaacaaagggcgctgtttttccagcactacttcccatgggcaacaaaagctggtctcaggtgtactgatctgatgtctgtatattacgagaagcactttcacgaagacctggaggaagtgagaaggaactggggaatccttccttgccccagtcccaaaaagagcagtgtataggccggcattttctgcgtgaactttctatctgtttcttctttggtttctgttagttgctcagttctttttggaataaaatcatgagctaatgttgatg

SEQ ID NO: 21169 - DNA, 408 bp, Zea mays
  Clone ID: LIB3279-179-H4_FLI
gcagcacaaacaaacaccgcgccgccgccacagctttgccctacagaatccttttactccgaagattctcaagacgcccctgatggctccccgcgtcgcctccgctctgctcttcgtcgtggccgtcctcgtggcctccgcggcggcgcaggagtccatggcgcccgcgtctgctccggcgccgggaccggtcgctggcgcggcctccgctccggcctccgctgtggccgtggtgtcgtccgcactgctgtccctccttatgacggccctgatgcagtagaagtatcatactagatttgagcgggaatttggttcagtgttgctattcctcattctttttgtatcatatatgtctgcgacatttatatatatgaataaagttggatgatctgctgcataccttttttt

SEQ ID NO: 21170 - DNA, 1542 bp, Zea mays
  Clone ID: LIB3279-180-A12_FLI
tcccgtcgcatcccatcccactaccacccatctcgtcgtccgccgattcgatccggttcttccaacccaggggcagtgatggcgacgaagaggagcgtgggcaccctcggcgaggcggatctgaaggggaagaaggtgttcgtgcgcgccgacctcaacgtcccgctcgacgatgcccagaagatcaccgacgacacccgcatccgcgcctccgtccccaccatcaagttcctcctcgagaagggcgccaaggtcatcctcgccagccacctgggtcgtccaaaaggtgtcaccccaaagtacagcttgaagcctcttgttccacgcttgtctgagctccttggagttgaagtcgtgatggccaatgtttgcattggtgaagaagttgagaagttggctgccgctttgccagaaggtggagttctgctcctagagaatgttagattctacaaggaggaagagaagaacgaacctgagtttgctaagaagctagcatctgttgctgacctttatgtcaatgatgcttttggcacggcacacagagctcatgcttcaaccgaaggagttaccaagtatttgaagcctgctgttgccggcttcctcatgcagaaggaacttgactaccttgttggagctgttgccaacccaaagaagccatttgccgctattgttggtggatccaaggtctcaagtaagattggtgtcattgagtccttgctggcgaaggtcgatatcctcatccttggtggtggtatgatctacacattttacaaggcacaaggatattctgttggaaaatctctcgtggaagaggataaacttgagctcgcaacttctcttattgagaaggcgaaggcaaagggggtttctcttttgcttcccactgatattgtagtagcggacaagtttgcagctgatgctgagagcaagattgtccctgccactgctatccctgatgactggatgggtcttgatgttggccctgatgccaccaaaacattcaacgaagcattggacaccaccaagactgttatttggaacggccccatgggagtgtttgagttcgagaagtttgcagctggcactgaggcgattgccaagaagctagctgagcttacaaccacgaagggtgtcactaccatcatcggcggcggcgactctgttgctgctgtcgagaaggctgggctggccgacaagatgagccacatttcgaccggcggcggtgcgagcttggaactcttggaaggcaagactctacctggtgtccttgccctcgatgacgcctagatccgctgctgctgctgctactcaggttctgccagctttgcgtgtcatcttgtttcggaccttggtgtagcactgcaaggctaaggtttactcctccgcacatggacttttggggataggcttgccaccgtgttttgctagatgagtcgtggaataagcttttacttcctcgctgctgtgggtgaagtgactggaattcggaaatttggaactaacaaaaccccccgtggatttgtatgatatgttttgttcgac

SEQ ID NO: 21171 - DNA, 1164 bp, Zea mays
  Clone ID: LIB3279-190-G4_FLI
gcgagtccccttcccgatccgccggcccatccacccaccgccgccatgccggcgttcaaggccccggcgccgggcttcgccgtgcgcttcagccccttccacgagaaccgcctcctcgccgccacgtcccagcacttcggcctcgtgggcaacggtcacctcatcgtgctcgacctcgccggcggcgggcccggggccgccccgacgccggtcttctccttcccgacctccgatgcgctcttcgactgcgcgtggtccgagtcccacgactccctctgcgccgccgcctccggggacggctccgtgcgccttttcgacgccgctctcccgccggcgcagaaccccgtgcggctcctccgggagcacgcacgggaggtgcacggcctcgactggaaccccgtccgccgggacgccttcatctccgcctcctgggacgacacgctcaagctctggtcccccgaccgcccagcctccgtccgcaccttccggggccacgagtactgcgtctacgccgccgcctggtccgcgcgccacccggacgtcttcgcgtcggcctccggggaccgaaccgcgcgcgtctgggacgtccgggaccccgcgcccacgctcatcctgcccgcgcacgaccacgaggtgctctcgctcgactgggacaagtacgacccctccatcctcgccaccgcctccgtcgacaagtccatccgcgtctgggacgtgcgcgcgccgcgggcgcccatcgcgcagctcgccggacacggctacgccgttaagcgggtccgtttctcgccgcaccgccagggcatgctcatgtcatgctcctacgacatgactgtctgcatgtgggactaccgcgccgaggatgctctgctcgccaggtacaaccaccacacggagttcgttgccggcatcgacatgagcgtcctcgtcgatggcttgctcgctagcaccggatgggacgagatggtctacatctggccatttgggacggatccaagagccatgtagcacgcagatgcaatagaccaggtgatttgtactattggttctcagctatgcattgggcggtggtaatactaatacatgctcctacatgttcagttactatctcttcaaatgagttgaagaagttggaataatgtcaaaaatttgttcagttactatctc

SEQ ID NO: 21172 - DNA, 597 bp, Zea mays
  Clone ID: LIB3279-206-E12_FLI
atccctcactctcctccgaagccatcgtccccgtcccagcctccccggactccaggggcaaaagctgcagcgtcgagatggtgaaggggcgcacggggcagcgcgtgaggctctacgtccggggcaccgtccttggatacaagcggtccaagtcgaaccagtacgagactacgtcgctggtgcagatcgagggggtgaacaccaaggaggacgtcgcgtggtactgcgggaagcggatggcctacatctacaaggccaagaccaagagcagcggcacccactaccgctgcatctggggcaaggtcgcccgcccgcatggcaactccggcgtcgtccgcgccaagttcaggtccaacctgccgccggaatccatgggccgtaaggtcagggtgttcatgtaccccagcagcatctaaagataatctgaatgtgtggaggacccttttcttctagattttatcttcagctgtccttgtaagggttgtgttcaggttgagagttagcaggttgagctgtctatctgagaaccatttaaagttctctgagttttggtgttatggatcactggaagtattatatgaagtttaagttagaact

SEQ ID NO: 21173 - DNA, 1464 bp, Zea mays
  Clone ID: LIB3279-206-E4_FLI
gttcaagtcagcggtttagggttcgagatctcggcattgcgccgcggaagccatggcgacaagcacacttagtaccgtgaaggtgagcaatgtatcactgaaagcagcacagcgtgagataaaggaattcttttccttttctggtgacattgtgcatgttgaaatgcagagtggcgatgaactttctcaagttgcctacattacttttaaagacaaccaaggagctgagacggcaatgcttctcacgggagccacaatagttgatatggctgtaatcgtcacgccagccaatgattatgagctaccagcttctgttttagctgctcttgagcctaaagacacaaaaccttctgcccttcaaaaggccgaggacattgttgggaccatgctggcaaagggatttatcctcggtagagatgcactggacaaagcaaaagctttggacgagaagcaccagctcacgtcaactgccacagctagagtgtcttcctttgacaagagaataggcctaagtgagaagatcagtgttggcacttcagttgtaaatgataaagtgaaggaaatggatcagaaataccaagtctctgagaagacaaagtcagcgctggcagctgctgaacagagtgtctcgaccgctggatctgctatcatgaagaacaggtatgttctcaccggagcagcatgggtaaccggtgctttcagcaaggtcaccagtgctgccaacgatgttggtgcaaaggctgaggagaaaatagcagtcgagcaggaggacaagaatgccgagggtgggcctggacaagcaaacatctcagatatccctgcagcacacagggagttggacagtgaattcgcaaacatacatgtctctgaaacccctgaagatgttcccatctctaccgtgactgtccccgctgttacagatgaggagcccagcacggccactccagcagctgaagtttctaaaaagccagaagctgcgcagggattaatactataagtgatacagttttgcttcatacatggatgcaatgtaaatagacatgaaatgaggtagccattgaactcatttgtgatgttgtggttgacatcatcagatcgaaccctctttgaaggttgaaaatgattgggacctgaagaattttgcaatttgtacctggtactttttatcaaattatcagtcttacctggcagtgggaaactgggaaaatggaatttattgcttctggagctgtgctgatactggtccatctattgtttcttggtatagcaattgcttctgtttgagagattattatggctgttaacgagggagctgtagttccacgtgtgctgcacatttgcgttcctgaagcagcagctttctggaacatgaccgaattatttggacgattgtcctgtttgaatgttgtagttttaaaaaaccatggtatcagagaccaatctcgtatttgaagcatttatatc

SEQ ID NO: 21174 - DNA, 1673 bp, Zea mays
  Clone ID: LIB3279-206-F12_FLI
gcccgccgccgccacccccaccccgaccggcaccaccacctcctcgctccacctccgtccgccgtcgccgcgatggaagacgacccgtcgcgccaggtgcgcgtgcgcttcgtcacgaagctgccacctccgctgcggacgccgcccgctgccatcgccgtccccgcggacctcactcgcatgggcctctccgagatcgtcaacagcctcctcgcagccgccgagccggaccaccagtcgcagcccttcgacttcatcgtgcagggcgagctcgtgcggctgccactccaagagtttctcctcgccaagggcatctccgcggagagggtgcttgagctcgagtatgtgagagcagtggcgccaaggaagcaggaggaaccttgcccccatgaagactgggttagtgctgtggatggatcaaacccaggttttatattatctggatgctatgatggtcttgcaagattatggaaagatgcagcagtatgcacacaaattttggagggacacaatgatgcaattacttctaccagattcatcaataagggatctgaaactgagggcagtctgcatgtagtgactggctcaaaggataggtcactgcggctatacaagtgtgatacatcagtcattatggactacccaaagcgggttggggcttacaaaattcttcgtggccacacagcatcggttaaaagtatctccgcagacccttctggcgatatgctatgttctggatcctgggatggtaccatcaagttgtgggcagttgaaggatctgatgacgatgatgctgtttcattgaagaagagaaggatgaattctgactcatctggacctgaagagtctcagttagagggttcagccacttcaacacttctgggacatacacaaggtgtaactgctgttacctggcctgaacggaaaacgatatattcagcatcttgggatcattctgtaaggcagtgggatgttcaaacagtgaaagaaacatggaatatgttttgtgggaaggccttgaattgcttggactgtggaggtgagggttcttcattgattgctgctggtggctctgatcccgtgttgagggtatgggaccctcgcaagcctggaacattagcgcctgtttttcagttctcctctcattcaagctggatcactgcttgtaaatggcatccgagttcttgtttccatttggtgtcatcttctttcgacgggaaagtgatgttgtgggatctaaggacagcatggccgctggcgtctgtggactcgcatgaagataaggttttatgtgcggactggtggaaaggggacagtgtgataagtggcggagctgattccaagctatgcatctcatctggtattcaaattgtgtgatgaagttcttccttgtgcttctctgagtccatgctatcgagattatatgggttgacaaaccatttccagaagccaaataatgtcagatatgtttgtgggaagatatgcaacccttcagtcaagatcaagatacggcacatggttttaccagatatgtgtgcagaagtgcatttcttgcataagtaagatccaaagcaattgataactatatcttgctcatcaacttttttttgtgtgttcaggtgcgtttggcaccaatattactctattattccaagatcatgaattaatagttg

SEQ ID NO: 21175 - DNA, 1481 bp, Zea mays
  Clone ID: LIB3332-038-G2_FLI
tcgatttgttgaggtcccctcctcctgtaggtgtccaacttgactacagccacctctcggctccattctgcccctcctccttctcagtcggcagccaccatgccaccgcacgcaaccaaggatcccgtcgccgcgcctgcagcagccacggcggcggcgctgtcgcgggccctggcggcggcgcgccctttcctgcgcggggaggaggcggaggtggacccggcgctgcctggcctcgccgccgtgctgcgcggcgcgggcgccggcgagtgctggcacaagcacggcacgttcctggcgcacctgctggacgtgcaccggatcctccgcctgtggggcgcgcccgacgccgtggcgcgctgcggcctctaccactccgcctactccaactcctacgtcaacctggccatcttccagcctgacaccgggcgcgcccacgtcgctgccgtggtcggcggacccgcggagcgccttgtccacctcttctgcgtcgtccccaggcagcagctcgtccacgacgacctgctcttccactactccgaccaggacctcgccgacgacctagccagctccgaggagtcggtccgggacgcccggcgcggcgtgttcgacgacgcccagccgtggcggcgcaagatccagcgcctcctcccggcggacggcatcacggtcaagcacatcaggacaggggaggatgtgtcactgtccaggcgcatcgcagcgacgttcctcctgatgaccatagccgacttcagcgaccagctgttcgactggcaggaccgcctcttcgacaacagcaacggccgcctcgagttcagcggcaacacctggacctccctctggcccggcaccggcaagcctggcctctgggtcacctctagctcccgcatggccgcgctctacaccctcatcgtccgcgaggaggagatacacatcacgcagcgagcgcgagatacacatggccgggacgaggacatggacctggtgatccccccggtgttcaacggctgcacccgattgctcaacgccgaggaccagaaggtggcacgagacctctactgggaggcggtatgcggcgaggaggcgtcggactggctcaaggtggagcagctcctccagcagagcattgccaagaacccgtttgtgggggaaccacacctggtgcttgcccaggtgtaccttaacatggagaggtacggcgaggcgcagatgcaggcagaggaaggtctgaggctgttgctggagtggggcagcagctgggacaagaggatgccatgggagggctgggtgtcctggggcagggcgatgctgaccaaggccaccgacaaggattggccgcatacctcattcgggatcctcagccttgggcttgtcaaatgatacatatattctcaccgtatgcatatgtatgtatttgtacgaaataataaacccaaggccagggggtcaagccaaacaataatttgatgtacttggaattc

SEQ ID NO: 21176 - DNA, 1459 bp, Zea mays
  Clone ID: LIB3332-038-H5_FLI
gcgctcacctacagctccgtccgccagcgtcagccaggctgccccgggaggccgggaggaagcagatcggagaaggtgatctgttgtaatggctcgattgtacatcggcaacctggatccccgggtgaccgctcgggagctggaggacgagttccgcacgttcggggttcttcgcagtgtctgggttgcccggaaaccacctggctttgcgtttattgattttgatgataagagggacgcagaggatgcaatccgtgacctagatggcaagaatggatggagagttgagttatctcgtaatgccagcggtggtcgtggaggtcgtgaccggcatggtgggtctgagtccaagtgttacgagtgtggtgagactggtcactttgctcgtgagtgccgtttgaggattggttctggaggtctaggcagcggaaggcgccgaagccgtagccgtagccgcagtcgcagtcccagatatcgccggagtccaagttacggtagaaggagttacagtcctgcagcacgctctccaaggcgtcgtagcgtctcaccagctcgtggacgcagctatagcaggtcaccacagcacaagggtgcacgtgaagaatctccctatgataatggataccgtcgcagcaggagctagagccagatccttgtatctgacgagcgttatgtgacagatattgggaaagttatggtcaataacctgcttgaaagatccttcgtcgactgcttgactttggttaaggcatcgtcctgcactgcttaaacgactcggccgactacggctttcagttctgtcttcatggttttgttctgcgctctacattcttcgcacgccctcgcatgcttcattcagtctgccgtgtgttaacctgcctgcgtatcttctcgaagatgctgcgcatcgcaaaagcagtaatgaccttccttctcataccatttggtaaggtttgatttgctgacaaatgcagcatctggtaagtttctccccgtaggtttggtgtccgtgctgcgtgcgctgctcctggttcaggaactgcagtatgttagatggatgaggatgactcacctactcatgttatcatgccttcagaggacccaagttagtgagcgccaggaagtgaattgaccaggccaaatgctacgttgagccgactttggctttgctcagcgatctccacttgctaccatgtgttgccttcgacgaagtcttcttctccttccgcttccttctctgcagcatcctgattgattcattcttcgagtgacatgcagtcaccctaattgatcgtcattgagcctgcgttgaagtcgaatcctgcatccttattattcaaccgttcccccccccctaatggacaatgtagttacattgttattagcttgtttcttgttcgatagactaatgtcagatgctgtttgatatataatggtaaccatctggttgatgattggc

SEQ ID NO: 21177 - DNA, 1291 bp, Zea mays
  Clone ID: LIB3332-047-E12_FLI
cgcacaggcaggagagagagcagggagccagggacagtagcgtggggccggggagcaaagatggaggggaaggaggaggacgtgcgcctgggcgccaacaagttctcggagcggcagcccatcggcacggcggcgcagggcgccggggccggggacgacgacaaggactacaaggagcccccgccggcgccgctgttcgagcccggggagctcaagtcctggtccttctaccgcgcgggcatcgccgagttcgtcgccaccttcctcttcctctacatcaccgtcctcaccgtcatgggcgtctccaagtccacctccaagtgcgccaccgtcggcatccagggcatcgcctggtccttcggagggatgatcttcgcgctcgtctactgcaccgccggcatctccggaggacacatcaacccagctgtgaccttcgggctgttcttggccaggaagctgtccctgactagggccatcttctacattatcatgcaatgcctgggtgccatctgtggagctggagtggtgaagggcttccagcaggggctttacatgggcaacggcggtggcgccaatgttgtcgcccccgggtacgccaagggggatggccttggcgctgagattgttggcaccttcatcctggtgtacaccgtcttctcggccaccgatgccaagaggaacgccagggactcccatgtccccatccttgccccactgccaattgggttcgcggtgttcctggtccaccttgccaccatccccatcaccggcaccggcatcaacccggctaggagccttggcgccgccatcatctacaaccgggatcatgcctggagcgaccattggatcttctgggtcggccccttcatcggcgccgccctggctgccatctaccaccaggtgatcatcagggccatcccgttcaagagcaggtcttaagctgccgcggcagtgccgagacatgcctgccagtccggaaggacgagcgtcttcctgtgggggggaatgccttgtctgcccacgcctagtttctctgctgaatcttccatctctcttcccttcaagactgctcactgctgcactgctctgttatctgaacccagaactttgtgtactcctgtaccgagctgtgtgtatgttttttttttcttccatcgtgtttgttgcaagggttcccgtctccttttatgcgttgggatcgtggcaagaaagggcagatatcatgtgaaaacgtgggtttataactatcagctggatttcatccaagtggaatcgattcagaattttcttt

SEQ ID NO: 21178 - DNA, 1676 bp, Zea mays
  Clone ID: LIB3332-048-C5_FLI
gctccagacgcagtcgaccgccgcagaccgggagtagtcgacgcgccgtcactgaatcctcagatcacggctagccgtaatcacgccactctgctgactcccggcgagcagtgtaacattttccttcagccatgggcaaggagaagactcacatcaacattgtggtcattggacatgtcgactctggcaagtcgaccaccactggccacctgatctacaagctcggcggtattgacaagcgtgtgattgagaggttcgagaaagaggccgcggagatgaacaagcggtcattcaagtatgcctgggtgcttgacaagctcaaggccgagcgtgagagaggtatcacaattgatattgctttgtggaagttcgagaccaccaagtactactgcactgtcattgatgcccctggacaccgtgacttcatcaagaatatgattactggcacttcccaagctgactgcgctgttcttatcattgactccactactggtggttttgaggctggtatctccaaggatggacagacccgcgagcatgctctccttgctttcacgcttggagtgaagcagatgatttgctgttgcaacaagatggatgccaccacacccaagtactccaaggcccgttatgatgagattgtgaaggaagtctcttcctacctgaagaaggttggatacaaccctgacaagatccactttgttcccatctctggtttcgaaggtgacaacatgattgagaggtccaccaaccttgactggtacaagggcccaaccctacttgaggctttggacttgatcaatgagccgaagaggccttcagacaagcccctgcgtctccccctacaggatgtgtacaagattggtggtattggaactgttcctgttgggcgtgttgagactggtatcatcaagcctggtatggttgttacctttggtcctagtggccttactactgaggtgaagtctgttgaaatgcaccatgaggctctccaggaggcccttcctggtgacaatgttggcttcaatgttaagaatgttgctgtgaaggatctgaagcgtgggtatgtggcctccaactccaaggatgaccctgccaaggaggctgctagcttcacgtcccaggtcatcatcatgaaccaccctgggcagattggcaacggctatgccccagtgctggactgccacacctcgcacattgctgtcaagtttgcggagctcattaccaagattgataggcggtctggcaaagagcttgagaaggagcccaaattcctcaagaatggtgatgctggtatggtgaagatggttcccactaagcccatggtagtggagaccttttctgaatatcctcctcttggtcgctttgctgtccgtgacatgaggcaaacggtggctgtcggagtcatcaagagtgtggagaagaaggatccaactggagccaaggtgaccaaggctgccgcaaagaagaaatgatgtgtctggctggttctgtgtttgcttgagggaaacctagtggaaacataaaatatctcgtcttgttcacgtcattgtctgaactatgctcgcaacgtttgcctggtcgatttagaatggttattttcgttaaaaccagagtgttatttaagacttatccgaacatctggtgagccatatatggttactagttttgttact

SEQ ID NO: 21179 - DNA, 2341 bp, Zea mays
  Clone ID: LIB3353-004-A11_FLI
cgtacgtgcacatggatgctgctgacctcccgtgatcttcgatctctccacacggcggcaagcgatcgatcgagaggcgtggtcccgtggcgtccaccgacacctagctgctgctgctagctcatcgatctgcttgatctctagctgagactactccgagcaaaaatgcagcagccaggaacaacaagctaggccccctcacgcagaccgcacgaccgagcgcgcggcattgaccgacccatcgccgccgtcttgccgcctcgatcgaccatgacgcttgcgagcacggacaaggtggtgctgggatgcatcgcgttcagcatcttctgggtgctggccgtcttcccctcggtgccgttcatgccggtgggccgcaccgcgggctcgctcctgggcgccatgctcatggtgctcttccgcgtgatgacccccgaggaggcctacaaggccatcgacctcccgatcctgggcctcctcttcggcaccatggtggtcagcatcttcctggagcgcgccgacatgttcaagtacctcggcagcgcgctggcgtggcggagccggggcagcaaggacctgctgttccgcgtctgcctcgtgtccgccgtggccagcgcgctcttcaccaacgacacctgctgcgtggtgctcaccgagttcatcctcaagctggcgcggcagaacaacctgcccccgcagccgttcctgctggccctcgcctccagctccaacatcggctcctccgccacgcccatcggcaacccgcagaacctcgtcatcgccgtgcagagcggcatcaccttcggccagttcctcgtcggcgtcttcccggccatgatcgtcggcgtcgccgccaacacctgcatcctgctctgctacttctggaggtgcctctccgcgccggagaaggaccaggagggcggcgccgccgccgcggggcccgacgtcgccgtcgtggccgacgaggaggtcacctcgcacaggttcacgccggcgcggatgtcgcgcgcctcgtccgtcaacgggggcggcgccgacgccgactgcgtcggcgagctcatccgccggagcgatagcctcagccgggccgacactacgctaggcatgagcatgaggagccggagctacaactcggagggcggcgacatccaggtcgccatcaggtccatgcgcgcgtccagcatgtcgcaggagatggtggaggtgtccaccgtctgcgacaggcgcgacgacggcggtgccgggcccagaaaggtcaccaggaccaccagccaccagcgcagcgtcatcatcgaggacgcgcccgaggctgacgccgccgacgacgacgacgatggccacaagggcaaggacggtgacagcgtcaccaacaaggagaagaggtggaaggtgctcgtgtggaagactgccgtgtatctcaccacccttgggatgctggccgcgctcctcatggggctcaacatgtcctggtccgccatcactgctgctcttgtccttctcgcgcttgatttcactgacgcacaggcgtgcctggagaaggtgtcatactctttgctgatcttcttctgcggcatgttcataacggtcgacggcttcaacaggaccggcatacccaatgcgctctgggagctggtcgaaccgcactcgagaatcgacagcgccaaaggcacggcgcttctcgcagtcgtgatcctagtcctttcaaatgtggcctcaaacgttccaactgttcttctgctgggcacaagggtggcagcgtcagcagttgcaatctccccagagtcagagaagaaagcctggctcatactggcatgggtgagcacggtggccggcaacctgaccctcttgggctcggcggcgaacctgatcgtctgcgagcaggcgcggcgggcacagttcttcgggtacaacctcaccttctggagccacctccgcttcggcttgccgtcgaccatcatcatcacggcgatcggcctgctcatcgtcgccagttactgaacggaaccccacacaagctagggtctcggcctcgcacaagcggcggggtgtgtagccagatggcaggcagaacgctgcagattggcctttgtttgtacgttgtaactgtttttatgtcgtttgtgtaagtctgtacgtttcgcgcaaccgatgccgcaaggcgccgggttgcccatctgctaaggcaaataatgcgcaagactagtagatggcatggagtatagaagggcggcaccactgttctaggaaggcaaaaacttgctctagctagttcaggtaggagagccggcgaaaatgtatggtgtgcttctcgatttggtaatgtcaagggacttgtccttatgtt

SEQ ID NO: 21180 - DNA, 591 bp, Zea mays
  Clone ID: LIB3353-004-D2_FLI
cctccctgtcctgccgagcgggccccaccagcggccgtcccctggccttcttcctctgcatgtcacccgcgccctcctctcgattctctctcccctcccctgcttcttccatgcgcgtccgacgtcaccgagccgctggacgccaggcgcccctgcagccgacgcgcccagctgctcgcccaggagcccgcgcgccaggcctcgccactcggacccgccctgcagccgcgcgccagcgaccgtgcgacgtccagcgccgggaccgtgcaccgcgcgcccagccgctcgccgaaccggctgctcagcgccctgccctgcggtcgagcagccgagctcgacccgccgagcgactagcgcccaaggccacccgcgccctgcatccacgacgcgaagccgccgaccgagcccctgcaccacacagcgagcgcccaacccgaccgcgcgacgaccgcgagcacagcagaagccgagcagccccgaccgtttcctctgcgttcaagacacttcaatggagtcgttactcctctcccattaatcctttcgttgatgaatgtcattaatggtgcttgataatgttggctgtttcttccc

SEQ ID NO: 21181 - DNA, 601 bp, Zea mays
  Clone ID: LIB3353-004-D8_FLI
ctccccacaaaaccgtcagttctcttttcccctgtaaatcgcaaattcgtcttccctgcccatctatcgcttggacacctctgcaagggagcacatggctctcgagaaggccaaggagatcatcgcgtcctccccggtcgacctagctctccgaaaggccaaggagaccgtcgcctcccaccccgtcgtcgtcttcagcaaaacttactgtcctttctgcacccgagtgaaacaattgctagcaaagttgggggcaagttacaaggctattgagttggatgtggaaagtgatggcgctgagctgcagtcagctctcgctgaatggactggccagagaactgttcccaatgtcttcgtgaaaggggagcggattggtggctgtgacgcaaccatggcgatgcacgacggtgggaagctggtgcctctgctcaccgaggctggagcaattgtcactgccagggctactgcaactactaccactccgtctttgtagacatgttttacagcgctgttccgctcgcttcgtggctatatgcaagtgttgtacggagtactaaactcatacgtggtaaaagatgaataaagacttaaacatttcttt

SEQ ID NO: 21182 - DNA, 1261 bp, Zea mays
  Clone ID: LIB3353-005-A12_FLI
gtttactagatttttctatagatttgaaccgtaatccattaccacgcctcctcacaggcacacctcacactcacacgagcagcagcggaagataagagatgtgctgaagctgaacggtggccatgtccaccggacgcacagaggaggccgccgggagcgcggagacggcgtgcgtgacgggcgccggcgggtacatcgcctcgtggctcgtcaagctcctcctctcccgtggctacaccgtccacggcaccgtccgcgacctcagtgacaataaaaccgctcatctgaagcggttagagaatgcttccgaaaacctcaagcttttcaaggctgatgtccttgactacgacgctatggcagctgcagtcgcagggtgccagggagtctttcatgtcgccactcctgttccttcagggaagatcaccgatccagagcgagagatgctgggtcctgctgttaccggcaccataaacgcactcaaggctgcgtctgctgcaaatgctcgtcgagtggtcgtcgtttcatccatggttgccgttgagatcaacccgaaagactggcccaaagacaagatcaaagatgagaactgctggtcagataaagagttctgcaggaacgaagagaactggtattctgtcgccaagatctcgtcagaagaggccgcacttgaatacgcgaagcagaccgggctggatgttgtgacggtcaatccagctgtggtctttggccctcttctgcagccgacgctcaacacgagctgccagttcctcgtctacttcctgaaaggaggacctgatcgaatgagggacaagctttggcacatcgtcgacgtcagggacactgccgatgctctcctgcttgtgtacgagacaccacaagcctccggcaggcacatctgcgctcctcatttcatcagcgcgcgtgacctgctggagctgctgaagacgatgtaccctgatgattaccctttcattagcaaggagagcatctacgacatggagcacccagctccaatgacgtccgacaagctcaagaaactgggatggaaggtcaggccgctgaaggaaacaattgcggaaaccgttgagttctgccagcatgctgggtttctcgaggacgtggagggattccgttttcctcccctgtacaacataatctagtttacaataacgtcagtagtgtaagagcaactccaacggaatccgtaaaatttacacaaaaactttgatttggaggctctctaaaataaatagctcgctgg

SEQ ID NO: 21183 - DNA, 772 bp, Zea mays
  Clone ID: LIB3353-009-D5_FLI
ctggcttctcctccccctcttaccaagtcctcctcgggttagggttccttagggttttgtggaggggcgatggcggcggctgatgtggagtaccgttgcttcgtcggcgggcttgcctgggccaccagcaacgagtcgctggagaatgccttcgcctcctacggcgagatcctcgactccaaggtcatcaccgaccgggagacggggaggtctcgcggcttcggcttcgttaccttctcctccgagaactccatgctcgacgctatcgagaacatgaacggcaaggagctcgacggccgtaacatcaccgttaaccaggcccagtcccgtggcggtggcggtggcggcggtggctacggcggcggtcgcggcggcggcggctatggtggcgggcgccgtgacggcggttatggcggcggtggcggctacggcggtcggcgcgagggtggtggcggcggctacggaggcggtggcggctacggcggtcggcgcgagggtggtggtggcggctacggcggcggcggcggcggctggagggactgatgtgtgggcccatcctggcttcggccgagttatcttatctatctatagtatcgtgttaccgttcgcttctgtcaccgtgttagtgtccgttctacctttggattaggtgttggtacccctgttgttccctttgtttgctcccgctatgaaacgagacgagagaagaatgagcaaggtttttgttcgcagctatttttgtccaatgatattgatatgttgttcccctgtc

SEQ ID NO: 21184 - DNA, 1676 bp, Zea mays
  Clone ID: LIB3354-009-G7_FLI
gcggcacccgccaccgatcgagccgctccggcgagcgcagcgcagcccacggcatttgccgatttgtgaaggagcgtgaaaaagcccttcccacgctgggccccgcctccgcgacgcgagcccacacgtccgtttccggtgccttggccagacaggcagcccatgtgctgagctcacatgcctgccgctcccacacctcgccaccctcctgcctcctccgcatccgcgccccctcgcttagcctaaaccgcggggcagctagtctcgccaccgcaggccgcaccggtcatcacaccggagcgcacgcggggagcccccgtagagttccggggcgaccaggccaactaacgccatgaaggaggaaggcggcggcggggacgcggggttcgtgcgggcggaccagatcgacctcaagagcctggacgagcagctggagcgccatctcacccgcgcctggaccatggagaagcgcaaggaggaggcctccgccggcgctggcgccggcgccaggcagcaccagcagtcccggcgcccgcggagggaggactgggagatcgaccccgccaagcttgtcgtcaagggcgtcatcgcccgcggcacctttggcaccgtccaccgcggcatctacgacgctcacgacgtcgcagtgaaactacttgattggggagaggatgggcatagatcagaacaagacattgcagcactaagagcagctttttcacaagaggtctctgtttggcataagcttgaccatccaaatgtaaccaagtttattggagctataatgggtgcaagggatctgaatattcaaacggaaaacggccacattggcatgccaactaatatctgctgtgtcgttgtggagtaccttcctggtggtgcactaaaatcatttctgataaagaacaggagaaagaagctagcttttaaggtcgttgttcaaatcgctcttgaccttgccaggggattaagctatctccattccaagaagattgtgcaccgtgatgtgaagactgaaaatatgcttcttgacaaaacgagaaccgtgaagatcgctgattttggtgttgctcgccttgaagcttcaaatcccagtgacatgacgggcgaaactggaacgcttggttacatggcacctgaggttctcaatggaaatccctacaacaggaaatgcgatgtttacagcttcgggatctgtttgtgggagatatactgctgtgatatgccatatcctgacttgagcttttctgaggtcacgtctgcggttgtccgtcagaacctgaggccggagataccacgctgctgcccgagctctctatcgaacgtgatgaagcgctgctgggacgccaaccccgacaagcgacctgagatggccgaggcggtgtccatgctggaggcgatcgacacgtcgaagggtggaggcatgatccctgtggaccagcggccaggatgccttgcgtgcttccggcagtacagaggtccatgacagataggtggaaacctgttggagctgcggcctctagatctcgtggatgccgatcgatcgcgtgttgttttctggggaagcaaactggttaatggagctagcccgccttaccggctcgtgtaaatcctctgtccatcaattctgtaactctgttttatcgattaatgaaaagaaccgggcttgctcgact

SEQ ID NO: 21185 - DNA, 720 bp, Zea mays
  Clone ID: LIB3279-180-D12_FLI
ctcgaccccgacaaccccgagtcccgacccgatggcgcccaaggccgagaagaagccagcggagaagaagccggcggccgaggagaaggcggagaagacgaccgcaggtaagaagcccaagtccgagaagcgcctgcccgcctcgaagtcctccggcaaggagggcggcgagaagaaggggaagaagaaggccaagaagagcgtggagacctacaaaatctacatcttcaaggtcctgaagcaggtgcaccccgacatcggcatctcctccaaggccatgtccatcatgaactccttcatcaacgacatcttcgagaagctcgccggcgaggccgctaagctcgcccggtacaacaagaagcccaccatcacctcccgcgagatccagacctccgtgcgcctcgtcctcccaggagagctcgccaaacacgccgtctccgagggaaccaaggccgtcaccaagttcaccagcaattgagcagcctccagcgtccacggatttgttaggtctccccttcttacaagggttcttcgtcgtgtcctctacccctcccctccccgcctatgtatgtgctgtgaaatcgttgatgttctcgtcgggtgaacaaaggccagtagctagcttgcctgcttcataaatcgtgccggattgtaatgggcctcttagatttggcgcccctgttttggaatatagttgtatccgtgccttccctgcttgct

SEQ ID NO: 21186 - DNA, 760 bp, Zea mays
  Clone ID: LIB3279-180-E4_FLI
aagagaggtcattgatgaggatggttggttacatactggagacataggtttgtggctgcctggagggcgtctaaaaattatagataggaaaaagaacattttcaagttagctcaaggagaatacatagctccagagaagattgagaatgtctatgctaagtgcaagttcattgctcaatgctttatatatggtgatagtttcaactcttccctagttgccattgtagcagtcgaaccggatgtgttgaaggcttgggctgcatcagaaggaatccagtacgaggacttgagacagctctgtgctgatcctagagcaacagctgctgtcctggctgatatggattccattgcgaaggaagcacagctgagaggtttcgagtttgctaaagcggttactcttgttgctgagccattcacattggataatggccttctcaccccaacattcaaggtcaagaggccgcaagccaaagcatactttgcaaaagaaatctcagacatgtattcacggttgctagagacagagttagctaggtcgaagttgtaacttgtgcggtatcagtatcaggagaaaggtcatcaatacagccgtacaggagattggattctgcaattgtttattccacctcacgaaataagtagtaaaatctttttactgatacgggaaataacggatcatgccatgctccggagtcgatagtcgtttttttcaccagacggaggcagtgcttggcgcatgctgaatatatggttctattat

SEQ ID NO: 21187 - DNA, 1119 bp, Zea mays
  Clone ID: LIB3279-180-G1_FLI
cctctctccgataacgctagcatccgccgccgccggcgacgaatccggtaagcctcctcgcttctgctagatacacggctgccagatcggtgcgccccgcgattagggaaagggtcgattgcgatcagccgttcctctgccttaggtcatcgtagttgattagtcggcggtcactgctcggattgggcacccaccgcgcataggtgggggctccaccgtggaaaaactatccttttcctcttcagttatttttgggtaatgcttgcaattgctacccgatgagtttctcgaattagtttgtgaaatgacgttgttccagctgctgttttgtctagcaggcgttttgagtttctgttgccagtgcagccatgtccatgttcaacaggatcttcgggaagcccaaggagcaggccaactccagtgccttggccactctcgacaagttaaatgagactcttgatatgctggagaagaaagagaaggtgctggacaaaaaagcagccgctgagcttgagagagccaaggagttctccaaagctaagaataaaagagcggctatccaatccttgaagaggaaaaaactttatgaacaacaaattgagcaactcggaaattttcagttgagaattcatgatcagatgatcatgttagaagcagctaaagctacaacagagactgttgatgcgttgagaactggagctgcagctatgaaagcaatgcaaaaagcaacaaacattgatgatgtcgacaagaccatggatgaaattaatgaacagactgaaaatatgaaacaaattcaagatgctttgtcaactcctcttggagcttctgattttgacgaggatgaactggaagcggaacttgaagaactggaaggagcagagttggaatctcagcttctggagcctgttgcagctcttcctgtgcatccagtgcatgtcccaggcaacaagcaaccagctcgccctgctccacagaaagctacagctgaagatgatgagcttgctgcactgcaagctgaaatggcattgtgatcaggttaatgtttgctccatttgtacatcttaatgactaattcactggtatctgttagctaaatctgataatgttatgtccaag

SEQ ID NO: 21188 - DNA, 1401 bp, Zea mays
  Clone ID: LIB3279-180-H5_FLI
tcgccgtcgctctctctgctctccaccatcctcctccccctcccctcgacctctcatcctcctcctgcttccccgcccggtcaacccataatccaaggcatccctgtgctgatggatcgattggaaatgcaggacgactcgaagagatccaataggcccaaatattctaagtttacgcagcaagagcttccagcatgcaagccactgctaactccagcaattgtcatttccgccttcttactggttggcatcctattcgtcccaattggtctcgcatcgctttctgcgtcacaagagattgtggagctggtagatagatatgatacaagttgtgtgaccgtggctgacaaagttgggttcattcagaacactaaaacggacaaatcatgcacaagaactctaactatccctaagcatatgaagagcccaattcaaatatattaccagatcggtgacttctatcaaaaccatcgacggtatgtgaaaagtcgcagtgataaacaattgcgatataaagatgctgcacacttgacaaaagattgtgagcctgaagtttatagtgctggtggtgccccaatcgttccatgtggcctcgttgcttggagtttgttcaatgatacatatacaatttcggtcaacaagaaagctattgtagtgaacaaaaaggatatagcctggcagagtgacaagaagaaaaaatttggcagtgatgtttatcccagtaactttcagaacggaaatcttataggtggcgctaggctaaatgagagcataccgctaagtgagcaagaagatctcattgtttggatgagaactgctgccctcccaactttcagaaagctttatggaagaattgagacagatattatggaaaatgatgaactcacagtggttatacagaacaactataacacatacagttttggagggtcaaaagcactggtcctctcaactacatcttggattggaggcaaaaataatttcattggtttcgcatatctgattgttggtggtttttgccttttccttgcactggtttttgtagttctctacatgattaagccaaggactcttggagacccctctttcttgtcatggaataggggtaccatggactatccaagctaatacatcgaaacattctctttataaaaatagtggaaggacccattgccaattggactgcactgcagagtctcatgcattgctcacctcaaagaatgacactgcaaacaaaggtggaaacgatgttactcctatctgttacggatgcactacctgtgtctgataaaggaaagtacaattctagcatatgatacctcaaacttgattaattatagataaaagaagttcagcttgtgtttcagaaacgtcatgctgagtacaattctagcatatgat

SEQ ID NO: 21189 - DNA, 2008 bp, Zea mays
  Clone ID: LIB3279-181-A12_FLI
tctcgagctggatctctaccgttccagcagacagcagtggctctctctctccctcgtggcgacgactgggcgaccgctgccgctgccgctgcccttgtgccccggtctccgtcggtccgttcgccaggtctcctgcgggctcttcgtcgtcgacaagctccgcctggttgctgtgtgaagtccaaggttgtcacatggattcagcacaagatttccaacccaggacattctctataaagttgtggccaccaagtgaaagcacacggatcatgcttgttgacaggatgacaaacaatctgtccacagagtccattttctctcgcaaatatcgccttttgggaaagcaagaggctcatgagaatgcaaaaacgattgaagaactttgctttgccttggctgatgagcatttcagagaggagccagatggtgatgggagttctgctgtccagctatatgcaaaggaaacgagcaagatgatgttggaagttctgaaaaaaggcccaaggactactgcagaactggaggcacctgtagctgacacacctcttgtgtctgctgatactgtactagatatatctggtggcaagcgtgcttttattgaggcagatgaagcaaaggaactgctgagtccacttaccaaaccaggaaattcatataaaagaatttgctttagcaacaggagctttggtattggtgctgctaatgttgctgggccaattcttgagtcagttaagaatcagctcacagaggttgatatctcagattttgtggcaggaaggtctgaggatgaagcccttgatgtgatgcgcatattctccaaagcattagatggttctgtcctgagatatctgaacatctctgacaatgctttgggcgagaagggtgtcagggcattcagtgagctcctgaaatcgcaagaatccctggaagaactttatgtgatgaatgatggcatatcagaggaagctgcaaaagctctatctgagcttattcctgcaactgagaagcttaaggttcttcacttccacaacaatatgactggagatgaaggtgctatgtatattgctgaaatggttaagcgttctccaaatgtagagagtttcaggtgctcagcaacaaggataggatctgatggtggagtcgcattgtctgaggcattggggacatgcactcgtctgaagaaacttgatcttagggacaacttgtttggtgttgatgcagggttagctctcagcgaaacccttccaaaactacctgatcttgttgagctttatctcagtgatctcaatcttgagaacaagggtactatagcaattgcaaaagccctcaaacagtcagcactgcagttggaggtccttgaaattgctggaaatgaaataaatgccaaagcagccccagatttggctgaatgtctagcagtaatgcagtcactcaagaagctgaccttggctgaaaatgaactgaaggacaatggtgctgtgataattgcaaaatcattggaagatggccactcagatctcaaggaacttgatgtgagcacgaacatgctgcagagggttggagctcggtgctttacgcgggcagtcgcaaataaaccagattttgtgcagctgaacatcaatggaaattttatctctgatgaaggggttgatgaggtgaaggaaattctgaaggctggtaagaaatctctggatgtgctgggcccactagatgagaatgaacctgatggagagcctgatgatgaggatgccgaggacgatgaggacgagctggatttgaagctgcagagtgtgaaggttgagcaggatgaggatgattgacgatccttaggttaaatatctttagctactcagtaatcatttggatgtccatgagctacgcaaacttttaattaaaaagaatgtactgaggcttttccattgtcctgagccttttgcaagggtcatacttacattgtctgtagccttttgggtccccggtaaagaggatgttttgacctctcgttgat

SEQ ID NO: 21190 - DNA, 863 bp, Zea mays
  Clone ID: LIB3279-181-C5_FLI
ggcggcgcgggcggacaaggagcaggcggaggaggagctgtgccaagccacaatgggtatctcgcgtgactcgatgcacaagcgccgggccaccggtggaaagcagaaggcctggaggaagaagcgaaagtatgagcttggtcgccagccagccaacaccaagttgtcaagcaataagacagtgaggagggtccgtgttcgtggaggtaatgtgaaatggagggctcttcgccttgatactggtaactactcatggggaagtgaagctgttacccgcaagacccgtatcctcgacgtggtctacaatgcatcaaacaatgagcttgtgaggacacaaacccttgtgaagagtgccattgtgcaagttgatgctgccccattcaagcagtggtacctcactcactatggagttgacattggtaggaagaagaaaacccctgctgcaaagaaggataatgctgagggacaagaggttgaggcagcagctgaggaaacgaaaaagagcaaccatgtcacgaggaagcttgagaagcgcaaggagggacgtacccttgacccacacattgaggagcaatttggcagtggacggttgctggcatgcatttcttcccgccctggacagtgtggccgagctgatgggtacatccttgagggtaaagagcttgagttctacatgaagaagctacagaggaagaagggcaagagcgctgtagcttagagcattctcatggattgtcttgcaccgaaatgtgtgtcctgatgagtacactttttttggttaatcgtctcaagttcagagcgttatgccatgttttcagacctgattagtacactgttttctaaaagcgattgagctctagtcc

SEQ ID NO: 21191 - DNA, 1241 bp, Zea mays
  Clone ID: LIB3279-181-F8_FLI
gtctgtacaccctgtcattgccggctccgtcggccgtcttcccgaggatgctgcggctgcgctggcgtgccgtcctccccccactcccactccctccgccgcctggcttgcttcgccgcctgcctccgcaccggcgcgccctctcgtcctcttccggcactatcccgcttccaccgccggtgatggaggcttcctacaagtttgggccctacaaaatcgacgccagggaggtcttccacgccacgcccctctcctacgccatggccactttctattgattgctcactgcagtatagttcatgaaactttacttacctttgtgttggttctcttctttttagacctggttatcttgtctgtctagggaggatcaagtttgctttaggtactcatttagtgagggctctgttttgttgagccactgacttcacttcatatttggttcatctttccatggagaccatctacaattctatgacatgattatttctttttcacatcatgcaacagttccacttccagaatgattgtatgcctgcaactcaagttgactttgtgaatcaatttctactgtgttgtcattcggggcagagctgtcataactcatagacccacctggatatatttatttgactcaaagtttgatacatcatgtgtttaggaaactgtgttcttctatatgcactggtttttccttgacaatacctacatgttcttgtgtgccccaagcgtgaagtgaaaagattcgccgatctaagttctgatgagattagtgacttatgggttactgcaaaggaagttggtgcacgtcttgagcagtaccacaaagcatcgtcacttacctttgctatccaggatggtcctcaagctggccaaacagttgcacatgtccacatccacctcatcccaaggaagaaaggggattttgagaaaaatgatgaaatatatgatgcgattgatgtgaaggagaaagaattgaaggagaagcttgacctggacattgagaggaaagataggagcatggaagagatggctaatgaggccaatgagtaccgtgctctttttagttagtttctaagctgagctgactgtttgctagaaataaggtttgctacctgttcttcattgttgcagttcagttatggttgcgcactgacattgtgatgatgtcccgttctgtaccgtggagaattaataatttgttgcaaggaatgcattcttagtgacaaaccttttagatt

SEQ ID NO: 21192 - DNA, 1143 bp, Zea mays
  Clone ID: LIB3279-182-C1_FLI
actggcccatccacagtggagcgagccatcctagtttccttcctcttccgactcacacctcacctccggcgacgcacgctgccgctgccgccgccgtgcgcccgcctatctacaatcttttaccgtgctgccgcagaggtctcgtcctcaccatccccgtaggaagccgaagtacagccagaagcgtcgtcacaactcacaagcactgatcatggccgactacgatcaggagcaagagatggaggtggaggcgctgcaggccatcctcatggacgacatcaaggagatcgacccaagtgagagtgggatcgctaccaccgcccggtgcttccagatcctactctctcctcaggatgatgattttgacgagtcagcttatgtcccagttcaactggccctgatttttgcgcacactgagaagtaccctgatgaacctccggtactgaatgtcaaaagtgtacgagggattaaaccacatgatcttgcatccctaaaggaaaagattcagcgagaggcaacagagaatcttggcatggctatggtctacactcttgtttcatcagccaaagagtggctaagtgagaaatatggtcagaatggtggtgatgaggaacctgaagaatctgaagcggaaaaagaggaggttattataccgcatggtgaagctgttactgtggagagctttctggcttggagagaacgctttgaagctgagttggccttacagcgtgctaaacttatgccagattcagctcttacagccacaaaggaaaagaaactcacgggacggcagtattttgaaactggaaggcatgcagtgaaaggagcaagcacagttgctgatgaagatgaagaagaggaggaagacattgatttcgatgatgattttgaagacgacgaagaggacatgcttgagcattatttagccgaacaatcagggaagtcaacagcttaaccttcttggccaaagaaagtaccttttcaggcacaactttaccttaggaagccaaatgtggctatatattgcaagtgtagagcccactattttgtgatgcctgttatcatttttgtatctgagtggatgctttcaagctctatcaagggggctgtggttctcattaatatatatatgctgaaggagtt

SEQ ID NO: 21193 - DNA, 753 bp, Zea mays
  Clone ID: LIB3279-182-E2_FLI
cgccctctagccttcgtgccgtctgcccgcccgccgtctagtcctctcttcgttctcttcctctcgcgctagcagagcggaggaggaggagaccaaccgggttggtggacgtgggcgggaggtgtgtgcgtgtgtcgtttcatggggcggacgccgtgctgcgacagggcggccgtgaagcggggcccgtggtcgccggaggaggacgaggcgctgcgcagctacgtccagcgccacggcagcggcggcaactggatcaccatgcccaagaaagccggtgagcgatcgagcgtgtgctccccttagcttgtgtgtatgtgccatatgtagctagcaagagccatatatgcacaggtgcactgacgacgggtcgatcgttgccggtcggcgtcgcgtgcagggctcaagaggtgcggcaagagctgcaggctgcgctggctcaactacctccgcccggacatccgccacggcggcttcaccgccgaggaggacgccgtcatcatgtccctctacgcccagctcgggagcaagtgagtactgatcgtacacatgtgaatccgagaagctcttcttccttcttcgatcctccaatatcttgagccgagcgcatgccatgccatgccaaagcgtctcccttaatttgaccgatcgacgcgcacaggtggtcgctgatagcctcgcagatggaggggaggacggacaacgacgtgaagaaccactggaacaccaagctcaagaagcgcctcctggccg

SEQ ID NO: 21194 - DNA, 1367 bp, Zea mays
  Clone ID: LIB3279-182-F4_FLI
ctcgccacggcacagcaatggcgccgctccccgcttccctcacgccctgcctctggctcttcctctgcctcctcgctgcgccgtgccccgcggcgcgggcggcgcggttcgcgtgcaacgccacggcgccgcgagcgtccacgtgccaggcgctcgtctcctacgcgccgcccaacgggacggccacgcccacgctggccgccgtgcgggcgctcttccagctccgctcccaccgcgcgctgctggccgccaacggcctcccgctctccacgccgcccacggcgcccgcgcccgtgccgctgcgggtccgcctgccctgcctctgctcggggggcgccggggccacgttccagcggcccacgtaccgggtccgcgccggggacacgctcgacgccgtcgcgcggggcgtcttcgcggggctcgtcacataccaggacatcgccgccgccaacaacgtctccgaccccaacagggtcgccgtcggccagcagctctggatccccgtgccctgcagctgcgaccccgtgggcggccagcccgttgtgcacttcacctacgtcgtgccggccgggggctccgtgtccggcatcgcggaggagttcggcaccacggaggagacgattctcacgctgaacaagatgcccgacgccaagtcccttctcgccggccaggttcttgacgtgccactccgagcttgtggttctgccattagcagcacagccattgaccgcaaccttctcgtgccaaatggaagctacatcctcaccgccaacaactgcgtcaagtgtggctgcagctctagcacctggcagttggactgccagccgacacagggactgagctcgtcgttctgccctgccgccaagtgcggagacatgttcctcggcaacacatcctcctccacctcatcctgcgagagcacagcatgctcctacgccgggtacaccaacagcacatcgttcgccatcctcgccaatgtgaccaccagcaacgtgtgtaacgctgggatgactccgacggcgcagccggctcactcttcggcgcttcggttggagccggtgtggctgagatggacggagctatttgccttgtctctcttgacgctgtcttgcttcgtctaggctatctgcggcaaagactgagcgctgttgccatgcgtatgtcgttagaatctggccctctgattcctagttggctagtttgatgttgtgagtaatatctgcagtgtttgcgcgacttcgatctgtagctggttggatttgtaagggcaaactctagggtaacactgatctgtgttagacggtagatcaggaaacatttgtacttcgtcaaacttttgcaaagataatttcttctgttatcaccat

SEQ ID NO: 21195 - DNA, 640 bp, Zea mays
  Clone ID: LIB3279-182-H11_FLI
gcccattttcgcgccaagcaccgaatctccgatggcccgcacgaagcagacggcgcgcaagtcgacgggcggcaaggcgccccgcaagcagctggccaccaaggcggcgcgcaagtcggcgccggcaaccggtggcgtgaagaagcctcaccgcttccgccccggcaccgtcgcgctccgggagattcgcaagtaccagaagagcacggagctgctcatccgcaagctgcccttccagcgcctcgtccgtgagatcgcgcaggatttcaagaccgacctccgcttccagtcctccgctgtcgccgcgctgcaggaggccgccgaggcctacctcgtggggctcttcgaggacaccaacctctgcgccatccacgccaagcgcgtcaccatcatgcccaaggacatccagctcgcgcgccgcatcaggggcgagagggcttgatctcccgttgttgtcgtccacgttgttgggcctttcctctgtgtctctgcttgtagaatccttgcttctgttcggttccttctgttcgcatgatggtgttcgtagtgttaggagttgcattttctaatctgcttgttcttgcaccggtgcctctgaagtggcgtttccccctatcttaatggaaatggaatgtgcttt

SEQ ID NO: 21196 - DNA, 1049 bp, Zea mays
  Clone ID: LIB3279-182-H8_FLI
gcctccaacgcgagctgcgaaagaagagcaggggcaggccaaaaccaagcgaaacaccagctgcgtgcaccaccccctctacggacccacccacccacccacccggagcgaaggggagacagcagcagcagcagaagccgcgcgcgtgcaaactgcaatgggcaacagcatcggcgggcggcgcaagggcgccaaggtgatgcagctggacggcacggcgttccgcgtgaagccgccggcgtccgcgggcacggtgctgcgcgaccacccggggttccagctgctcgagtcggaggaggtgaagctgctgggcgtccgcgcccggccgctggcgcacgacgcgcagctccgcccgggccgcctctacttcctcgtggcgctgccccggccggccgccccgccgcgccgcgcctggtccggcgcgctccacgtcggcgcgcgggagcggctcgagtcgctcatgctcacgcgccgctccacctccgacctctccctcgccgcctccgcggccacgggcacgggcacggcgccgccgtccccgctctccacggcctccgagggcggcgggcccgtccgcctccggatgcgcctgcccaaggcggaggtcgacaggctcatggccgagagccgcgacgccgccgacgccgccgccaggatcatgcagctctgcgccgccgccacgcccgaccggaccccgcgcttcgtgcccactccggactggggcgctggcgccgccgcgttcccgcagacgcccgaccggagcccgaggttcgcggcgacgcccgactggggcactggcttcatgatgccgccgggcgctgcggctgcgccgacgacgccggagaggtggcccgcgctgccccgcactccggagtacgcgtcgacgggcgttaaggctagccggaaagaggtaacgcacagcgccacggcctcgatccctcctcgcagattactgttgtggaacgtacaattcctagattgcacaggcatctcgccgttcgcctctgttcttttttttttttaaaaaaaaactagtttataattatgag

SEQ ID NO: 21197 - DNA, 959 bp, Zea mays
  Clone ID: LIB3279-183-B6_FLI
gcggtggcggcggcttgtgtgtgcaaactcctgtacggcgtctcacgcctcaccccaactcgctcccttccccgtgcttcccgccgtcgtggagaggtcacgcggctggttcccgccgcttccggacgggttccgagggaggaggatcagctgccgcgatgttcctcaggatctctcgtctcggggcgcggcttctgcgcgagtctggagcggagacgagagctggaaatttgctaagcagtccaggcattttgtatcaagctcatcttaaccagcattcgaccagagtgcggaatgtccttttctcaactgcaacaagtggtgatcaggatgaaagcagtcaggcaaaggataaaatctcggtaacatttgttaacaaggatggctcagaaaagacaatacgtgttccagttggaatgtccatgttagaagctgctcatgaaaatgacatagagcttgaaggagcatgtgagggttcacttgcgtgttctacttgtcatgtaatagtaatggatgtaaactactataacaaattagaagatccagcagatgaagaaaatgatatgcttgaccttgcatttgggctcacagagacatctcgcctcggctgccaagtgatcgcgaagcctgaactcgatggtattcggctggcattacctgtagccacaagaaacttcgcggtagatggctatgtaccgaaaccacactgaagacagttatgtacaccacactgaagacagttatgtacaccacactgaggcagtcatcttggggggcacggattcgtacaagtcaattttgtagtttataacctgtataacctaactacacctttgctacttgtagtcggggtagcttaggactaccttgttgagggagggttcgttcattgatgaacccctccattactcccagataacagtgcttccttcatctgggcgaataaacatctttcgttt

SEQ ID NO: 21198 - DNA, 1738 bp, Zea mays
  Clone ID: LIB3279-183-C3_FLI
cagagcggcaacatacatcgacatgttttgacaaattcctctcccccgactgagatcactgatccagtgcgcgtgccgccggcgccatggccgcgccaccgccgtcgccagaccaaacctactagcagcgcgtcgggggtgcacctgcggccgatctaggagacagggatttcttctcgtcctgtcctgtggattattacgggcctggatttgcttgggagtgagaggagagagcgagtaatagggtgaaggagtcttggggagaagatggctgcggaaatggtgaaggcggcgacgagcgacaagctcaaggagatggactgggcaaagaacatcgaaatctgcgagctcgtggcgcaggatccggggaatgcgaaggatgtgatcaagtctataaagaagtctgtagggagcaagaacaagagcactcaacactttgctgttatgctattggagatgcttctgaataattgcggagagcctgtccataggcaggttgttgataatagccttcttccaatacttgtgaagatagtgaagaaaaaaacggatttaccagttcgagaaaaaatatttcttctgttagatgccacgcaaacatcccttggtggagctaaagcaaagtttcctcagtactatgaggcatactatgagctggtgtctgctggtgtgcaattttcaaatcgcccaaatgttgttgtcacacgagcagaagtgccagtcccagaaacgagaacagaaccaaataatgtgagtttatcggcccgattgcatgaagctcaacaggaagtgcacactcagcctgctctggatacaagtatagtccagaaagcctgtagtgtcatggaagtattgagggatgtgcttaattctatggatcctagacaccctgagggagcaacggatgaatttgtgttggatcttgtcgagcaatgtacgtttcagaagcaacggatgatgcaccttgttatgacatcaagggatgaaatggtggtgtcacaagctatagagctaaacgaagagctacataaggttctcgtccggcatgatgtgttgctctcagttcatccgacaacaacagtagcttctaatatcaatgaggaagagaatgctgaaagtctctatcggagactgcggaaggggaaagctctgtcacaggactacacagatgactcggtaccgtcgttccggtccatgcccgaggacaagctgcggcggctgctgaccatccaatcacctcaccctgacaagagactgggcgcgctgaacatccacttgccggacggtgaggagccaaggcatgatcccgctccgctgatcccgccgccgcccgcaaagcacgccgagagggagaggttcttccaggagaagagcatcgacgagcatcgacggcggagtggccagcctgccgggtcacctgaggggcctgtcgcagcacagccgggacagcagcagctcgtgtagcggcagcactgattatggcgactgaagggggagcagtggtacatataggggttcccttcttgggggttgttggtctcccacttggccaggcaggccatacattggtgttgcgccggagtttggcttggccgtgagcttcttcttcatgctgacctgtgtacacttggtagcattttgttcctccttttcacctttgccgtgacattattgggagaccgttgtgttggtggcggtgtgggttcttttctttcagatctatagatgattgtgatct

SEQ ID NO: 21199 - DNA, 1164 bp, Zea mays
  Clone ID: LIB3279-183-E11_FLI
ttcgtgatgatatatttccagatccggtttgtccgacgcagatggtagggctggagaggctgccgatgtgatgcatgaattttgtgttcgtaacgtggattggtgtggggtgggagaggctcctttgccggattggccaggttaccattgtactgttgtagcttggcagttggttgactgtgtgacaactttgagctatgtcatattacgaaagaaggggtggagacaggggtagtggccgtattcaaggaagtggtgggcgaggtggacatgtcctgcgtggaagatcaggattggctccccgaggacttcttggggttaactcccgtccatctgcacgcactattgctaagtcatttagcagaaccaaagacatgacatggcgacctgatctatttagtgatagcatggcggctagtggaatagaaactggtacaaaattgtacatttcaaacttggactatggggtctctaatgaggatataaaggagctgttttcggaagttggtcatttgaaacgctttgctgttcactacgatggttatggccgcccaaatggcactgcagaggtggtgtttacacggaggagcgatgcaattgctgcactgaagcgttataataatgttctacttgatggaaaagctatgaagatagaagtcatcggaaatgacttaggattgcctatgacacctcgtataaatgttgttggggcttctaatggcagagctacaagaacagttgttatgacgcctgagtttagtcaacgtggcagaggttcaagcagtagacctctaagcaacaggtttaacaaccgtggtggtttccaagctggtcgaggccgtggccagttccagagctgggggagaggccgtggtcagttccagagccgggggagaggccgtgcccagttccagggacgagggagaggcaggaagcctgagaagactgcagatgagctggataaagacctggaaagctatcacgcggaggcaatgaaaaccgattgattgcaaggccggtagtgccacaaggttgtggttttatccatcattttctgggagcaacgaacatgctttgtgctttggtttcaggagactagactcttgtagtaaattcgaacaaaagattgccagtttgtagtgtttgcatgaagtttgcaacctg

SEQ ID NO: 21200 - DNA, 780 bp, Zea mays
  Clone ID: LIB3279-183-E12_FLI
atatctctcaccacctctcccctcagcttctccccacctttggtcaggcaggctcaggcaaagggggcggccaacaaggacgagcgatggcgaccaaggtcatctgcttccttgtgctcgcatccctgctcctcgccgtcgcctttcccgtgtctgctctgcggcagcaggtgaagaagggcggcggcggaggcggaggcggaggcagtgttagcggaagcggaggcggcaacctgaatccctgggagtgctcgcccaagtgcgggtcgcggtgctccaagacgcagtacaggaaggcctgcctcaccttatgtaacaagtgctgcgccaagtgcctctgcgtgccaccggggttctacggcaacaagggcgcctgcccctgctacaacaactggaaaaccaaggaaggagggcccaagtgcccctagaagatccaccgcagctcccgtccgccattgtcccctcttctccgaatctggaacgtgttgttcatcttggaccaccccctaggcttggcattttattactagtataatgctagtgtccgcccattgcttaatctggaatgctaccagccagatctccatgctctcctgtgagccactcggcagagtgaggattactaggtagggtggcatgtcatgtgctccactctccactggtacgagtcaaatcaactaaagctacccccggattgatgaggaacatcccgcgcgattagtggggcatgtcattacattcatcagcttctatatatatgaactagataaactttttatc

SEQ ID NO: 21201 - DNA, 1978 bp, Zea mays
  Clone ID: LIB3279-183-H6_FLI
gctcggagcagttgctgcagctgcaacccccctgcgcctctcttctcccggtcccacccgcccctccgccgcctagggcttccaaatcccctcagcttccccggattccgctttcccccgtcgctgcaaggttccgggaggttctaatctcctttgagcgccgcctgcccgccgtggctgtttctcggtgttcaccgcgttcctccgtgcaatgccgggcctaaacgcggctggggttagggttcctggcccgcagctcgcttcaatttgatttttttggaggtttttatagggaggagaaagagtccggatttcgaggagttagtggttgcgtgattgtctcggcggaggggaatctcaagtttcgtggccggggttttagcccgtgtggaatgaaaacccggtaatttttgaatttttgggcggtaaaaccctgctggttagcctggtgtggtttccatggccggggcgccgagggcccggtccctgaacatcgcggttccggaggcagaggcgaggccggtgctggtgccaggaggcaacaaggccaggtcgggcccggcgaacgcccggaaaccgtcgccgaagcccgtgaggaaggcggagccggcgccggcggggacgccagaggagactgtgcccgccgcgaccaaggcggaggagggcgcaaagaggaatgcagtcggcgggggtggaggtggcgcgcccaagggtgcgtccccggtgccgtcgccgcggcgcacacctcctgggccgccgtcgaggaggaacgacgcgccgctgtcgcatccgggcttgccgctcagcgcgtcttgctcctcggatgcatccgcggagtcggtccgcgcccggcgggctttcaccgggaaagtagagaagggccggtcggtgccgacggctcaaccgaagcaaggcaaggctgtgggtaaagcggtggagagcaagcccatccgcgtggaggttgttgctccgatgacagtgacaccagaggctgtgcaagggaagaggaggtgcgcgtgggttactccaaccaccgatccttgctatgtcactttccatgatgaggagtggggagttcccgtgcacaatgataggagattgttcgaactacttgtactatctggtgcattagctgagcttacgtggcctgaaattctcaagaagaggcaacttttcagggaaattttcatggagtttgaccctgctgctgtctctaaaataaatgagaagaagcttgtggcacctggatgcgttgcccattctcttttatcagagcaaaagctccgagctgtacttgagaatgctcgccagatactaaagatcactgatgaatttggatcctttgatcggtactgctggggttttctgaaccacaagcctatagtaagcaagttccgctatccaagacaagttcctgtgaagagccccaaggcagatataatcagcaaagacatgatgagaagggggttccgaggtgtgggcccgacggtcatatattccttcatgcaggctgcggggctaacaaatgatcacctagtcagttgcttccggttcgagcattgcagtgccgttccaactctttgcgcatgcgacatcgacagggcaaacacgaaggtggatctaaaaaaagatgaggtgacagcgaagatctatcgcgaggaggtaatcgcaaacccagagatgctgaggacgatcgatgctcttaccgtttcgtagcaccatgtgcatgtgggaatggaagagcaacatggtcgctgaacttgtgtcatctcttatgtggacagtgtgctaggctatcctttgcattgaggtcaggaatcaaaaaaatgcttattatgtaaaaaaatcgttctgttgctaatgcttactctgttgtacattgaatggttgggggaagctaaggatggtggccttttcttactgatccagaaactgtcaaattacttgctgtcaataattcagcagttttttcctgacc

SEQ ID NO: 21202 - DNA, 824 bp, Zea mays
  Clone ID: LIB3279-184-A11_FLI
gcagcccccaaggccccaactacccccagtctcggaagagaactatccagaagcgcaagactccaaagccgtcgccttcctatccatcccttcctcgccacgggggtcgcctgagatcacataaacaatggtgaaggctgttgctgtgcttggtagcagcgatggtgtcaagggcaccatctttttcacccaagtgggagatggccctaccactgtcaccggaagtgtctctggcctcaagcctggcctccatgggtttcatgtgcatgcgcttggtgacaccaccaatggctgcatgtcaactggaccacactacaatcctgcgagcaaggaacatggagcaccagaagatgagaaccgccatgccggtgatcttggaaatgtgacagctggagcagatggtgttgcaaacattaatgttaccgacagccagatcccactgactgggccaaactcaatcattggcagagctgttgttgttcacgctgaccccgatgatcttggaaagggtggacacgagctcagcaagagcaccggaaacgctggcggccgtgttgcttgtgggatcatcggactccagggctgaactgaaacgaatggtcgctggacttcgggggcgcctgggagtgccgtcaccactcaccagcaggctagaataacatcccgagacatcgtgaaataataataataagagcgcctgatatgtgatcagtggtgtactcgccattaagcacctgtggcaaccgatgagctgaactgtgttggactgttggataatgctggttcgcctgagcatgtgttacaagtctgtcggttttgatggc

SEQ ID NO: 21203 - DNA, 454 bp, Zea mays
  Clone ID: LIB3279-184-F4_FLI
tctttcttctttagttgcaagttttgaaaattaaaggctttcctttgagtggagttcttatgacaatcatttcaggaattattggatgcacaaaagttaagatactaccttaaatgattgtctttctctatggtttcagtgcattgattctaatgggaaagttcgcataactgaaactttgccgtggatcttgtgaattttagtgggaatttgatcgtggaaagtttatgaagttttgttgggattatggatgcataagatagtggtgtatgtgatttgcccatagtttctgcagcctcattgttttccatttgggatcaataaaacttcatgctcatggatagggctgatacatcaggttttgtcagtggtggtatacattacatgaacatccatgtgtattttcattttgtgtatactatgtgcttcctcagtggtgaagttgtaaagctgg

SEQ ID NO: 21204 - DNA, 803 bp, Zea mays
  Clone ID: LIB3279-184-G5_FLI
gcaaatgcactcttaagctatatatgtgaagtgaatctgaatatgagttagttatatgtctgaaaaaataataaatcaagatccattcaaaaaccgtactatttgggagtaaatataacaaaaattataagggtttagacttatgacgaggcacccaggtttaaacataactctgcaaagggagaaatatgaatgtatagagaacaaatggtgcatcctcattccttgaagaataggagaaacagcaagctgccagtccgcatcaacctccctcctttaagcacatctgttgtgtgaacatgaagctgcaaacactgatacagtatcttttgttgcctccactgccagacccactgccaacagtagctttgtttctatgttccaggatgctatgtaaggccatgaagaaatcattagtagcagaatgcatatgggaaatcaggaagtgagacaccctaatattgaactgggctaccaaagcagttctcaggatcattttgtggaacaatgtagcacagtagttttttttcagtgagataagggctcagttaaatggtgctgaaaaggcacctgggtgctcaattttaagaaaagttacagcagactgaaaacaaatccatcttcattacctatgtgcagtctgtcaaacttttttgttcacgaacaaaaaataaagaacggttcctctagaaaagacatattcatggacttatggttagacagttcgagaaaatttccatgatatataaaatgcacacaaaatgttcctattattttatttgaaaatcacagatgttactccc

SEQ ID NO: 21205 - DNA, 1534 bp, Zea mays
  Clone ID: LIB3279-185-B11_FLI
ctctccatcgcgagctgcgaaagacgagcagagggagggagggcaaagcgaagagaaacacaaccgcgccacccacccacccacccacgcacccggagcgaaggggagaccggccgcaacagaaggcagagagagctagagccgcgcgcggcaatgggcaacagcatcggcgggcggcgcaagggcgccaaggtgatgcagctggacggcacggcgttccgcgtgaagccgccggcgtccgcgggcgcggtgctgcgcgaccacccggggttccagctgctcgagtccgaggaggtgaagctgctgggcgtgcgcgcccggccgctggcgcacgacgcgcagctgcgcccgggcaggctctacttcctcgtggtgctgccccggccgtccgtcccgccgcgccgcgcctggtccggcgcgctccaggtgggcgcgcgggagcggctggagtcgctcatgctcacgcgccgctccacctccgacctctccctgccggcatccgcggtcacggccacggccacggcgccggcgtccccgctctccgagtccgagggtgggcccgtccggctccggatgcgcctgcccaaggcgcaggtcgagaggctcatggccgagagccgcgacggcgccgaggccgcagcccggatcgtgcagctctgcgccgctgctaataaccccgccagcggcgccgccacgcccgagagggggatcctgcggacgcccgagcggagcccgcggttcgtgcccactccggactggggcgtcggcgccgcctcgtccccgcagacgcccgagcggagccccaggttcgcggcgaccacgcccgactgggggactgatgggttcatggtgccggcgggcgctgcgacggcgcccaggacgccggagaggtggcccgcgctgccccgcaccccggagtacgcgtcgcccaacgtcagggccagccggaaagagaagcgaacgcggttcgtggcgctgccggatgagataatcgcgtgacttcttcttcgtctctcccgcgcgcgcgcgcgccgggatgaaacgatcgaggcctgcggttgcttgatttggaggagcgtggcaagcaaaagcatgatgtgctggggtgacgatcagagagcccagaagatgtactagactgattgatggtccgcagcagggtcccagacgctctgtcccgtggttggtcgttttcctcggttgcgagcgagccggggaagagcgcctgctgtgctgccggccggcccacgacggtagcggcggcagctccctgtcttgcctccgacgacgacagggactcaagtgtgtcgtcttcttttttttcttcttcttctactgtggtctgtggtctatgtatcttctacatatttaaggctatcttgctcgtcctctctagatgttgtaggttgctgaagaagcttaggatataaatacttctacatgtatatgaaaacacttgcggaggccatgacagtagccaacagcttcgcgtgtcatcgtctgcgtcgtttaattttactctagcattcgtctc

SEQ ID NO: 21206 - DNA, 1250 bp, Zea mays
  Clone ID: LIB3279-185-F6_FLI
gccgccgttgccgtctcctcctccgacccatcactctctgctcgcgcactctcacctgcccgcgccgtcttcgaccgccaccaagatgaacaaggagaggctcatgaagatggccggcgccgtccgcaccggcggcaagggcaccatgcgcaggaagaagaaggctgtacacaagacggtcaccacggacgacaagaggctgcagggcactctcaagagagtaggggtcaacaccatccctgcaatcgaggaggtgaacatattcaaggacgatctcgtcatccagttcttgaaccccaaagtgcaagcttccatcgcggcaaacacatgggtggtcagtggatctccacagacgaaaagtaagaatactcattcctcgttttcatttgatgtactggtcatgtggtaacctagagctataccgttttccgatcagtgggtgttatatctatatggtcattggttgcccaagtacagcagctaggctttgcaaaaatccttatgagatgtttggaaatccgaaatctggattactagtcttctcacctacaggattttgcagctggttaatctgaacatatttctaggttcttctgtttcttcaaaactacatttttattcagtaagttgctatctgagtggtttctaaaatgttgtacatgctgtaaatccattggtgctctttgaatggcaatgtttctgtttcattctattcttttttaaacagctgacttattgaaacctttatttattgtgtttgtacagagctacagtatgttctccctggtatcattaaccagcttggccctgacaacatggagcacctgaagaggattgccgaggagatgcagaagcaggtggctgctgccggtgcggcagcacaggtcaaggaagataacgatgacgatgttccagagcttgttcctggagagacttttgaagaagtagctcaggagacaaaagcctgatcataggctctaaatagtgaaatgttactgcaccaatgctgtgaggtcatggttttcgtgtgatggcactcttcttcctcccctcctaggccagccccagccactctttgtgttcgctgttggaaacttttagtttctccatctcaagcttttacctaaggttgtgcatgttgagatgccatggaaatccattttgctgattatttggtttgtggtcggttcacaacattacatgtgcaccaggttttgctgggttatcactatataatgtttgtgtagtct

SEQ ID NO: 21207 - DNA, 825 bp, Zea mays
  Clone ID: LIB3279-185-H6_FLI
gctctttcccttctcgcttcaaaccaaaccaaaatcggagcggcggagcaaaacgatccgtagcctcgcttaccttcgattcagctcgaccagggcactaaccgggaagccaatgccgcgcgagtcgcgagatctgtagcgccaatcggcttcaccggcggcggggtgggcatggaagcgcagaacggctcctgcggaggggcgcccgtggtgctcaacgtgtacgacctgacgcccatgaacaactacctctactggttcggcctcggtattttccactctggaatcgaagttcatggtatggagtacggatttggagcacaccagtttccggcaagtggagtattcgaggtggaaccgaaaagctgtcctggtttcatctacagaagatctgtgtggatgggcacaactgacttgtcagagcagagttccgctcgttcattgaaaatcttgctggaaagtacaacggcaacacgtatcatttgatttcgaagaactgcaaccattttacagatgatgtctgtaagagcttgaccaagaaatcaatccctgggtgggtgaataggctagcaagagtgggttcattttttaattgtcttctaccagaaagcatccaagtttccacaatgatgatatggattcggtatcttcatcggttcttggagacagtgatctgggagagttagaccaacaccttctgccatcgtcaactgctgacgtccattctatagacgtgccaccaaatctagccaaggatcttctctgaattatccaaccctttggattccacgtagcaggatagcttaaattgctgcagttgatgtc

SEQ ID NO: 21208 - DNA, 551 bp, Zea mays
  Clone ID: LIB3279-186-C2_FLI
gagaaaaggctacaagcttgttgccatcaagctgattgtcccatccaaaggattcgctgagaagcactaccatgatctcaaggaaaggcctttcttcaacgggttgtgtgacttcctcagctctggccctgtacttgcaatggtttgggaaggagagggtgtcatcaagtatgggagaaaactaattggtgccacagacccacagaaatctgaaccaggaaccatcaggggcgatcttggcgttgttgtgggaagaaacatcattcatggaagtgatggcccggagacagcaaaggatgagatcgccttgtggtttgaacccaaggagctggtctcttataccagcaatgcggagaagtgggtctatggggtgaattaaccagcgactaaatctcttgaggtttgcttttttcttttcagttttcacataattgccgacagaccaaggcaggatgtaataaagtagctaccgtcacctattacttttgagttggattgattgtggtgcagtaaggcacaaggaaaggaaggaatacaccgtgaaatttgtt

SEQ ID NO: 21209 - DNA, 1161 bp, Zea mays
  Clone ID: LIB3279-186-D9_FLI
caacctcctcaattcattggcagatgattacatctgtctattggcgtctaaaagaccatcccaaactcgattatatctcttcgcctacaaccaaatgaataatgagattcaataaaacattatagtattgaccgttactatttaatgttatttacactaaaacatatcggatcatgtatcgtacataatcgatggcgcggacgtaatctactagtgccataatcaatgttgctcgtgtcgacgatgcctgtgcgcctactcccatcaatcagcctagtcccatttgcagcttctgcgacatctttgcgtgtgccggccctagcaggtcctgatccgataggagtggatcttggagatttctccatggccacgggtaagcaacctacaacgggggtcgttgggaatgggaagagaacaggggcaccatagaggatagagcgctcgagaggatacctaggcaggaaaggagacaaggccgaggaccagggagaggagcgccgaggagcgccgtcggataagactacagaggagctccagcgccgggagagaagagcgtcgggagaggagctccaacgccgatccgttctaagaaatggggcaataagatggactgctataacaacgcgtactagtagctcgacatcggctaaatcacactccgatagcaaaaaaccaatgttgaacggattataataataaaactccaattaaaatgtttgaaatactattttttagaagtccagtcttggtgatacctggttccaaaaagctcgtcgggaagaggagcaaaacaagggcgcaaaacaaaccctatctaaaccgcggcggactcttcgtccagcaaggtttcccatccagatccggccacgccacttgctcctcttctccgccacaccgatggtgtacgtggattcctgggacgagttcgtggagcggtccgtgcagctcttccgcggcgaccccaacgccgtacgcccgtcgccggatcccctctcctcttctctgagtttcttcctgcttgtccgtgtgtccgatccttgcgcgtttctctgcagacccgctacgtgatgaagtaccggcactgcgaggggaagctcgtgctcaaggtcaccgacgaccgcgaggtactaccttgtccaagctgtatttactcagagcaga

SEQ ID NO: 21210 - DNA, 818 bp, Zea mays
  Clone ID: LIB3279-186-E3_FLI
gaaagaagaaaggcatagcagcgggcagcggcatgggcaccagccccgtcatccctgcgacgatgctcttcgtcgctcttcttgtcgctgtctgcttcggcgccaccgccgccaggtccagccacgcccgccacaccgacgccgacgacgcgattcgtctccccagcagctttggcgctggtggtcgaccgtggaattgctgcgactccgctatcaaggacgcctccctgccggcgtggcgctgcaacgacgtggtggacaagtgctccgccgactgccaggactgcgaggcgtcgccggccggcgacggcttcgtctgcggtgactttatcttaagcctgaccgagcccccggtctgcacaccgaggccgtgggactgctgcgacagcgtggcctgcacaagggactacatccccaactgcatgtgcctggacaaggtggagtcgtgctcgagcaactgcgaacggtgcgagtttctgtatcattcggaccctcctcgcttccaatgccgagacatcttccacggctatcctggtcccaagtgcaggacatggatcagtacgagcaactagctcagctcagctacttgctaaaagtagcgtagcgcagcgcgcgcggctacttgctagtatacgtacgtccacaaataaaaataaaagtggctagcgtacaaagctaacatctggttgttcgtcccgacatggacgattagcctagctcgatcgctagctgctgccactctcgttcgatttaatttcatccccatgtgtggcggtgtagggagtgtggatatgatcatccaataaagtagtctactg

SEQ ID NO: 21211 - DNA, 2134 bp, Zea mays
  Clone ID: LIB3279-186-F4_FLI
ctgctccccctcccccgcaccagcctcaaggcatcgccggcgccgcaacatcgctgaggaagcccgcacccctgcccggatccgatggccaacagcaacctcccgcggcggatcatcaaggagactcagcggctgctcagcgagccagcaccggggatcagcgcgtcgccctcggaggagaacatgcgctacttcaacgttatggtccttgggccggcgcagtcgccctatgaaggtgcaagcttctgattcggatttttttatgcgctgttcgtgctgtgtggtgtggtgactagagtggtaatattggagtgcttccagatatcgatagtcgagtcgaatcgaatcgattcttttcaaaagatgccactggaaatggcagaaatgctgaaatgtttgctctagtttatgcgcacataggtaagcttgtatagtttggtcggctggtgacttttggcttgtcaattttagtttttgggcggtattgtggctgatgagtcttagcttctatttgcagaattctgttagctatgttgaagggcaggtaatttgagtaatgttttgcactagtatagtatgtgatagttattactagttttgttttatgtttgctgtttttctgcatatttgtgtagggaacaaaagtcattttttatttcctagattatagttttctgtagactgtagcttctttggatgaattggtaataatatattttgttccttccatgatcgattagttcttatccatgtatgctgtgatgatctccttactctctgatttgtttaagttgtaatatagcagattcacttgctaatctctttttcggaggcaaggactaagaaagacactagtatgaaccttgggaaatgggttagttgatctcgattctaaaatggtagtgaatgaatgaaacataccactggtaccagtggaaaccggttcttaaggtggcaaggggatacatggtgagccatcctttccaatcatctaggcctaggcacctgtaaggtgaagcaaggtgatactctatgccataggataacaagggggctggcccagcccagcagacagcttatataccactcggtccctgattcatcttctagaaccgccagcgacgctgccccccctcagccccccctctctctctgcacctctctctccagatgtgctgcctgcaagtgctccctgcctttcctcatcctttttgttccgtcttgctgaccagctcacctcccgttcttcctatcttttccctccctccatccatctcttttgctgacctttttttgtcgtggagaccaggatacccagaaggtcagaatcgcagtgtctcattgcctaggcgataccttgaaaaccatggtggaactcacttttacctggcttagtggactattatgttcagctcattatgtgtgttgtagcaatcaccacaatacttttgcttgtactggggatatttgtgacacctaattggtttccttgtaagttgcaatcatacttagttactgacaatgttactttcgcttattgattggtcaggtggagtttttaagcttgaactctttttacctgaggaatatccaatggctgccccaaaggttaggtttctgacaaagatctatcatcccaacatcgacaagcttggtaggatatgcctcgacattctcaaggacaaatggagcccagcacttcagattcgaacagttcttttgagtatacaggctctactgagtgcgccaaatccagacgaccctctttcggataacattgcaaagcactggaaagccaatgaagtagaagctgtcgaaacagctaaggagtggactcgcctgtatgcgagcggtgcatgagaacgcagtgatgttcttgatgtaataacccatcatacttcagtcctcatctattgccatttgcttgataaaaaataggctggagatatttgccatggaatgaagtctctacatgactatcactctgaattgtttggttgtacacctgtggtcggttccctttaccttggggcacctttgacaaatcagtatctgtggtagaacttgctgatactgtaatatatttgttacttcatgtagaagagcttctcaactgtccatattgttgaaactg

SEQ ID NO: 21212 - DNA, 1438 bp, Zea mays
  Clone ID: LIB3279-186-H9_FLI
gctgtccctccccttcccaccgctgcatgggcaaagccttctccctgctccggccaccgcaaccacctcgcgaggacgacacggagatgatggagctgaggaagcgcccgaggccccggcgcctcgacccggacttcctctcgtccccgcctcctatgccgccgaggaagcgggcacggaagcaggcagcggcgccgaagccggtcgaggccgcgggcgctctgaagtggcagccgccgaggaagggctccaggcgcgccacggtgggcatcgggtgtcccgtcgctgggctccatcctgcgacgtgcggccggcagccgccgctgcgcatgtcgacgcgcgtcctcttccgcccgcgccatccattcaactggtacgagccggacctgtggacggaggtggctaagcacctgtgcggcttcgacctactccgcctctccttgacctgccgctggttccaccgcctcctcgccgacgactccatctggcgctacgccttcttccgcgaccttaacctcaccgacgccaacccgcacgttcatcgcccgctctcccgctcctggcgctacctctactttgccgccttcgatggctcccacgccttctcgctctgccagaacggcgagcaccgaagttcgtggcggatcgggtcattcgtgctggactcgccgcacatggtgctgatcgggaagctgccgctgccgaagtggctgccgtcgtgtcccgaagacgtgcggctcaccatcgcgatactgggcgcctgcaagctcctcaacgtccgccctgggatctggatcacggacatgcatgtgatgcgatgccccttgtgcaaacggaacagctgccgagggaacaagcagatcctggatgcacgccactctgagctgttcctggagaaggcgtactgggacgagaccttggagtacgagagcctcggcgagcactttcaggacgaggaggtggccgccgccttctgtgccgttgtcaacgcgaagcagttcgcttccccatccactgcatctgtcctcaacagggcctggaccggaaagcacgacgacccgatgaccaggcactgtgcttccgcaaccgccgctgccatccacaccaacctccagagcaacggaggactactatcgacgtttgaggcgatgcgggacacggccagggacgggcagatcgtgtccatacgcatctcccaggtgctcttctgatctgtacccaatgctgccttggctgctgtgatttatgatggaagtaggcctggccacactcgttctttttttactgctattgatgcatttctgtctagattggactgcagagagaaagttggggcagatttccggcttcaatttatgtccttattagtagtatattgcacacgtactggaatctgcttgtttgcttaatggctataccacgaacgggttttgtcact

SEQ ID NO: 21213 - DNA, 1613 bp, Zea mays
  Clone ID: LIB3279-187-C5_FLI
gtgaccccgaggcccgagcccgaagcggcggcgcgccgggcgtcttgacgtccccaatgacgccgcgcgtcgtggacggacctccgcagcttccctctcgtccgttccgcagtccgcacggggaggggagctacagcgacctaccgccgaggcgggccccaaccgcaccacgcctacttcaaaccctctcccacccccacctcctgccgttctcggaggggatcaagttcgcttctgcctgcgtgctctgctggagagctagatggcgatgccgtccgggtggaggggtatcctgggcttccactacggcatcgtgcaggcgccgttgggccccgacatctccggccccgagctcgtcgccgccgtggcgaacgccggcgccatcggcctcctccgcctccccgactggccggcgccggatcacgtcagagaactgatccggaagaccaggagcctcacgtccaagccgttcggggcggccatcgtgctggccttcccgcacgaggagaatctcagggtcgtcctggaggagaagctcgacgtgctgcaggtctactggggggacttccccaaccaccgggtccaagaggcgcatcgcgccggggttaaggtcttgcatcaggtcggcagccttgaggaggcagctaaagctaaagaagccggtgtagatgggatcattgttcagggacgtgaggcagggggtcatgtaattggtcaggaaggactgtttccactgttgccacgagtagtagatcttgtttcagactcgagcattccagttattgccgctggcggaattgtagatggacgtggctatgttgccgcattggcactcggtgcccaaggtgtttgtttaggaactaggtttgttgctaccgaggaaagctttgcacatcctatttataagcaaaagctaatcgagatgagtcacacagactacacaaatatattcggacgtgctagatggcctgatgctccacagcgggtcctggaaacacccttctatgatgagtggaagaataatttcccagaccaggaaacagaggaagatcaacccatcataggccactctatcatccatggtgtgcacaaggatattcgtcggtttgccggtactgttccaaacgcgacggcaacaggagatatcgacatcatggccatgtattcgggtcagggtgttgggctaatcacggagatcataccagctgctcaagttgtcaaaagtctggtcgctgaagcgaaggaagtcatcagagaaaagctttctggttaccaatagaatccttcctgaactgcaaactagaagtatctgtgtgtgagtagtcaccaatcagaataatcggaagcaccaaggtttaggtttgattcttgtgctatttttaagtacaataaagtaaaaaatgatgaaaataaacgagactaacaaaggtattctgtcagacatttgtgtgcgtgtgtgcgcgctctgcatatctgtaatagttttggagtgtcttcacatagccctgaaggtcttcaaaagggtatttttggaggataggttgcaaaccaaacatatgtgatttaggtttggatgttggttcggtatgtccatcaatccaaacatgttttac

SEQ ID NO: 21214 - DNA, 1533 bp, Zea mays
  Clone ID: LIB3279-187-G3_FLI
ctcgcctctctttcggttctcacggcgacgactgggcgagcgccgcctcccctccctcgctccgtgaggtcctcgccggcgacgagtgccgccgcccgtttccatgtattttccgccgattagtgtccaccagatctagtgaaggctggtaacttgacgcaaggggaatatagacacagaattttttgaacattgatctgtagccagtgctgcaatggctacaaagcttgtggttctcggtatcccctgggatgttgacactgaagggttacgagagtacatggccaagtttggacccctagatgattgtgtcgtcatgaaggagcggtcttctgggcgatctcgtgggtttggctatgtaacattcgcatcagccgacgatgcaaagaatgttcttgattgcgagcatgttcttgggagccgtacattagaagtgaagatagctactccaaaggaagaaatgaaatcacaaggaacaaagaaagctacgaggatatttgttgctcgaattccacagtcagtggacgagtcgatgtttcgtaggcattttgaagcttttggagaaattcttgatctttacatgccaaaggaacatggttcaaaggggcatcgtggaattgggtttatcacgtttcagagtgcagagtctgtggacagcatcatgcaagagtcacatgagcttgatggcacaacagtagttgttgatcgcgcgactccgaaggaggaagatgtaagataccccccgagtagaccatctcagggtggctatggtgcatataacgcatacatttcagctgctaccaggtatgcaactttgggtgcaccaacactgtatgatcatcctggatcagcctatggaagagggtactatggatcctctcaagcagtgggcaagaagatatttgttggtagacttccacaagaagcaaacacggatgacctaagacattactttggcagatttggtcgaatcgtagatgcgtatattccaaaggaccccaaaagaagtggccaccgaggttttgggtttgtcaccttcgctgatgagggtgtggcagaacgggtatctcgtagaagccatgaaattctgggccatgaggttgcaatagacacagctgcaccacttgagaatgattcagctggtggtggttatattgatcccatggatctttacggagcttatggttcaatgagatcttttggcaggttctgcggtggtctagattataattacggctatggccccagcagcggaagcagcagatcaaggtcggattggcgataccgaccttactgaacgtgttttagtttttacctctagggaaggaaactgaggagatggagaaaagaattacctgtctaagaatgctaagtgaggggggtaccttacgcgtggaatctatcaatttgtttcatgttgtgattttggatttgtcgtgattcacattattgacacaagatgaaggcagtccttgtagttactgtatggaagtgctgtatgtgtaataaaaaagtatcatttgcgaaagaagt

SEQ ID NO: 21215 - DNA, 476 bp, Zea mays
  Clone ID: LIB3279-187-H10_FLI
ccgaagtcgaagatgtttatatttagatagccatttaaataaactattatatcaattaagaacaatatagagagtcttagaggtgcactaatatcttccctagccaagtttcccgctttttaacgagccgacagccgagacatgccagctagacgtccagcccgtcacaaaaggcccatctcactgaagagatacgctggtcggcttgtgggcgcgtggcttgtgggccgtgggcttcttcgctgttcgtcgtctcgtcaccactcaccattgccgacgcaagctgcgactgaacctccgtggcgacggaggagacggccatggtggcagcgatggagctcgagatcctaggcatgaatttcgggtgcgtcctcgcggctctgtccgacgccaagatccccgacaagggctgcctgctcccgctcatctctaagctgctcggctacgccatcgtcgccgcatccaccaccgtgaag

SEQ ID NO: 21216 - DNA, 926 bp, Zea mays
  Clone ID: LIB3279-188-E4_FLI
gtatttatttccatgcgcctgcgaatgaataatcatcagcaacaacttcaggcttggagaaagaagaaaggcatagcagcgggcagcggcatgggcaccagccccgtcatccctgcgacgatgctcttcgtcgctcttcttgtcgctgtctgcttcggcgccaccgccgccaggtccagccacgcccgccacaccgacgccgacgacgcgattcgtctccccagcagctttggcgctggtggtcgaccgtggaattgctgcgactccgctatcaaggacgcctccctgccggcgtggcgctgcaacgacgtggtggacaagtgctccgccgactgccaggactgcgaggcgtcgccggccggcgacggcttcgtctgcggtgactttatcttaagcctgaccgagcccccggtctgcacaccgaggccgtgggactgctgcgacagcgtggcctgcacaagggactacatccccaactgcatgtgcctggacaaggtggagtcgtgctcgagcaactgcgaacggtgcgagtttctgtatcattcggaccctcctcgcttccaatgccgagacatcttccacggctatcctggtcccaagtgcaggacatggatcagtacgagcaactagctcagctcagctacttgctaaaagtagcgtagcgcagcgcgcgcggctacttgctagtatacgtacgtccacaaataaaaataaaagtggctagcgtacaaagctaacatctggttgttcgtcccgacatggacgattagcctagctcgatcgctagctgctgccactctcgttcgatttaatttcatccccatgtgtggcggtgtagggagtgtggatatgatcatccaataaagtagtctactgaaaatgaatagtcgttgatcatattaatatacatccatctcattttgttc

SEQ ID NO: 21217 - DNA, 712 bp, Zea mays
  Clone ID: LIB3279-188-F5_FLI
gcgtgaggcgtgagtccgtgaccattcccgtcggccgtcccaaaagaagcgcaaatttacaacccagtccaccacgggccacacaatcccaaatctaaccctccgacggcgatggggatctcgagcatgccggagccgcgggacagcctgctggggtacctggtgtacaacacggtgatctcgatcgcggcgctggcggggctggtgcgggcggcgctggtgttcctggacctgcaggccgcgctgccgcccggggacgacggcggggaccgactggcggcgtcgggcccgggactggcggagcggttcctcagggccttccggccggcgctgtacgaggtgctggcgtcgacggcgacgacgtgcgaggcggacggcggcgccgacggcgacgactgcagcgtgtgcctggccgggttccgggcgagggccgtggtgaaccgcctcccctgcggccacctcttccaccgcgcctgcctcgagacctggctccggtacgagcgcgccacgtgcccgctctgccgcgcccacgtgcccctccccgccgacgagacgccgctgctccgctacccggagttcgagtgatccggtaaaaaccaccccggccccccaccccccggcgagcggtgaccgcccccgtcgcgcgcgcctcggctgtgtgctgcaagttccgtgtggccttccgtgtacgcgtagcaaaccaaagaagaag

SEQ ID NO: 21218 - DNA, 1199 bp, Zea mays
  Clone ID: LIB3279-190-C12_FLI
ttctaccgataggcttagataatttttggaacacaacattgctccaaaaagtttttctgaagaaaggtatcaatctgcagtttgaagaagttgagctttaagaggaacgtggtgtcattgtcatctgagctcaagggtgtgaggagcaagcttgcttcctaggagcagctgtttgtaagggaatctcaaactagaaagcttgcggagacaaaaacaaggagcatggaagaggaagtaatcaagctgcagaaatgcttacaggacaaggatgagcaactgtgttcatccacaagtagcacggaacagctacaggagaagcaggtgttgcatcagctaagttagctcggatgtagtgcatgtcattgctgaaagagctgaatgagaaggacagctcactcaaagaccatagacttcgagtgaacaatctaggtgagcagcttgatcttctccagaaggatgtacaagcaagggaggtcacacaaatgcaacttaaagatatagttataaggatcgagaccaacatcatggatgaagttgccaaagcttttgaaattgcgatattgagaggggaaatcggaatattatctactcactggacgaacaaaaccaagaaccttgaatcacagttaaaaaagcaccagagaactgatcaggagctgaagaagagggttctgaagcttgaattttgtctctggtcctgtcatcccctggaccatgctaacaggatgctcaacttttacgctccagtcgaacttctgatagaatgaactgaaagacttctctaacaaaagtggagctgaggggagcaagagtgctgaaagcctgaaagtggtccaatgtttttagatgttctcgaatgttatctgaaatatgaggtttatctcttgcttgatcaacaatagaagcaaaaaatcatccttttgtttatttatgtttcccaatataaaggaaaaaggggaaatattttggtgcagtgtgcccaattcttttgtccctagaaaactgtgtagtcacctatagcaggcactatagtcagttttagctattttagacaccactactatttgtacacacatttctattagcctattttagcctgctatatccatgtatgagccttatgggaactctgcaattactatggatcctcttatacattatgtttgacatggagacaaggtagtatattgagttggacc

SEQ ID NO: 21219 - DNA, 1037 bp, Zea mays
  Clone ID: LIB3279-190-E3_FLI
gttgctcctcaagttcacgctgcggctatataaagccacgcctccattaccctgcttggccaaagcaacaacagaagcaaacataattaagcagttggtggtcattagcgtactgcacagagtgcctacagaaaagctagagaagtaaacaaaatggctgcgtcctcgtacttccttcttgctgcttttctagcggtggttgcttcccatgccaccgcttccgatcctagcccgctccaggatttctgtgttgcggacatgcactctcctgtgaaggtgaatggatttgtttgcaaggactccatggccgtgaccgcagatgacttcttcaaagcagccaatcttgataaggctagagacaccatgaagagcaaggtgggatccaatgtcactttgatcaacgtcatccagctccctggcctcaacactcttggcatctccctggcacgtatcgactacgcgccattgggcgagaacccgccgcacacccacccacgtgccacggagatcctcacggttcttgaggggacactctacgtcgggtttgtcacctccaacccaaacaagctatttgccaaggtgctcaacaagggtgatgtgttcgtattcccccaaggtctcatccatttccaattcaacccggtctataacaagccggccgttgctatcgcggcgctcagcagccagaaccctggggttattaccatcgccaatgcggtcttcggatcaaagccaccgatttcggatgatgtcttggcaaaggctttccaggtggagaaggggacaattgattggctccaggctcaattctgggagaacaaccactactaaataaatcacatatagcttatcgtatcaaagaatgcttttaaatatgcactttgagtaatacaactacatgatttgagttttcatggtaaaataggccctaaaataagaaggtagaatttcgagtgttttgggtgctattttgtatcgcatgcttcttggtgcaatgacctctatggaagttcgaaataataatctttgttcttgtc

SEQ ID NO: 21220 - DNA, 1548 bp, Zea mays
  Clone ID: LIB3279-190-F12_FLI
gaaaggggacgaagaggggccccgcgggcgccggctgctcgtcctcctggacgacctggccgtgcggtcgtcgcactcggccttcttcggctcgctccaggcgcgcgggttcgatctcgacttccgcctcgctgacgatcccaagctctcgctccaccgctacggccagtacctctacgacggcctcgtgctcttcgccccctccacaccacgttttggtggatcagtggaccagaacgcagtcctcgaatttattgatgctgggcatgacatgatcctggcggcagattcctctgcctctgatctcattcgtggcattgcaacagagtgtggggttgattttgatgaggatccagaggcaatggttattgaccatatgaactatgccgtcacagatgttgaaggtgatcacaccttgattgctggtgatgatcttatccattcggacatgatactagggtctgaaaagattgaggctcctgtattgtttcgaggaattggacacatggctaatccatcaaacagtttggttctgaaggttctatcagcctctccatcagcatattcagctaatccaaagactaagttagcgtctcctccatcgctcactgggtcagctatatcattggtttcggttatgcaggcaagaaataatgctcgggtgctgctatctggatcactcgatctgtttagcaaccggttcctgaagtctggtgttcaaaaggctgatagcaaaacaagatatgagagagctggaaacaagcaatttgtggcagagataagcaaatgggttttccatgagaggggacatctaaaggctgttaacgttaggcatcacaaggttggggagacgaatgaaccaggcatgtaccgcattaatgatgacctggaatactctgttgagatctatgaatggtccggaacgagctggaagccttatgttgctgatgatgtgcagcttcaatttttcatgatgagcccttacgttctgaaaactatgtcgactgacaacaagggtttgtattcaacaaccttcaaagttccagatgtttatggagttttccagttcaaagttgagtaccaaagactgggatatactggtctgtcttttacaaagcagattccagtacgtccttacagacataatgagtatgagagattcataacatcagcgtacccatactacaccgcctcattttcaacaatgggtgctttcttcgtattctcgtttgtgtacctgtaccacaaataaaggactcatgggagcgcacaagtctctggaggctgacgtgaccaagatctgtgggcactgaatgttgtgctataagccaagagttacccggcgccaattttatggaaccatgtttttgtactgccaacttagataacatttgacgaccgtgaccgcactcatgggaaatttactcgtgctaggatgttcgatctgcccccacttcttttttttcttggaccctttctgatcagcacttgtcagaacgtttacagtctatagcactgaaacgtgattttggaagtactacaccccca

SEQ ID NO: 21221 - DNA, 778 bp, Zea mays
  Clone ID: LIB3279-191-E12_FLI
ccgcttcttcgcccacacgcccgcgcgctcggaatactccgaggagggtgctcgaggagggcgacgatccggccacttcctgctcgcctcgctgccggtcccgcgccccggagccctagagctctccccgcggcgggaccgccggagtcctcgggcgcgcggagagaatggaggcggcgcgcgccaaggacaccaaggagcgtctggccggggtcgagcggctgcacgaggtgcttgacgtcgcggcgcgtcgcgggctgacggcggccgaggtcaccgcgctggtggaccactgcatggatctgacgcgggatgccaacttccgcatcgcccagggcggcctccaggcgctctccgtcgtcgctgtcgtcgccggcgaccacttcaagatccacctcaactccctcgtccccgccgccgtcgagcgcctcggcgacagcaagcagcccgtccgcaacgccgcgcgccagctcctcatcacgctcatggaggaaatgtacaagcacatgggatcacaatttcatgaagcattgcagcgccataatctgccttcatacatgctaaaaaaattcaaggttggataaaatagaaccaaaggttcgatcatctgatacaacaattaggacgggactccacgaaagcatcaaggaagaaggcaattgtttgagaacagtagcttggtttttcaacattgtttattttcagaatattgattttcagaataaggttgtttcatacatgacaacacgattggcaacatgactaacgtatttatact

SEQ ID NO: 21222 - DNA, 1741 bp, Zea mays
  Clone ID: LIB3279-191-E9_FLI
ggaaaaaataggtaagatgcaacagatgtggaggtgcactcgctaaccacgcggttctaccatactcctaatacagtgctggctatcattttccgcatggttggatcgaaaattcatctacttaccctttcctaccctcaagtacatcaagagtgcaaagctactattaaccttttgtttctatggaaaggactaactttcaactgaatacgctaactggttgctctgatcaaatctgaaagtcatgttccttcatctgtatcagtacagtttgttgttaattgtttctaaacctgtagtgtggcaacagacatttagactgtgctagaagaaacccagctgaaatttgaggaggaaagacaaaatttgctaaaagtactacctaacaattccaaagagctgtgtgagaatttgtaattctgaagttgagtgtttggagagtttgtgagggctgtggaatgtcgaaggtgaagaacaataatggttatcatggagtcactgagccaatctcgctgagtgggccgactgagaagtaccttatgcagacagttgaggttgaaaagtacctttcagatgcacgactctatgagaggcaagatgaggctatcttgcgagaagaggttttaggcaagctggaccaggttgaacaatatccatggatgcccctccattttggattatcattcacttaggcatatattgatttgaagatgttggatgctgtggcacactgtgaaagctttgattaagaaggctactaggatcagcgggtatggggagcaatttgtgcatgaagcaaatgcaaagatctttacatttggttcataccgtcttgggcatttgagcaagcatgcaagacaatgtttgagcaagtagatggtgcatttcaaaagggaatgtctgagcactccaatgctattcagcagcaagttgaggctgcacatactccgttagcgctaactctaaaagaaaccatcaattctgcttcatcaatcacctagagtttttcatcggagttacttgatggcaatcgcaagctattggcacttgttacttctgggaatgccaaggcacataataccagtgctttgcagcccattaatggtcctatgggtggtccccaagaggttgaggctctgttagaaccgatgagagagctgagcagactgatatctgaacgcaagtttgacgaagcatttacaatggctcttcaaaggagtgatgtttccatagtatcgtggctgtgctcccaggttgatttgcgggcactatgtgcaatggttccagtacctcttaaccagggggtccttctggccttattgcagcagctagcaattgacattcacaatgagacatcatggaaggttcaatggatgacagatgttgccatggcaatcaacccagcagaccagatcatcgcggtgcatgtgcgaccaatctttgagcaagtctacagccaattggcccaccaacggacactccccacgaccgcatcagatggcaccagtatccgtgtgatcatgcatgtaattaactcggttctgcttagctacaagtgattgcagctatgcaactgtgggaagtatggcctattttatatcttgtatagagaaattttgaatggcaaagagaacacacaacccacgagggtgatggtgtgacattgtggttgagtatacttggaagagggtggaggctactctttagtgtaaatttcgcctttgaaattaaaatatttgtc

SEQ ID NO: 21223 - DNA, 1317 bp, Zea mays
  Clone ID: LIB3279-191-F7_FLI
tcaggcaccacaaggcaaaagaagctcaggtgagaatgttgtgatggttgatccactggaagctaagcgcctagctgctaaacaaatgcaagaaattagggccaaagaaaagctgaaggtgcattgttgctgtattggagtgtttcattccttagactaaatcaaataatcaatcatatatactaatagatggaaccttggtaataaggaaaagtggaaaacttataccttttgtttgggccaattgttggtgctgaatcgttgtttcagaaaactggaaacagaactaggcttttccctgttcatgctgtcctgcaatatgagaacaagaaacaccattgtagtatttgtttggtcgtaatttttgtgttccggagctgaatcagaacggttcctaggtgtcaaatgcaccctaaattaaaaaaaaaaatctacctgtggggaaattgtagctcataaaagagatgctgaaattcatttagtgaaacatatatgtttattttattatttcgctaatatatggtctccactttctgttaacaaatagtcatttaatcatccattaattggtgtctgtttgtcctcctggagaacatcatctgctgcactcccctctgaatcccaatatcagtctatattctatattgatgcttcattgtgttttcttactcttcaaattggatccgaatcactgtgatctgttgtgtagaggcgccgtcaagccgaagcgatcaacggggcattggcagtgataggactgacggctggattgctagtggaggctcagacaggaaagggcatcttagggcaggtacataaaccaaatgtagtagaaattcagtttttaatatatacaaacttttaccataaccaataaacatagcttggaaatgttaaaatggacagcagtaatgtctgatgttacacaattgtttacttagaaaccagaatgttaattacagttttgcgctactaatatgtgatggcgtgctcatccatttctgcagctagctggatatctgacggccatttctagtttatttgggcaataacactggaccatggttggagatttatttttcacgttccacggccaggagaggtcttatctgaatcttatttgatggatccacccaatttttttgggagctgatcccagatggatgtgcaatagcgtacccagacttgtatgttgatcaagcacgatagcatgggctgaacattagtatttctatgtagcacatcaatttctgacgatagcgcctgctaaagagcagttctattcatactcaaatgtgaaatgttgaagtcttcgag

SEQ ID NO: 21224 - DNA, 967 bp, Zea mays
  Clone ID: LIB3279-192-C9_FLI
ggcgacttcccggaggtttagcatcttcttctctctcagtctcaccctgtccctcgcgaaagcatctccattcttccctcctctcttcccgcactgttctcggaatcgctcttctcctccgcgctgttcttgggatcgaaaggtgggaagcgcaatgagcaacgagttcgattacctgttcaagcttctcctgatcggcgactcctcggtgggcaagtcctgcttcctcctccgcttcgctgacgactcctacgtggacagctacatcagcacgatcggcgtcgactttaaaatccgcacggtcgaggtggagggcaagaccgtaaagctgcagatttgggacacagcagggcaggagcggttcaggaccatcacgagcagctactaccgaggagctcacgggataattattgtttatgacatcacggacatggagagcttcaacaacgtgaagcagtggcttgatgagatcgaccgatacgccaacgacagcgtatgcaagcttctcgttggtaacaaatgtgatctggccgagaacagggctgtcgacacttcagtagcacaggcttacgctgaagaggtaggcatcccgttcctcgaaacgagcgctaaggagtcgatcaacgtcgaggaggcgttcttggcaatgtctgctgcaattaagaaaagtaaagcagggagtcaggcagccctggagaggaagccctccaatgtagttcagatgaaagggcggccgatccagcaagagcagcagaagagtagatgctgttcaacatgaggcacagcaatgtctgtctttcgagaatcagtaaaatgattatctgctagatgtgtttctgtcttgtttgttttgagacacatatatagttgcgaaaatgcggtggtgagaaactcgaaatgaatctgagccagaactcggaccgccaaatttcatcattttcactcacaaatttctaccatattgaac

SEQ ID NO: 21225 - DNA, 827 bp, Zea mays
  Clone ID: LIB3279-192-F7_FLI
gtctagtaccaataaaaccttctaacttgtttaagttaaaagctatgtaaatggttcttgatccatacttcttatagacctctctcaaatcgccaggagctaaatacacctaacgttcaccacattagactctctaaacttatatagatcaagcatcaaggtactagttcataccagtttgtaaaatgttgcgcctgctccagattttttcatgctcatgcaacggtaaagcatggccgcaatacaattgcgttgctctcggatgacagtggctcaatcttttcagagcatgatcttaaagctaacctgctttggaatgttttcaaatgtcgcttgggatcttctgattttgtggaaaatgtctttgatctccctagcttgctgctcttccacagtgacttgcattggttagatgagcctttttcaaagcaagaaatgtatagtattgttgcggcccttccttctgacaaatccccgggacctgatgggtttaataccaactttatcaaaaaatgttggccgattatttctcaggacttctatgacttatgtgaccaattttaccatggggatgtttgtcttcgaagcatcaatggttcttatattgtcctgattccgaagaaggataatgctagtttagtgggtgatttccgaccaatttcgcttctgaataatagtatgaaaatcatcactaagctgctggccaatcggttacagacagtgatgacttcccttgttcacaaaaatcaatatggcttcatcaaaggaagaaccattcaggactgcttggcctgggcatttgaatatattcatctttgtcatatttc

SEQ ID NO: 21226 - DNA, 1607 bp, Zea mays
  Clone ID: LIB3279-193-D11_FLI
ggacataaatatcgggaaggaatgcactaaaacttcagagttgttgaaaagtagagaagcctcaagaaaatcaaacatcctagtggtagatcggaaggatcctaacaaagatgagccagacaaagtgaaaggaatccaagatgaagttatgaccaaagaagagggagtgaaaggccatacctgtgaaggtcgtgcgacgtgttggagttgtcttaagcaggcgaacaccacaaagacaaatgatgctccaaatttaggttcattgttggttggtaacgaacacatgcaaggcctcatgagtaatttgagagataattcatcccatttgtttgaaaagaatcattcaagacaccaaagggatgatccatgtgaatatagagaaacaaacttgaagtttcctaataggatccaatcagttggaggcaatgggaaaaccaatgatgtcacatctaggaggaaacgactcttgttagaagaaaaggctagcgcacacgtgcaaaatgatcttacttatggaccgatgaagaggcggaggtacatagaagccaacgaagatgaagaagagcaaaatgatcttacttatggaccgatgaagaggcggaggtacatagaagccaacgaagatgaagaagattatgtcggcgaccaccatccggtgcatattgaagatgctaccactgaattgacaccgcaggattctatttcaaagcattgcgttgagcgacaatgctattgttgctcaaagcctattgacatacctagatggagtggaacctttaagatagatggaaaggaacacatatcactggctggacatttgtcatccaaatcttgtgagaaagtgtggaaattgtcatcattgccgaaggtggttcaagtgacaaaggttcctagaatggcagtgtggcctaagatatttaaagcatcagaacccagtggtgacaatattggcctatatttcttccctcctgaaatgaggcacgatgaagaactagatcaactagttaatgaagtcatggataaagatttgatcttgcgagctattattggtgaagctgagatgctgatattcccgtctgttctactacctgaaagatatcagacattccaaaccaaacactacctatgggcggccttcaaagcaaaggaggataaaggtgatgcaattgtagaggaggaggttgagaagggaaattgcgtttcaaaccagccagacaaggtacagtctgataatgcttcatttccttcaaaccatggactggaccgtccaagcatggaagctccccctcaaagcagtagcagtgtctttggtattgttgtccgacaagctccaaatcttgaaccagaagtgaagcgatttatccaggagatggaacgcaaaggtgcgttggtaacggttatgaggggggaggcaattggtggagggccatagccaagcaacaccacgaccactatgcattagttgtagagagagtagagagtaaaccatgtcaaactatgctgtagttgtatagagagtctgacacataacgtcgtggacttgagctcttgttcagtttttttgtaaggtacctacaagtttggtcatatgataatttctccggaac

SEQ ID NO: 21227 - DNA, 1279 bp, Zea mays
  Clone ID: LIB3279-193-G9_FLI
ggcagcccggcttgtcgggagcgcgaggggcgacatgggggcggaggccggcgagcccagctccatcctcagcttagcttccgccttttcctatggagtcgcatctatggcaatggttttcgtgaacaaagcggttcttatgcagtatgttcactccatgaccctcctcactttacagcaaatagcaacagcacttctgatacattttggtcaagttctaggaatgtctaaacgaaaagactttagctggataaccgcgaagaaacttcttccagtgtcaattttctacaatgcaaatgtgggatttgctctagcaagcttgaaaggggttaacatcccaatgtatattgcaatcaaaaggatcactccccttgctgtgttggtggctgggtgcatgcggggaaaggggaagccaccgacacaggtcattctttcagttatctgcaccgccactggtgtcctcattgcagcacttggagatttttcctttgacctatatggatactgcatggctctaacatcagtcttcttccagactatgtatttgattctggtggagaaatcaggcgctgaggatggtctttcctcagtggacttgatgttttacaacagcatattgtcacttccatttctgtttttcctcattatagcaacaggagaattcccccattctcttacagtattatctgcaaaggcagcctctctgacgttcggtgtcattctcgttatctcactggtgatgggaatcgttctcaatttcactatgttttggtgcacaattgtgaactctgctctgactacaacaatagtaggagttctcaagggtgtcggatcaacgaccctcggtttcgttctgttgggaggtgtcgaagtacatgctctgaatgttactggactggtgatcaacacatttggcggcgtatggtactcttatgcgaagtataagcagaaaaggaaaacaccacggaagatccaacatgatgtagagtcgcatgcccacaagtagcgtcagattaactgtagttatacttcgttctttgatcagataataactggatgcatgtttaaatccattttttctgaactctattccatcaccagcagttaggttggtgcaattaagggaagcaacaagcttttcctatttcacatcttatagtttttacgatcagtgatatagggtgtaaagtcagttatttttcgcagctccagtgtgcgatgcatcacttttgctccaaagagagaaatccatgggtctggatgaggtgattgccggttc

SEQ ID NO: 21228 - DNA, 723 bp, Zea mays
  Clone ID: LIB3279-194-D7_FLI
ggcagccatatatagtctctagattattgcattgttagttgttacacattagcaaggcagcattaccacttctctctcgctcattgccaacgattaaccagtgacattaattgcatatccttgtttgaagatcgccggcgtccggcgagatgggcttcaaccctcccgtgccgcagcaggacagcaactgggagatccgagtggcggtgcaggtgagcctcctcctccaggtgttcctcatcttcgtgggccccatgcgcaagcgttcctcctccccgttcccccgcttcgtcgtctggtcctgctacctcctcgccgactgggtcgccgacctcgccctcggcctcctcctcaacaacatgggcaacatcggcggaggaggcagctcctcgtccagctccagcttcggcctcaagcgcggcggcacgggcgccactgccggcaacaacgacgcaagcagcagcagcagccccatcatcttcgccttctggacgccgttcctgctgctccacctgggcggcccggacaccatcaccgcctactcgctggaggacaacgagctgtggctccgccacctcatcggcctcctcttcgagctcttctccgcctgcgtcatcttcttctgctccctgcgcggcaaccccatgatccccgccaccgtgctcatgttcgtcgtcggcgtcatcaagtacgccgagcgcacctactccctctactccggac

SEQ ID NO: 21229 - DNA, 1015 bp, Zea mays
  Clone ID: LIB3279-194-G10_FLI
agcgaggctgcgagagcggagagagagagtgagggaggcgccgacgccgagtcctttcttcatcctgcatctgccgctgtttccgacaggatgtttctcacgaggacggagtacgaccgtggggtgaacaccttctctccggaggggcggctgttccaggtcgagtacgccatcgaggccatcaagttgggatccactgcgatcggtttgaagacaaaggatggtgttgtcctcgccgttgagaaacgtgtgacctcaccactgctggaaccaagcagtgtggaaaaaataatggaaattgatgagcacataggctgtgccatgagtggacttattgctgatgctagaacactagtggaacatgctcgtgttgaaactcagaatcataggttctcatacggagagccaatgactgtagaatcttcgacacaagctatctgtgacttagctctgcgttttggcgaaggtgacgaagagtcaatgtcacggccatttggagtctctctcctaattgctggacatgatgagaatggacctagcctgtactacactgacccatctggtacattttggcaatgcaacgcaaaggcaattggatcaggttctgagggagctgatagttccttgcaggaacagtacaacaaggaattaaccctccaggaggcggagaccatagccctttctatcctgaagcaggttatggaagagaaggtgaccccaaacaacgtcgatattgccaaggttgcccccaagtaccacctctacacccctgccgaggtggaagccgtcatcgcgaggctgtgaaacgcttccgagctcttgctatccacgtcatcaatcggtaatagacgacccttgtacgaagcgtgggcaccatggtccttgattatggcttgtcatcgtactctgttgttaactccacaaggacagtcgatgttagtttgattcacagctcagccgggctcacttgtctttttaaatttttatgaattagcgttgagaactttgtactgcc

SEQ ID NO: 21230 - DNA, 809 bp, Zea mays
  Clone ID: LIB3279-195-G2_FLI
caaagttcacagctccaatcctggtgcaagcgcacagtagcggagcaagatgcggggaggagaccggccatcggcgtcgctccagctcctctcgctgggcctcgtgctcctctacttcttcacctcaggtgagctcggctcgactccatctatcattatgagatagatagatagatcattgcgctcaagcagaaccaccacgccgttcgtctgaaaagaatgggccaccatctctctctctctctctcgggtgttttgcaggcagcaccgttggtctcgtggagggacagaagacgtggtgcatcgcgaagccgtcggcgtcgaacgagatcctggcgcagaacctggactacgcgtgctcccaggtgagctgcgccgtgatccagaagggcgggccgtgctactacccggacagccccgtgtcccgcgccgccgtcgccatgaacctctactacgcctacagcggcaggcacccctggaactgctacttcaacaactccgcgctcgtcgtgcagtccgacccaagctatggctcctgcacatactactgaggaggagtgtgaggaggagtggagagacgaggagaggagagagatccattcgtgcctggcggtggcggctccactgcatctgtatgcagagtcttggttttctagtctcgactgccaatttaccaaatgcacattgttgtgttgtgttgtgttgtgtagccgtgctgcagctgacatttcgcagcgaactcgtggatactccgtttcgcattcatgtgctttgaagtacattgcagcggcgctgcacaaatttccccc

SEQ ID NO: 21231 - DNA, 1383 bp, Zea mays
  Clone ID: LIB3279-195-G6_FLI
gtcctcgtccccggcttgtcgttgagcagaccactcgtgactcgtggcctcgtggtgttgcagaaaccagccctttttttcctgtcagcaactacccactggccactgcagccgagtgttcctttctagccttcacttctcagcacggcagccttcgatcccccgactgcagccgccagccgcgccatggagcaagcagccatgccgcaggttccccgcgtcaagctcggcatccaggggcttgaggtgtcgaagctggggttcgggtgcatggggctcacgggcacctacaacgcgccgctcggcgacgaggccgtggccgccgtcgtcgcgcacgccttccgccgcgggatcaccttcttcgacacctccgatgcctacgggccccgcaccaacgagaccctcctggggaaggcgctcaagcagctgccgagggagcaggtgcaggtggccaccaagttcgggataggtcagggcgccgctggcatgaccgtgtgcggcacgcccgagtacgtacgcgcctgctgcgaggccagcctgcgccgcctcgacgccggctacatcgacctctactaccagcaccgcgtcgacaccaccgtccccatcgaggatacgattggtgagctcaagaagttggtggaggaggggaaggtcaagtacatcggcttgtcagaggccagcccagacacaatccgccgtgcgcacgccgtgcatcccatcaccgccgtgcagatggagtggtcgctctggtcccgagacatcgagcccgagatcgtgccactctgcagagaattggggattggaattgtggcttacagtccaattggccgtggattttttggtggaagaggagtgacacagcaagtttcttctgaatctagtctgcaaaggcatccaagatttacaacagaaagcttggagaagaacaagcagatttacctgaaaatagaagatttggccaagaagtaccagtgcagcccagctcagctagctctagcctgggttctgcatcaaggggatgatgtggttcctataccagggacaacaaaaacgaagaacctagatgccaacgttgactccttgaaggtgaagctcacagctgaggacctgaaggaaattggcagccagatacgtgcagaagatgtggctggtggaagacaatacaattcctatgcacatacctcctggaagtatgcagatacaccaaaaaagtgaagctctggaaaccttgtagcaatcacaggcgtatgcaaatgttgaactatttccctgcatttgagccggaatcgtacgatgatgcatcttgtgaacatgcggcactaataaatcgagacgaagaataatgtattttccatcagtgattatgagcagatgatgattttt

SEQ ID NO: 21232 - DNA, 1727 bp, Zea mays
  Clone ID: LIB3279-195-G8_FLI
cgattgggtgccgggttgccaaggacatggaggattcgagcggctgctcgtcgtctccagccgtcctacggaacaagtactgggtcctccgccacggccgcagcgtccccaacgagcgcggtctcatcgtgtcatctctggagaacggcacgaagccggagttcgggctggccccgcagggagtcgagcaggcgcgcgcggccggcgaaaagttccggaaggagcttgacgagattggtgtgccggtgggttccgtcaagattcgttactcgccgttctcacggaccaccgagacggctagagtggtcgccggtgtgctcggcatcccctttgaagctcctagttgcgaagcggtgctgggacttcgtgagcgctactttgggccatcatatgagttactttcacatgataaggtgggtttccttctttggattcagttatattgtttcagtagaaatgaaaggacattcttgtcatatgagcatctactgaggtatttgatacaggttcaattctataatatgaattggtcggtgaaatctaagtggtgcattttcatctataatctaagaaatcttagtccttctagcaacctccgctttgtcagacataaaaatgtctttatagacatccatcatccttgtatttatcctttcaactttgtcagtcactgatacagaacaaggttatatctgaacccacagtttgtccagctgttttagcgtcggaactatctttgtccctgcgtagatagttccgatgcagaaacatttggacaatctctgggcctagtggagaccaaggcaagttggagccgctgctcatagggtgtgcaccccctttgttgtgcttagccagggcagctgcctccgtggctgtcctctactgcctcttggtcagatggaccagcttgggctgcgccaccctggcccatttgcatggcacatgtgttgtgttggaagtcgtatatgttttttcagacttcgtaagataagtttttttactctgctttggaaacttttttgtcccacaccaacagcactgatccactgatggttttattatgatttaacaggtctagtgatagagtccaagttgaaccacagctcttcctcagatatctataattcagttatcatagtaattgatagtgtagttgtgtttttttgtgtgccactataagtttcatttttttgtttctttccgttactgaatctgatattattaagtagtatgcagacatatggtcagtagatgaagcacatccctgtatggctcctgaaggtggcgagagcgtcgcagatgttgctagtagattttcagctgtgctgtcatctacagagacacattttcatggctctgcaattcttattgtcagccatggggacccactacaaatctttcaagctgtcctcagtggagccaaggagaacatgtctttccttcacgatctcaccaacctgaaggtgaaagatactgacgatctcaccaacctggaagtgaaagacacgatggtggcatccattctgtcacagcatcgtaagtttgcgctcatcacaggagagctgcgccgagttgtgtaacttgctgctgcttgggtttaacgtcgcctgtcagttgaccatatgtaaacctgcaatgtttgcctattacattcctccgtaacttgacagggatatgaaattcgtctcctacgtaatgctatctttcccattttccttccccgc

SEQ ID NO: 21233 - DNA, 1268 bp, Zea mays
  Clone ID: LIB3279-195-H7_FLI
ggtcccacactcccaccgtactcccaaacaaaacattctctcatagtctcatctcatgtgcacggaaaggcatctattgcctttctcccaacccgccaaaccctacttgccaccgccaaacttccgccttcgtccgcgccggcgccgctctatcgctctaaaataacctttccagttccaccgggactagctgaaaggagagggaacggagggggatggcgtcgccggacgacgagataagccggctcttccgcatccgccgcacggtgtatgagatgctgcgcgaccgcggatacggtgtccgcgacgaacaaatcaagctcgaaaggcacaagttcatcgaacgctacggcaaccccgtccgccgtgacgagctcaccttcaacgccacaaagttgaacggcccatcggaccagatctacgtgttctttcctaatgaggcaaagcccggggtgaagacaatcaggaactacgtcgagaagatgaagaacgagaacgtcttcgccggcatactcgtcgtgcagcaggcgctcagcgccttcgcacgcagcgccgttcaggaggtctcccagaagtaccacctcgaggtcttccaggaagctgagcttcttgtcaacattaaggaccatgtcctagtgccagagcatgtgctcctgacaccggaagacaagaagactcttctagagcggtacaccgtgaaggaaacccagctgccccggattcagattacagacccgatagcaagatactatgggatgaagcgtgggcaggtcgtgaagatcacaagagccagtgagactgctggaagatacatcacctaccgctacgttgtctgagttttgctacattctcatggcttaagcttccgcaccaagcgaaaatgacctctacttgctaatcctgctgtgtactcggaatatctgttgccctggtgcccttccttgagaactgatctcgggctgttctggcgatagtaataggccgctgttccttaagctgtgttccatctcattttaggccctgttcggttgcagataggtgtgatattggggggtgatattggatcgtgatccaaatgtttcttcacaaattattagggtcataaattatttttagttaaaaaatgaataggaatagggtctgatcctaatccgatctttatgttttatagtttaaaatttagagtctattattacctattattacctctagttgtacagttatagaatattggaggggttaggtggggattaaatccctttctgttt

SEQ ID NO: 21234 - DNA, 807 bp, Zea mays
  Clone ID: LIB3279-196-D5_FLI
gcgcagccgcagccgcagccgctgcttttcgttcgtcttcatcctacgcgagggcgaaacccacaaaccctctccctcccgtactccggcctacacatccaggggcgatgacgctgggtagctccggcgccggatcgagcgtcgtcgttccccgaaacttcaggctattagaggagctcgagcgtggagagaagggcattggtgatggaacagtgagctatggaatggatgatgccgatgacatctacatgcggtcatggactggtaccatcattggccctcacaatactgtacatgagggtcgcatctaccagctgaagttgttttgtgacaaggactatccggagaagccaccatctgtcagattccactcaagaatcaacatgacatgcgttaatcacgagacaggaatggttgatccaaggaagtttggtttgctagcgaactggcagcgggactacacgatggagaacatcctcacccagctcaagaaagagatggctgcctcgcagaatcgaaagttagtgcagcctccagaagggacattcttctaacgaagtgttcacttggcccgtcatgggatccaacagtaattgaaagttttatgggctaaaaaacagcgtctacatctggtgcccctacctgtctttgtgattttttatgacttttatgttcttgtatcgtgaaccgcagtgaacaacggttgttgcaagttccagggatatctttggaagtggtaaacaaatgcgtcttatttctatgtaatattagaccccgtgcgtgtgtggtttcgaggtacagctccct

SEQ ID NO: 21235 - DNA, 670 bp, Zea mays
  Clone ID: LIB3279-196-G3_FLI
caaatccaccgccggctcggctcgcccatcttcgcgccaagcaccgaatctccgatggcccgcacgaagcagacggcgcgcaagtcgacgggcggcaaggcgccccgcaagcagctggccaccaaggcggcgcgcaagtcggcgccggcaaccggtggcgtgaagaagcctcaccgcttccgccccggcaccgtcgcgctccgggagattcgcaagtaccagaagagcacggagctgctcatccgcaagctgcccttccagcgcctcgtccgtgagatcgcgcaggatttcaagaccgacctccgcttccagtcctccgctgtcgccgcgctgcaggaggccgccgaggcctacctcgtggggctcttcgaggacaccaacctctgcgccatccacgccaagcgcgtcaccatcatgcccaaggacatccagctcgcgcgccgcatcaggggcgagagggcttgatctcccgttgttgtcgtccacgttgttgggcctttcctctgtgtctctgcttgtagaatccttgcttctgttcggttccttctgttcgcatgatggtgttcgtagtgttaggagttgcattttctaatctgcttgttcttgcaccggtgcctctgaagtggcgtttccccctatcttaatggaaatggaatgtgctttaaaaaag

SEQ ID NO: 21236 - DNA, 682 bp, Zea mays
  Clone ID: LIB3279-196-H7_FLI
cgggaatatacttattttggaaaggggacttggatctattgatgcggtcgctggcgctcatgctgacgtggtccgtcgccaccgtgctcactctcctcgccgtgggctcgccccatccaccacctcagcaatgctagaacggaaaaccaggttgtgcaaaagagtacttgcgactttgaaggtcttatggtcagtaatagaggatatgacgaagtacatatcaccagaggatgcaaaaagattgatatctaaagagactgtattttgtaatgtaacatttggtgtggtggatgcaattccatgatagcgaatggcataagatttaatgctaagaagaaacaagttggaaattattactctaccaaggtatatactagagcgaagagcgaacaacaatctaagattgcagcaagaaaggtccagcaaggatggagtcaggacttttatccatgcgagaaggaaccagattatgtacatgtatatgtgtggatagaactaaccgccgatattatcctaaatctaagcacggtcacccacaaaaaatgtgtaatttgcttcttcccagacatacgaaatgtgttatgcggactatgttggctattggaaaggcattctaaatgccgtctgtaatgtttgatggttataaactattgtcgtgctatgtaatatgcggtcttgacat

SEQ ID NO: 21237 - DNA, 840 bp, Zea mays
  Clone ID: LIB3279-197-A12_FLI
gacattgtggacatgattgtggacatgactgtgatgcaactatttggattcctaattgattctgtggttggtactttccatacacagaattttactgaaaatttatcaagaaagcaaccaaccttttatgaacctagttgcaaagttttctcagaggaagagatgttatcaagctaatgcaacttcattagtagataaaaaaatgaaatcaaagcattggatacatttgacatggtcgattcacattttgatggatacattgattttgaagaataagttgactatgatacagaggtgaaaggacaatacggcgaagactataatagacttatagggaatttggttggtagtatgaagcagaaaaacatctctacttgggacattgaccatgtgaacctagagaatgatgaaaatggaaatccaatatgctatgaaaaaacttaagaaagatcttcacttcgacaaccagtcacaacatctaattataaaaagctataggaggaagcatataaaaaggatacaatgacaaaagaaaaactaaaacatgtaccaacaatattgttagtttctacataattgagggggtaatctaaaatagctgatcacatgaaatgatagtatcaagatggccaacaaatgatacattgagggaagcattctatgaaagtagttattcatactcctatccgatgtgttgaagcttgtccctgagagaagagttctctgacctcagagcttcaacatgtagcccaagctcctcacgctcaacctagaataatcgaataagattagaaaagcactgaacaaaatcctcctaaaacatagaagatgaaattcagg

SEQ ID NO: 21238 - DNA, 441 bp, Zea mays
  Clone ID: LIB3279-197-A4_FLI
atcctgtgggaacattgccttctaggaggaagtgacctagtagatgggatgtgcacaccctagctggtaatgattctgactcaccctcgctcttctctatgtaatttcgtattgctgacacaattgtcgtgagtcgtgacaagtccgtatttcttttaggtgccgttcggttgtttgggattggtgggttggaacgattcttaaccggattgcttctctaatttatataaactttgattagggcttgttcgtttgcgccggattggtgggtcggaacgattcttaaccggattgcttctctaatttatataaactttgattaggtggaacgattccgggtgcaatctgatacaaacgaacaaggccttagctggaacgattccgggtgcaatccggcacaaacaaacaaggccttacagtaacaggtttttaaccgacact

SEQ ID NO: 21239 - DNA, 688 bp, Zea mays
  Clone ID: LIB3279-197-C6_FLI
gactcactcgatgctgctggcaccaatgcggatgctgccagtaagatcgagaggtttctgatccaaccgagagtagaggatgcagtgcttggccgtcggaaggctgaaaaggcaatggcttggcgggcagtttttacatcggctgggtttgctccagtgccactcagcaaccttgcagaagcacaagctgactgcctcttgaagcgggtgcaggtccgaggattccatgtggagaagtgtggaatgggtctagcactctactggcagcggggcgagctcgtgtctgtctcggcgtggcggtgctgatcatagcaacctcatccgtcaaccatcgtcgtcgtcgcgcctacactattcgcaggcatgtttaactccggtaatatgcgttttatcttgcaaacattgcaaagaaactattgtcatggttgttccacgcctctgattgctttactgctgtttttggagtattagctaggcctaatgaatgttgcaatcttggtgtgggtgtccccctacaatgtaacatgttggtactagggtctcaacgctgttcgtgctctcttcttggttagccggaggctactttggcatatttgtggcaatggtgttcgttattttactaggtaaatcagatgaagactgacatatgaactgaaatggttgggcattttttttctttcttggcttc

SEQ ID NO: 21240 - DNA, 2348 bp, Zea mays
  Clone ID: LIB3279-197-F9_FLI
gaaaagctcctagtcctaggttggagcggttgcgttgtgctagctacactagattctagctagagagctagtagctacttgcattaggctactagccggccatgggttgctgccgcaccggcgtccactgcggtgctggaccgagaagaaaccaactgcggcgatgttggggtggtgggggctcgctcgtgctgctattgctgctgctggtggcggtggcggtgccggcgcgagggcagcggtcggacggcgtggtgatcgcgcaggcggacctgcaggggctgcaggccatccgccaggcgctggtggacccgcgcgggttcctggccggctggaacggcacgggcctcgacgcctgctccggcggctggacggggatcaagtgcgcgcggggcaaggtcgtggccatccagctccctttcaagggccttgccggtgcgctctccgacaaggttggccagctcgccgcgctccggaggctcagcttccacgacaacatcatcggcggccaggtgcccgccgcgctcggcttcctccgggagctccgcggcgtctacctccacaacaaccgcttcgccggtgccgtgcctccggcgctcggcgcctgcgcgctcctgcagacgctcgacctcagcggcaactctctctcggggagtatcccttccgccctggccaatgccactcgcctctatagggtcaacctcgcgtacaacaacctctccggtgtggtgccgcccagcctcacttccctcccgttcctcgaatcccttcagctcaacaacaacaatctcagcggcgtaattccgctcaccgttggtagtctcagattgctccacgatctttctctcgctagcaatttgatcggtggaagcatcccggatgggattggcaacgccacaaagctcagaaaccttgatctctctgacaaccttttaggtggtagcctccctgagtcactctgcaacctcactttgttagtggagctcgatctcgacgggaacgacattggtggacacatcccggcatgctttgacgggctcaggaatctgaccaagctgtccatgaggaggaatgtcctcgacggcgaaatcccggcgaccgtcgggaacctctcggcactgtcactgttcgacgtgtctgagaacaacctcaccggagatattccgacctccttgagtggccttgtcaatctcggttctttcaatgtgtcctacaacaatctctcgggacctgtgcctgcagctctctccaacaagttcaattctagctcgttcgttggaaaccttcagctctgtggcttcaatggctctgccatttgcacttctgtttcatctccgctcgtggcgccgtcccctccactgcctttgtcagagcggcgaacccggaagctcaacaaaaaggagctaatctttgcggtagctggcatcctcctgctcttctttctactgttctgctgcgtcttcatcttctggaggaaagacaagaaggaaagctcgccccccaagaagggcgccaaggacgtgaccaccaagactgtcgggaagaccggcactggcgcaggcaaaggcaccgacaccggcggggacggcggcggcaagctggtgcacttcgacgggccgctctcgttcacggcggacgatctgctgtgcgcgaccgcggagatcctcgggaagagcacgtacgggacggtgtacaaggcaaccatggaggacggcagctacgtcgcggtgaagcggctccgggagaagatcgccaagagccagaaggagttcgagccggaggtgaacgcactcggcaagctccggcaccccaacctcctcgcgctcagggcctattacttgggacccaagggcgagaagcttctggtgttcgactacatgcccaaaggcaaccttgcttctttcctccatgctcgtgcaccggacagcagcccggcggactggccgacgaggatgaacatcgcgatgggccttgcgcggggactgcaccacctacacaccgacgccaacatggtgcacggcaacatcaccagcaacaacatcctcctggacgagggaaacgacgccaagatcgccgactgcggcctgtcgcgcctcatgagcgcggcagccaacaccagcgtgatcgccgccgcgggcgcgctcggctaccgcgcgcccgagctctccaagctgaagaaggccaacaccaaaaccgacatctacagcctcggggtggtcatgctcgagctcctgaccggcaagtcgcccggggacacgaccaacggcctcgacctgccgcagtgggtggcctcggttgtcgaggaggagtggaccaacgaggtgttcgacctggagctcatgaaggac

SEQ ID NO: 21241 - DNA, 1039 bp, Zea mays
  Clone ID: LIB3279-197-G1_FLI
gttcagacggtccaagaacagcaccaagaaagactccttgccgctcttcttgcttggctactgactaggagagctccctgccgctggttgatcaacagaggcaggcggacggcatggtcagctctatgccgctgtcctcgctgctgctgctgctctccgcagccagcttcggcggcggcgtaaggctcggcgatggtggctacgaggactggaggctcggcaccgccacctacgtcaaggagttccagtcacaccctctcaatgacggcggtggcgcctgcgggtacggcgacctggacatcttcaggtacgggcgctacacgacggggctgagcgcggcgctgttcgggcgcggcggcgcctgcggcggctgctacgagctgcggtgcgtcaaccacatccagtggtgcctccggggcagccccacggtggtggtgacggcgacggacttctgcccggccaacatgggcctcgccgacgacgacgccggcggctggtgcaacttcccgcgggagcacctcgagctgtcggaggccgcgttcctccgcgtcgccaaggccaaggccggcatcgtgccggtgcagttccggagggtgagctgcgacagggcgggcggcatgcggttcaccatcaccggcagcgcccacttcctgcaggtgctcatcaccaacgtggcggcggacggcgaggtggcggccgtgaaggtgaagggctcgaggacggggtggatcccgatggggcggaactggggccagaactggcagtgcgacgccgacctccgcgcccagccgctgtcgttcgaggtcaccggcgggcggggcaggacggtcaccgcctacagcgtggcgccggcggactggatgttcgcgcagacgttcgagggcaagcagttcgccgagtagagatcgacgccgaaaaccaagtctccggcggtggtgatgtaagtagaattatacgggtggcttcttgctcgcgagtcgtgaccggtgactcgacaaaacgagacgtattgaatggcgaaaggatttccagtcataag

SEQ ID NO: 21242 - DNA, 581 bp, Zea mays
  Clone ID: LIB3279-197-G10_FLI
ggaccagctagctagctcctcccactgctatcacccgggccccggccagccatctcgctgaaagagaaaagcgcagccatgaagactactagctcgggcattgcagccgtgcctgcccttcctgcagggcaaggcagccaaacccagcgagagcaacaaccagtgctgcgacggcgtgaggaccctgtacgcggcggcggacaccaggcccgacaggcaggccacgtgccggtgcctcaaggcggcctacgttcaggtccacgctgtgctctccgcggcgcaggagctgcccggcgactgcggcctctcgctgtcctacaacatcacccccgacatcgactgcgacaagatcgaatgaagggatactgttcccttaccagaatccatacgacgggatggtgatgttcagtgccctgctagcagtaggctgcatctgcactgagtgactagaataaaggatttggtgatgtttgtgctgattggtgtgttcgcctgtaatcgtgtgatgccgtcgttggcttcttatatccgtgtctaatctcgcaagtgctcgtgtttgcaactataccatttataatgtc

SEQ ID NO: 21243 - DNA, 610 bp, Zea mays
  Clone ID: LIB3279-198-C3_FLI
cagactttggctttgggtgtgcggcgggcggcggcaccgtggcagttggcactgcggtctacagactgcatcagccggcaggactctgcgtctcctcccgtcctccggttctccctgcgacggacaaatctgctgctcgatttctctggttgtccctgtggcggacggcacatcggcaagccaggcagccagctcgtcagctctaaatcagattcagtaattattcattctattttgactgatctaaatccttcggaaacctgcatggattttgaggaacaagatgctgatagtgatcccgatgtcatgaatgattatggtgagctttaactgcgagtctaccactagttatggtgcttaatccttggcaatatgtttgtaaactttagatacattgtatagagcagcagcagctctgtaccatgaaccttgatatatcttgtgtgctgtgtgtgatgaaccatgagcttttgtatcaaactattgtatggagcagcaacagttctgcaccatgaaccttgatatatcttgtgtgctgggtgtgatgaaccatgaacttttgtatcaaactattgtatggagcagcagcagctctgcacttgtgtgcctt

SEQ ID NO: 21244 - DNA, 1584 bp, Zea mays
  Clone ID: LIB3279-198-H2_FLI
ccgctctccaccagcctgaagtcccgttctccgccagccccgttcggctgctactgcagcagcagctttcatccatccaggcatccggcgataagcagttgcatattctcagaacagtggccttgactatcagctcaacagggcaacaggcctgagcggctgccttggctggggactggggtgaccgtgacctacagaggagcaggaggagcggtcgctggcgaagacagagagagagctcgagcgagagagaaccaagggcaaatgaggaactccagctccggtccagcagattacgagcggcgttaagggcttaaggcaagtgtgtgagtgtgtctcagtcccatatctgaaagagtgcaacgttgatgaacaaaggtgaaaacggccatattggtagtctcatttttgcaataagctcatcaaaaagatgcttcttcctcgtaagcttctcccatggcggcgctccgctcaggacgcccaggccctggcaggccgcctcctgcgctcctcttcatcctcctttgaccccgaagacgacgaccctccgttcacgcgggttcctaagctcccacctcgggcgccatcgacgccgccgccgaagcccaaggccctggcgggcaagatcaggcccgatgagcctgcgcactccgaccttccctttgacttccggtactcgtactcggagacagacccgacatggaggcccatcggtttccgcgagcccacccggttctcgcccttcggccccggccgcctcgaccgcccatgggacggcacagccgcggcacgcgtcggcgatgatgctagtggcgacgagaggagccgggaggaggttctcggggaacctctgtcggaggaggaggtggcggcgctggtggagaggtaccggcacagtgattgctcacggcagatcaatttggggaaaggtggggtaacacacaatatgcttgatgacatccacaaccattggaaacgtgcagaggctgtgaggatcaaatgtctgggagtgccaacgctcgacatggacaacatttgcttccatcttgaggataaaacaggtggcaaagtcgtatcccgcagcataaacatcattatactgtaccgcggtcggaactatgacccccagaaaaggcctggcgtaccattgatgctgtggaaaccgttagctcctatctatcctaagctcgtgcaaaacgttgctgaagggttgactttcgaggaaacaaaagagttgaggaacagaggattgaattcgccaccacttacaaaactgagatttggttccatgcattcctatattatttaaagacgaacagattatactatggagagggaaggttcgccaagagcgttctgtttcagcagagtgcagttccagcccacaatgatgcacgcatctgccggtgattcacaggagttattattgcgctgcgatattgatgatggttcgggcggattgctgtctgtggaccgtggtgggggcgaggggcgaggccggccaccagtgattcagtgaagaagaaaacaaaccaacacatttgtgtaatcaactttgatgaaacttcaattgaggcgcggcac

SEQ ID NO: 21245 - DNA, 923 bp, Zea mays
  Clone ID: LIB3279-199-C7_FLI
aggatgcaacaaggtggtcggcaaggcactcatgctcgatgagatcataaactacgtccagtcgctgcagcagcaagttgagttcctgtccatgaagctcgccactgtgaacccagagcttgatttcagcaacctgtcgacactcctgcacaaagacatgtaccaacagccatgtggtggcccttcggcaagttcggtctttccactggaaagcgccggcgcagcttttccattctgcgagcaggcggatcttttccacagctttggctcgggtggtagtggtatggaggatctaagcctgctagacacggctctgccccacgcggccagcccacagtttgcttttcaaaagcagcaaagggagttctgggaggatggcctacagcatgctttgcctacccctactaccggtagcgagcaaaggcaggaggaggatgggcttttagtacccgacctttgatggccagttacaagctgatcaggcgaaggctgagttctagtccgtccctggtgatctccaagggctggtatttttgtacatataggtggtggtggtaccaagacctgtgtgtgggctgtgtctgtgtgggcaagcagagctctcctctgctaagctgaccatcattagagtttaggcctgcgactgcgactgcgagctggaattcattccgtgatactgctgcacgtatggcacatggcgactcgattcttgccccccatagagttcgtgcgacccatctcgtgaaaaattggagtaggtcgtgtgctagatagatatggcgcaaatattacatgcgccatcttctaaagctgtactgattattactcctatgtaagaccgctggtggctggtactggagcgatactgtgtcctgtttgttgctttttttttgatcttacgattatgacgaaagtgcaagtat

SEQ ID NO: 21246 - DNA, 693 bp, Zea mays
  Clone ID: LIB3279-199-C9_FLI
gtcgtcttgcagccccgcaacagtcgttagcttagagcatcgcacctcatcgttccaccgtccgtccgtccgctcgttcgcgtgatctgtttgagagttggggaatggaggcctacgtcctgttcgcgcccgccaaggaggtgatcaggttcgaggagcaggaggaggacatcggctgcccgtccgagtcgtccgcggcgcgttcaacgtcgtcgtcctcctcctcgtcagacggggtggacctcgccgacgacgccagctcgtccgggtccagctgtcacttcgagatggcctccctcatgacgcagctcccgatcaagtacgtacgccgtacgcacgtactcgccgatggggcgggcattgctgcggcgctccttcctgattacagagatctgatcctggcgggtgtgctgtggtctgacgccgcgctgcttttatttgggtgtgcaggaggggcctatccaagttcttcgacggcaagtcgcagtcgttcgcgtcgctggcggcggtgggcggcctcgaggacctgcccaagccgccggcgaagcggctcaagacgtcgcggagctgcggcgtcggcctcgaggacgcgcaccgccgtggccctccctccgcgaccggcaggaagcaggcgtccagggctcggctgacgccgccggcgctcgcctcggcgccgagaaggctggtgcgtgc

SEQ ID NO: 21247 - DNA, 1523 bp, Zea mays
  Clone ID: LIB3279-201-C10_FLI
ctgggcgcgccgggccgcgccgagccgagcgagtcgtccactctccactccgcccgccacgcccacgccccgtcctcgcttccgtctcccacaatccaaggacaccgagcagcaggcggcggaagcaacccgctgtgggggcggcgtggagtccagttttgctcggctcgccgctgggatccgccggccggcgaagcggggaagggaagaggggcggagattggagagtacaagcaggggaagatgtcagacgcgctgatcaacggcctcgccggcgccggcggcgggatcatcgcccagctccttacctatccgctccagaccgtgaacgcgcggcaacagacggagcgcgacccctccaagccggcgttcaaggacggcgccgctcgccagttgtatctggttgtgaagaacgaggggtgggagcgcctgtatggcgggcttatgccctctctcgtcggcaccgctgcctcccagggtgtctactactacttctaccaaatattccggaacagggccgaggcaagggcccttgagcgatccaggagagggcttggcgatgggtctgtcgggatgctccagtctctcactgtcgctgccctgtctggctgtgtcaatgtactgctcacaaacccgatttgggttgttgttacacgaatgcaaactcacagaaaggcaatcaaacagcaaagacctcagggtttgaattgtgctcttgataagtcccttgaagctgctacagctgaaaacgctccatataaaacaattgatgtttttcaggaactctacaaagaatctggagttcttggcttctggaaaggggtaattccggctcttatcatggttagcaatcccgcaattcagttcatgctatatgagactcttctgaagaaattgaagaagagacgagcctctaatttcaagggagctgatggattgactgctcttgaaatttttcttcttggtgctgttgcgaaacttggtgcaaccgtcgttacgtatccccttctagttgttaaggcaagacttcaggcaaagcacatgattaacgatgacaagaggcatcgctacaaaggtacacttgatgcgttcacaaagatggtacgatatgagggtctgtcagggatgtacaaaggaatgggcacaaaaattgtgcaaagtgtttttgcttctgctttgctttttatgattaaggaggagctggtgaagggtgctcgactattggtaactggtaacactagtctggttaagaaactaccatcaaagtcatcaagatgaactacgggcatcgcaagcgttagtatatgttcccaaaaagccatttattatccgcataaacagtaaaacaaggtcgacaagctatagagctcgcctctgctttggagatgtcaactgtaggttacacaatagccagtatgattcacgtagggaccaaagactatgttggatagatatttgtatcattcatgtaaaatgtatgtggaagattgaaacagaagaaaataaataagtatgataatttg

SEQ ID NO: 21248 - DNA, 1788 bp, Zea mays
  Clone ID: LIB3279-201-G8_FLI
aacgacaaaaatgacaggactgttgtattcatctcatgaagtgtacatatatatacatagtgaagggacaccacaacgggtcgcaccccttggaattagatcacataaaatattttctaacaggtatcagccgctcgtaggcgctgccgcgtcggacgggtgtagatagcggccgacccggcgccgcggcgcgccccgcgtctatccccccaccacgtttcgtggcgctgaagcgctgctgccctcctgccgtgctgagtcagggttgatgagggttacaacttacaacccccaacggcttctcgtggccactcgcttttcacgcaagacggcagaacctgcacccccgtcccccgccggctcgtgtcgtggtgggtggccacccctcctccgctccgctccatttgggcggaaaccgaatcactcgggtcagtggccacttgaccccctgagctttccttccactttgcaggctcgagatcaccggtcacaaacggcagtggtcgtcgtatcgtaccatggtaatcatgggatcactatgaacggacccgacggaccggcgagagttgtgcggcaaaaggggtcgactcatcgtccatggtgtggttcggccggacgttaaccgacccagtgaagcgcgcgtcgttgtcgctgtagatccgatccggtgcgttgacgatgccagtagtagtatgtactgtagtagctaggtcaactcgggtagtgttatccccaacccttttgccacgtcaggcccaggccaggggagattaccaggggctctctccgccttcccagccagcctgggatgctggtgccgctccccgtccacgcacgccaaaaaaaaagtaaattaagttacgaggaaacatacatacggactctacagcaggattaacgaaagcgagagtggaggggccagcatagcaacgccaacgatggagcaaaagcggcgaagggataaggcccccccgagtggggtcctgtcgcaattctttaatcggacccatcgtgtttccacgtggcggtccaaccctctccgggcgagaagatcggcaagatgacttgcgcggagacgcgcaacgagacccggccggtccgcctccgcccccgacgccgttatatacacgcccctgtctcccccctcgcctggttcgttgccgcacccgctgccgcctgccgtagtgctgctcccggccctccctctaattgctcttgccgctttatgtatttgccgcgcgcggcgacagagaatatacacgagtatatacagtagccgccgccggtggagtctctagctggcagccggccggtcggtcggtactctactctagaagctagagagatactgtactactctgcaggctagctagctagctagctagaggtagaagaggccggcccggcccgattgaagaataagatagagctgtcagctgctgagcgacgacggcgatggtgctctacttcaaggcgcgtccggacgccggcgactacaccatctacatgggcgccgacaagaacgagaacgaggagctcatcaaatacggcctccccgaggacgtctggtacgtacgtacgtcgtcgctatctgctgctacctcttatttcctcgcgacgacgacgacgctctagcttgctagctagctagtcatcatggcgaggcgattcgatggtgggttgggttccgatcgaccgcgacatgcgcgcgtctcggtctgccgctacacgtagaggcagcttagcattgcgcatgccgcacgcatagaggacggcagatggagggac

SEQ ID NO: 21249 - DNA, 695 bp, Zea mays
  Clone ID: LIB3279-202-B5_FLI
gtaaatctgaagttcattattaatgaaataattttgatgtcgtgccctgtcaatttacttgtacaatgcagcgattgaaatttgaacatgaagaggggtggagatattgcttcactttttcgaaaacatgaagcaaagaagcttgctacctccccgacatatccttcttcaactccggcagtaaatcaagggcaacctagtaatgaacaggaggaagaaggagtgatcgaagaaaatcataatcatatgccttcttcttcaccaccaccagcatcgcaatcatcagcaccaccggtttatgatatcaatcgtcttccacatgatccaggtgaaagacaacccatctcaaattatcatgttaatgatcatgatgcaattcgaagagcatatgttctgaaaggtcctttgcaaccatatggacatgaatttccaaaaagaaaaattggagatagagaccgcaactttaattttgtgtggttccataattttccttgggttgaatatagtatcaagaatgatgcagtcttttgttttgtgtgctatttattcaaaaataagaaaagtaagggcaagggcacagatgcatttactgtgggtggatggagaaattggaatataggaagcaaatcacttttgaaacatgcgggttctatggcacacaaggcagctcaagagaaatacattggctatatgaa

SEQ ID NO: 21250 - DNA, 2817 bp, Zea mays
  Clone ID: LIB3279-202-D12_FLI
cgcctcccgactccaagccaaggcagcccacggagccacaccgcacaccccatcccgcccggagcagcaaagcataggtgctcgagcgctccctccagagctccccgcctgccgccccgtcctcaccctcctcggtcgcctcccgccgaggctcggctcccgtccgcagccaccacgtgcgacctcccctcccctgttcctgagaatctccgtaggtcggcatggggtgaccagatcggtgctctccagctgaattctgctcgcggctcgtctcggaggcagccgagatggcgagcgccggcgtggcgggctgctcagggagtgctggcgatgctttgttcagggaactctggcatgcttgtgctgggccgttggtcacagtgcctcaccaaggcgagctggtttactacttcccacagggtcatatggaacagcttgaagcatctacagatcaacaacttgatcagcacttacctttgtttgatctaccacccaagattctctgcaaggtggtcaatgtagaacttagagctgaaactgattctgatgaagtttatgctcaaattatgctgcaaccagaagcagatcaaagtgagcccaccagcccagattctgagccaccggagcctgaaagatgcaacgtccattccttctgcaagaccttgactgcttcagatacaagtacccatggtggattctctgtcctcaggaggcatgctgaagaatgtttgccccaactggacatgactcagaatccaccatggcaagaactgctggctaaagatctccatggaaatgattggcatttccgtcacatctttcgagggcaaccaaggaggcatctacttacgacaggttggagtgtttttgttagctcaaaaagattggttgctggtgacgcgtttatcttttttagaggtgagaacggagagctgagagttggggtaaggaggctcatgaggcaactaaataacatgccatcttcggttatctcaagccacaacatgcatcttggagtcctagcaactgcatctcatgccatctccacaggaactctcttttctgttttctacaaacctagaacaagtcgatcggaatttgtcgttagtgtaaataagtaccttgaagctaagaatcacaagatgtctgttggcatgaggtttaaaatgagatttgagggtgatgaatctcctgaaagaagattcagtgggacaattattggtctgggaagcatgccagctaactcaacttctccatgggctaactctgattggagatctttgaaggtccaatgggacgagccttctgctattctgcgtccagatagagtttcaccatgggaactagaaccccttgatgcaactaatccacaaccacctcaacctcatttacggaataagcgtgcacgaccccctgctttactttctattgctccagaacttcctcaagtttttggtttttggaaatccccagctgagcctgcccaagctttttcattttcaagaccacagcaaactcaggaattataccattcaaatcccagttcaatcttctcatcatcgttgaatgtaggattcagttcaaagaatgaccgttctactccaatcaacagtcatttgtactggacaatgaggcagacaagaactgaatcctactctgctagcattaacaaagctcctactgaaaagaagcaagaatctgctacttctggctgcagattgtttggcattgagataggttctgcagtatcaccagtggctactgttgctagtgttggccaggatcagccacctgctctctcagtagacgttgaatctgatcagctgtcacagccatccaatgccaacaaaacggatgccccagtggcaagcagcgagcgctctcttaacgagtcagagagccggcaagtcaggagctgcaccaaggtaatcatgcaaggaatggcggttggcagggcagtggacttgacgaggttagatgggtatgctgatctccaccgcaagttggaggagatgtttgatatccagggagagctttctgccaacctcaagaaatggaaggtcatttacacagatgatgaggatgatacgatgctggttggggacgatccatggaatgaattcctcaggatggtaaaaaggatatacatttactcttacgaggaggccaagtctttgactcgcaaggcgaagccgccggtcgttggtgacaccatcaagccagacccaaacaaattgccaccggaatctgacgtaatcaaacaacaatgctccgttgctgctgattatcaggactgatggatgctaacttggctcctaccttttctttcccctcttggatgtcggtcacgggtcatgggaggcaatgccacgctccttgggacttgtaagagttatctgttttgttgcttcacgggcccaaagggcgcttccctgcaccatctgccttggtttggaacggcttggaccgccgtggtccttttacctgcagcaaggaaaggaatggctgggagggaatggatactggtatcgttccgtgtgtggcaccccgtgatctgtttgccgtgctttgtaggaggcatggcgtattgccgggtactttggttttggagactgccactgactgctgccgtcgtcggggacgctcctctcacctctggtaaataggactttgtacacaattattttgttagtagcagtatatgtacatcatcggtcatgttgcttgctacatgtactcctatgtagcatcctcccctgcattttagtcctggctaggtatcagatgctctggtgcaaaaatgtctctgcttgttcc

SEQ ID NO: 21251 - DNA, 1056 bp, Zea mays
  Clone ID: LIB3279-202-E11_FLI
gccggctcggcccttgacccatgagtagcctgatccgcttgctcttcaccctcgccgcggccatcggcgccgcctcgctcctcgtcgcctcactccgccgccgcgcgccgcctcccgggcttcccgccaagctcgtcccctcctcccacatggcaggacgcaaccggagtttcgtgctgtggctgcacggcctcggcgactcaggcccggccaacgagcccatccgcaacctcttctccgccccgcagttccggctcgccaagtggtcgttcccctccgctccccgcgcccccgtatcatgcaacaatggttttgtcatgccgtcgtggttcgatatccacgagcttcccatgagcgctggctctccgcaagatgagactggggttctcaaggctgtggaaaaggtgcacgccatgatagacagggaagtagccgatggcatccaccctgagaacatatttgtttgtggattcagtcaaggaggtgctctgacattagctagcgttttgctttatcccaagaagttaggtggaggagcagtgttcagtgggtgggtgcctttcagttcatcagtcactgagaggatttcacctgaagcgaggaagaccccgtttctttggtcacatggaatggctgacaaagtagtattgtttgaagctggccaggctggtccaccgtttttgcaaagcgcgggtgttaactgtgaattcaaggcatatccagatctgggccattcgctttcccaagaagagctactttatcttgagtcgtggatcaagagtcgtctaaatgcctctcaagagaaggacagttaactgattccatcatgcttaagtggcatttatttagtatttttattatacgatacacaaatcaactactggtcctggaatttgttattggaatttccgataggttatcgttgtcgggtgactaagggcacatagaaccgggatcttttgctggccatggatgttctgaatgcacttgtaacggccctggtatctgacactctcctagaatacaattcaatacaagggctgcagctctagcttg

SEQ ID NO: 21252 - DNA, 489 bp, Zea mays
  Clone ID: LIB3279-202-E8_FLI
gttcaccaaggagccgaacaacctctacaacatccactccttcaaacactcgggtttggcgaacaagaagactgtgacgatccagccagctgcaaaggactcggctgtggtcctctctactaccaagaccaagaagcagaacgcacctgcgaagctcagccacaagtctgtgatgcgcaaggagttccgcaagatggccaaggctgtgaaaaaccaggttagtgacaactactacaggcctgatctgaccaagccagctcttgctaggctaagctcggtgtaccgcagcctccaggttgccaagtccggtgtcaagaagaagaacaggcagtcctaagcgctaagtttgtgttctgtcagggggcatgttggtgctcgtagtcccagcttatatttatctatgttccaacagttgagacttgttagaactgagcaaaccatgttaagatgctgctgtgtgtcattccttaaaaaaattgccttgcactt

SEQ ID NO: 21253 - DNA, 1180 bp, Zea mays
  Clone ID: LIB3279-203-A3_FLI
gcaccgcaaggcgtccgtcgtcctcctcgccggcctccgccagcgcttctgccagcaatgcagccggtaagccccgcctgcctgcttgctcggaggcacatgcacatgggcgcagtgcagtgtgcagtccggccggcgtgcgtgactcgtacgtgagtgagttcgtgacatgctcaaaggcaccgcccgctttcagttcgtacggctactactactactaaactaaacgagcttaattcgaccttgaaaagtaaacttgcttgcctgaagcgcatcgggtcccttgagaaagcttgcagctttttttcttgggtcatggatagcacggtgagctgctggattggatcctaagctagctaggttgctctctcaactcaagatcttgcagaagcgtctctcagtctcatgcaacctctttggaggttattaatcaaaccgtgctagctcctctgcctggagcttctctccgcctgtgtcactctttcttgacccccggccctcgtctgctcgcaggttccacgagctgtcgcacttcgacgacaccaagcgcagctgccgcctgcgcctggcggggcacaacgagcggcgccggaggaacccggcggaggcgcaggaccagcacggcgggcggggcgacccggggagccaccacctccagatcagataaaaacctactacgtcagcatgctctctctcttctgtcatgcaggacgcacgcacctagcgtcgtcaccgatccatagtccgatatgtgtctcaagtgttgtgtgtgcgcgctctcgccgcctacccctgtcctgcagtgttgcgtagtatatggttctacgacctacacgtactgctgctactactgcgtgctaactttaatctgatggcagtccacagctagctagcacatcacctcctgtaagtaatgtgcttatctatatgtgcaccgaccggaaccggaggcgtgcgtacgctgatctgccacgaagcctactagtagttaaatgtaacgtaacctgcaggcaattaagcagggcgctgctatatatagcgtaattaattgtgcgtatgggtatggtggttcgattatcggatgtgtaatccctgtacgtggccgggcccgtgccaaacgtacggtgacctgtgcaggctctgtgtgtcgatgatgttgtactctgataatgatataatc

SEQ ID NO: 21254 - DNA, 1999 bp, Zea mays
  Clone ID: LIB3279-203-C4_FLI
gcctcacacaccacagcctacagcgcttctgctccagcgcccgcctcgcctcgcctcttctcctcgttctgccgcccgcgcgcgccagcctggtgctcgttccccttcttggctcgtcgagcccagaggttggtggcgtcagggatttgtattggagcggaggagaagggggctttgccccgaggagatcggggacgcgggagggcgcggcgctcgagccgagctcggttcagcgggatcacttggcgtggccggtcctccggggcccatgccgtgagcaaagccaggctttgttgcccgggggagagatcttgcgcttgcaagcggcgcccgcccaccgccatggccggcagcgacgaggtcaaccgcaacgagtgcaagggtgcggtgccgatccacacatgggtgctcatctccaacttcaagttggcgtacaacatgctccggcgggccgacggcaccttcgaccgcgacctcgccgagttcctcgaccgccgggtgccgcccgacgcacgggcccaggagggggtctcctcgtccgaccacgtcatcgacacgtccactggcctggaggtccgcatctaccgcgccgccgctaacaacggcggcgcgggcgcggcggcggtcaccctgcccatccttgacttcctcggcggcgggccgtctccggacccgttcccggtgatcctcttcttccacggcggcagcttcgcccactcgtcctccggcacggccatctacgacaacctgtgccggcggttcgtgaagctgagcaagggcgtggtggtgtccgtgaactaccggcgcgcccccgagcaccggtacccgtgcgcctacgacgacggctgggccgcgctcaagtgggccatgtcgcagcccttcctccgcagcggcggggacgggcggccccgcgtgttcctgtcgggcgacagctcgggcggcaacatcgcccaccacgtggccgtccgcgccgccgacgccgggatcaacatatgcggcaacatcctgctgaacgccatgttcggcggcaccgagcgcaccgagtcggagcggcggctggacggcaagtacttcgtcacgctccaggacagggactggtactggaaggcgtacctgcccgaggacgccgaccgggaccatccggcgtgcaacccgttcgggccgaacgggcggcggctcagggggctccccttcaccaagagcctcatcatcgtgtcgggcctggacctcacctgcgatcggcagctggcgtacgccgagggcctccagcaagacggccaccatgtgaaggtcgtgtaccgtgagaaggccaccgtgggtttctacctgctgtccaacacggaccactaccacgaggtcatggaggagatcggcgacttcctcgcggctaacctctagcagcacatgcacacaaacttcacatgttatagcaagatgggtggtaagcttgactttatagttgtaccgatctgctgctgcttgggggggtggtgggctttgctgctgataaaactctctatctaggaaagaaaccacagtgactttttttttgtttcgtcgtcgggttgctgatcacaaagctgcttgatgatctgcgtcgtggttgatggagggaagcctataatttcgccgtcaatcatctaacattctgtgtacagtggtggactgatggaccaacaaggaggtggacggcctttttttttgttgctgtgtctgatgtagtagtatttctcatctttttatggatcggatgggatggtgcctgcctttcattctatgatgaatcgtactgtctgtctatctatctatctacccaatgccgtcgtggaacatgtttccaatctagtactactactactactaggctagatgcagaggcataagaaaatgtgctactacacctctactgctggtgtgtgtggcttttgtctcctttcttgtccatctctgtatacaatgctgaactgctgctaaatatattgttgtaaccttgaatgcc

SEQ ID NO: 21255 - DNA, 561 bp, Zea mays
  Clone ID: LIB3279-203-F10_FLI
gatcccccggcgggtcggactgcggagcacgggctccggcgagccgctgacgagggcctgtgcggcgaccgagctcgtggcgggagaagatggacgaagcgagcacctccgcgtccggcgccgcgacgaggcgcggcttcgtgcctgcgagatcgggagttttctataggttcacccagcagaacctcccagcttggaagccagcaatgacacctggatgtataatagcaatgttcttgattatcggaataattttcatacctttcgggcttctttgtctccaaacttcaaatcatattgcagaaatcatctaccgctatgatgttgactgtgtgcctgatgcttacagaggaaataggcaagcttatattaaggacagctcgatttctaagaactgtactctggaagcgaaggtagatcgttatgtgattgttgttagactacccgtctagggtttggggtgttccccatgtaattaccgttttacccctcactgtaatgggcctggcccagctactaagcctattaatactactccccatccctggttaggggcaaaag

SEQ ID NO: 21256 - DNA, 1811 bp, Zea mays
  Clone ID: LIB3279-203-F4_FLI
cccaccgcggccccggaaaatttcccccttccccgtagcgaaaccctagccgccgcgccaaaaccaaatcccgccacgcccgaaaatttccggtggtttccttgccgcgaatcgatcgattccgagcgattcggttgatttgatcgatttcgggtgcttcgcgattgattaggccggcaaagccgccaatccttgtgatctctcgaaggggtagagcgcggtcgaccgtcggtcatgtcgaggtgcttcccctacccgccgcctgtgtacttgggaaacccagtggccgtggccgaggcggagtcgaccgctaagcttcagaaagaaagggaaagggctcacaagaagaaagataaaaggagtgacaagaaagctccccaactgggtgagacgtccaaacattcaaagcacaaccataagaagagaaagctcgaagatgtcagcacaggtgatcaggagcccaaaaaagtattcaaagaatcagctgagctattggagaagagtggactctcagaagagcatggagctccttgttttgtacagatgtttcgtgactctcctgagagctcgcaggacagcagcaagagaagaaaggctgtcctgcccagtcccagccaagctaagaatggtaacatcattcgcatcaagctaaaaagtaaccaagatccccaatcagttcttttggagaaaccaagggttctggagcaaccactggtccaacaaatgagttcggtttcatccctgtcgagcaaacaaaattcaatcaatcgtaaggtgaatgtgagatctacagctggccagcagtgggtcaatggtgactcccaagcagtacaaaaatctttggttacagaaaccctgtcaagggcaatgcagagaactgtcccccagcctgcagtgaaggtcacacgtcgggctgatccccagctatctgttaaggcgccggttggaagatctgacctacctccaaagttttcgggaagtgtgggcccttcacctgctagagtgaccggaagattttgtcctgcacctgttaagacgcaacagagaattgagcatccaccttccatggtgtcacagagagttgatcctcaggcgaaggtgtcacagaaggaaatgggatctgctgtttgcctgccacaagctccacatcctcctgttttgcagaaacccaaggacttgcctgttcctaaacagcgggagcctatcaactctttgccaaaagaagagccttgtttctctggaaggactgtggaagcagatcaagggaaggaagctaagctctcccgttcagatcggaagaaaatccacaaaactgagaagaaaaataagaagttcagagatctgtttgttacctggaatccgctattgatggagaatgaaggttcagatttgggtggtcaagactggctgttcagcagtacaagaagctctgatggtagcatggctcaacccacagtacctgatggtttagggccgattcatccgatggtgcagcagcagccttatttgcaacccagggcaacttttttgccggaccttcatatctatcagctgccttatgttgtaccgttttaagtctgttcgtagatgagaagtagatgagatgttgtgaaggagctgtgtggatgtgggatataatggttccctgccgcaattttccagctttgttagcaagattgtaatgtaatgttggttaattattttgctcatttatgtaagcagttgaactgcaaaatcttctttctaggcagttactgtaatacgacacgcaatatttgtttttatccataataatagccttgccacaatat

SEQ ID NO: 21257 - DNA, 615 bp, Zea mays
  Clone ID: LIB3279-203-G6_FLI
cagcgaggcagccgcctcccccaagttccaactcgtgctctcacctcggatctctccatccctttcgtccaaaccaccgaccacaatcagaagcgttggcggcggcgcattccatggcgccgctggggtcaaagctggcgcagctgcagtccaaggcatgcgaggcgacgaggatcgtggccaagcacggatgctcgtaccacaagacgctcatggagaagaacaaacactatgtcgtcgaccctcccaccattgacaagtgcaaggacctctccaagcagctcttctacacccgactcgctagccttcccggtcgttacgagtcgttctggaaagaggttgatggtgcgaagcttctgtggaagaacagaagcagtctgaagggtgaggatgctggtgttgcggcgatgtttggcatcgagttgtatgcgtggttctgcctcggtgagatcgtcggtagaggttttaccgtcacgggctaccatgtctgaagcctgaatgcctgccttacctctatctagcatgggcaaccacattaatccacatttgccgacgaatattatggaatcggtgttgttgatgcaacctcttgctattcggaaccagtattgaatc

SEQ ID NO: 21258 - DNA, 1192 bp, Zea mays
  Clone ID: LIB3279-204-A2_FLI
gaacgacaggcaattcgaggcgggcaatctaatcgtctgccatcccgtctcatcgttctcccaaatctgagagcgttcccaggacctagggttcttgagatccagccccaggatggatccgaaccctagagctcccctcctcctcgccatcgtcgttctcgcgcttggcgtatccgtggtggccagcgccgaggacgacgcgtcgggggtctctctgggccgccgcgccggggggttcttgcacggcctgaagaaggatgcactggcggagggcgatcatggggtggcactagacgaggttggaccggggctgttcgacgcactctttgccagcctctccatgatactagtcagtgagattggagatgagaccttcatcattgctgcgctgatggcgatgcggcaccccaagtcaattgtgttgtctggtgcactatctgcgctttatgtgatgacagtattgtcaactggacttggcagaatagtgcccaacttgatatcaaggaagcacactaatagtgctgctacagttttgtacttgttctttggactacggttgctgtatattgcatggaaatctgacccaaagggatcccagaagaaggaaatggaagaagtagaagagaagcttgagtcgggtcaagggaaatcaaccatccgtaggttctttgcaagattttgtacaccaatctttttggaggctttcatcttaaccttcttagctgaatggggcgaccggagccaaatagcgacaatcgcgctggcaacacacaagaacgcaatcggagtcgcagtgggagcgtcactggggcacacggtgtgcacatctctcgccgtggtaggagggagcatgctggcgtccaagatctcgcagcgaacggttgcgacgatcggaggcgttctcttcctagggttttctgtttcatcctacttctaccctccgttgtgatgaaaaggctgcctgatcgaaacatagatggcgtaacaacccagatcgtaacagcacgcctcgagtcgcgggcttcgtgtaatgtacagacacattcgaacattcctgacaacaatgttctctgccatgctgccttcaagtccgtatgtagaagatgtctcattgagagcatggtcgactttttattgcttgtatccaaactattaacttatactatacgctgctccaatctcgttcaccagg

SEQ ID NO: 21259 - DNA, 1407 bp, Zea mays
  Clone ID: LIB3279-204-B11_FLI
gcgggagtcagggccgtataaaaaactacgcgcccccaatcctccgcaccgcacccagaggaggcaaggagcccatccacctggtcctgctctcaccacaccgccgcgccaatggcggctcgccggcagcaccgccgcggcttcccgctggtcccgctcctgctctccctcctggccgccgccgcgtacggccgcctcatctccgacgggggctcgtccgcgcagctcctctcggtgatccgcctctcggggtcctcgccggccgcgggggcggccaacaaggccgaggagaagtgcgagcagtcctacgggttcctcccctgcaccaccaccgtgctcgggaacctcttcctcgtgctgacgtacggcttcctcatgtacaaggcggccacgtacctgtcggcggggagcgagctgctgctcgagatcatggggcccggcctcgtcggcggcctcctcctccccatcctcggcgccctccccgacgcgctcctcgtgctcgtatctggcctgtccgggagtaaagaggaggcacagagtcaggtactgatcggaatggggctgcttgctggttccaccgtcttcctcctcaccctgctttgggggacctgtgtcgttgttggcaaatgtgaccttgggccaaaccgtgaggcagttgatgtaacagacaccaagggcttcagcttgactggcactggtattacaaccgacgtgcagaccagctatgcagcgcggatcatggggctatctgttatccccttcatcatcgctcagttcccaaagatgttgaagacccaccacgggcagcgtctagctatgttgctggccctcattgtgtcattcttgctcgtgctttcctactgtctgtatcaggttttccagccttggattcagaggaggaagcttgcatacgcaaagcacaagcacgtaatctctgggatactgaggcacgcccagatgcagtcactcggccggctgctaaacgacgatggcacgcccaatgacgacgtcatcagaaagctgttccgcaagatcgacatggaccagagcgaatccctgtcccgtgctgagctgcacgccctcatcgtcggtatcaacttcgaggaggttgactttgacaggacggatgcggtggacaaggtcatggacgacttcgacacgtcccgcaacgatgtcgttgagcaggaggagtttgtgcaggggatgaagaaatggctcaacgaggccaagcgcagcgtgcccgtgggcggcgccttctccaccaagttcatcaatgaataccacgagaggacgaggcaggagcacaacgagctggttgacaggtccgatgaggcggtggagagcgtggagaaccccgggtggtgcatcgccaaggccgtggcgctgctgctgctgggcgccgccatc

SEQ ID NO: 21260 - DNA, 1128 bp, Zea mays
  Clone ID: LIB3279-204-D9_FLI
cttccaaaaaggcaaagcagagcccgcacgcggagaggctacagaagggtatgggtcacctccgcggcctcaccgccgcgcggctcctcgcggcggccttcctgctctccgttgccgtcccggccgccagagcccaggaagaaaccgagcacgaggaggagttcagctacgtcgtcggcgacgagaacgggccggagcactggggcagcatcaaggcggagtggggcaactgcagcgccgggcggatgcagtcccccatcgacctctcccacgagcgcgtctcgctggtgcggtccctcggctacctcacccactcctaccgccccgccgaggccgccatcgccaaccgcggccacgacatcatggtgaggttcaagggcgacgccggcttcctggtgatcaacggcacggcgtactacctgaagcagatgcactggcactcgcccaccgagcacaccgtcgacggccgcaggtacgacatggagctgcacctggtgcacgagagctcggcgaacaaggcggcggtgatcggcatgctctacgagatcggcgccgaggacccgttcctgcaagcgctggagccgtccatccaccggatcgccgacaggcaggaccgggaggaggccatcggcgtggtggacccccggcgcgcgcgcggcagggccagcgtctactaccgctacgtgggctccctcaccacgccgccctgcaccgagggggtcatctggaccgtcgtcaagagggtccgcaccgtgtccaggcaccagctggagctgctcagggaagccgtgcacgacggcatggagaagaacgcgaggccggttcaggacgtcaacgacagggacatcagcatcttccgcccaaagccacacaagcactactagtactagctatgctataggttgcacagtccagcagcgcgcgtagttggtatcgatcagtagtgatgcacgagctagctgacgcggttcagtgttggggagaggtgtctgctgtatatggttacggttttgttttgtaattctttccatctctgttataggactaaataaacagacgaggatcaccttcaggtccactcttcagaagaagaacaaaaaaaaaggaaaagagaacatgtcgattcgc

SEQ ID NO: 21261 - DNA, 997 bp, Zea mays
  Clone ID: LIB3279-204-G11_FLI
gggatccaaagccaaaaccccaatcgcacaggagagaccgagagagaggttttccatccatggctcccggcgtcgcttccgtgctggtcccgcaggagcccgtcctcctcaaggacatcctcgcctcaccgtccccctgcgggaacaccgctgtctccgcccgccacctcttcggcaacggagtcgcgccgccacgctcctcggacgacggcatcaaggacgccgctgccgaccgccacggtgaccgcgacctctccatccccaagatcttcaccggagacgtgctggacctgctcgacgatgctgcgaggctggacctgatgctggcgctgacgggggacggcggtgcggcgtccatggccggcttctccgcgcgcgggtggtgggtctcgaaggaggatggcgacgcggtgcagctgaaggtgccgatgccggggctggggaaggagcacgtgaagatgcgggtggagaaggacgccctggtgatcaagggggaggccggcaaggacctcgagggcgacgacgacaagggcccggcgcggtacagctaccgcatcggcctctcctcccaggctttcaagatggaccagatcaaggctgacatgaagaacggcgtgctcagggtcaccgtcccgaagatcaaggacgaggagcgcaaggacgtcttcgagatcaagatcgagtagggtgtgtgcatcggatgggtcctcccaggtctcctagttgcagtccatatccataccgtagttgcagtccatatccatatcgtagttgccatgagctagtcgtattagtagtttcaattactggagtgcagtagtcgtttctgttgcagagcagtcgtagtactagtagctttctggtggtgctccgtctctgcctgatctgaggcagcgtttacctttctgttggtcttgcaaagttcagttccctggatggcgacgatcactgacgatcttgtgatgaacttcaaatggtaatggaatctgcagttaat

SEQ ID NO: 21262 - DNA, 531 bp, Zea mays
  Clone ID: LIB3279-205-E11_FLI
ggtcggggggtgtgggtgtggggggcggggggagtgacgcccggggtggcgatgacgacgctgcacatggacccgccggcgccgcctgcgcggcgttcgttgtcgaccagctgcgacctgcacccgggcgaggcgttcaccggcttctgcgccgcgtgcctgcgcgagcgcctccagggtctcgaagcgtctgccgccgcggcctccgcgccgggccgcaagtccacatcggccatccggtccctcttcgccagaccgttcgccgccggcagctcgtctgcgtccggtcccgccgagccgccggacctccggcggtgcaagtcgttctcgtgtggccacggcggggacgctcttgccgcagcagcggcggcggcggctggtgctgctgccaccagggcggacgagccgcagcggcgttcgtgtgacgtgcgggggcgcagcacgctgtgggcgctgttccaccaggacgaccgtgaccgcgtccgcgatggcacggcgttcgccgcgttcccagcctcctcatcgaccgcc

SEQ ID NO: 21263 - DNA, 1726 bp, Zea mays
  Clone ID: LIB3279-206-D10_FLI
cgcagagataggcgtcttcgtactcgcctacctccgcggctcaaacctttcccccttctcccaattcccgccgccgctccatcccgtaacgcgacaccatgagggagtgcatttcgatccacatcggccaggccggtatccaggtcggaaacgcgtgctgggagctgtactgccttgagcatggcattcaggctgacggtcagatgcccggtgacaagaccattgggggaggtgatgatgctttcaacaccttcttcagtgagactggtgctgggaagcacgtgccccgtgctgtttttgttgaccttgaacccactgtcatcgatgaggtgagaactggcacctaccgccagctcttccaccctgagcagctcatcagtgggaaggaggatgcagccaacaactttgcccgtggtcactacaccattggcaaggagattgttgacctgtgccttgatcgcatcaggaagcttgccgacaactgcactggtctccagggcttcctcgtcttcaacgctgttggtggaggaacgggctctggccttggttccctcctcctagagcgcctgtctgttgactacggcaagaaatccaagcttgggttcactgtgtacccttccccccaagtttctacttcggtagttgagccatacaacagtgtactgtccacccactccctcctcgagcacactgatgtggctatactgctggacaatgaggccatctacgacatctgccgccgatcccttgacattgagcgcccaacctacaccaacctcaacaggcttgtgtcccaggtcatctcatcccttactgcctccctgaggttcgatggtgctctgaacgtggatgttaacgagttccagaccaacctggtaccctacccgaggatccacttcatgctttcttcgtacgctccagtcatctctgctgagaaggcctaccacgagcagctctctgtggctgagatcaccaacagtgccttcgagccatcttccatgatggccaagtgcgacccacgccatggcaagtacatggcctgctgcctcatgtaccgtggtgatgtggtccccaaggatgtgaatgctgctgtggccaccatcaagaccaaacgcaccatccagttcgtggattggtgcccgactggcttcaagtgcggcatcaactaccagcctcctagcgttgtgcctggtggcgacctggccaaggtgcagcgtgccgtgtgcatgatctccaactccaccagtgttgtggaggtgttctcccgcatcgaccacaagttcgacctcatgtacgccaagcgtgccttcgtgcactggtacgtcggtgagggtatggaggaaggtgagttctctgaggcccgtgaggacctggcggcgctcgagaaggactacgaggaggtcggtgctgagttcgatgagggcgaggatggcgacgagggtgacgagtactagagaagtttgctgatgacgcagcatcaggccagtgtgctgcccttatcccgtgatctgccgagagttgctcctgctatcgtgttatgtgtgtctgttctgaagtattgtgtggtttacaacacctgatgttgtaagagttgttaattcccctgcattgctaccgggttattgagaataattatggctgtttacgttgttgcttcatctcggagatgctttacatttaccaccttgttcatcttttgtcatcagtaaaatcgagtcggcggatg

SEQ ID NO: 21264 - DNA, 620 bp, Zea mays
  Clone ID: LIB3279-206-H2_FLI
tcccacgcccacgccaccccaccgcacgaagagagcgagcgcacgaacgggggagacatggcccactcgccgtcaggatcgcacgtagcggcgacgtcggtcgggaacgaggccttcaccgacgcggtggctgaggacggcggagactccaagctctccgcgctcctcttcgacgtgtcgcagcaggtgcaggacggtctccagagcatgctcaagacgagcagcgagatcgcgcggtgcgacggcgagatcgacgcggagctggagcgcgcgagggatgccgtggcggagaatgcccgagcgctgcacgacgaacgggagagagtccagaaggccgccctcgccgcgctcgacatcctcagcggcggccgttgcgtcatctgaagggatgcccgccgcatgccggcgccaccgacagtctgcccccgacctcagatcacgctcgattctcgcaagattcctgctccatttgtgaatgtcaccgtcggtgttacccttttgcagtagtagtaatattcgcactgatgctggcattactagtaacttgttgcctgttgaactgcaataatagagtttagaatttgagatgtgcacgatatgatcgatggagattggtctgg

SEQ ID NO: 21265 - DNA, 2439 bp, Zea mays
  Clone ID: LIB3279-206-H3_FLI
ttcattggctcgcgctcggcagtcggcacgacggtacttggacttggctattcccaacgccaccccgcaaccgcaacgtctctctagcgtctagcctctgcctgcgctcccacaccagaacaccacaccgctccgcgtgcgtcgcccgcactcctcgcctctgcccgtctgcctaccgtgccgtgccgtgccgtgctccccacccgatgcagccgccgacgcgggccgtgccgagccacagccggagatgagctccaggaaccgttccgccgccgcctcgtccgctgccccggctctccggacaccgcgccgcctgaagcggcggccagttaaggcgtcggcgccggggccgggcagcgggcggcggagcgggcccgcgacgccgctgctgaaatgggacgtcggtggcggcggcgggcgcggtgaggggaggaaggctggcgccgacgaagcgggggacgccgcgcgggcgcgggagaccaaggcgaaggcgacggaggtgtcggtgcggaggctcgcggccggggtttggcggctgcgcccgccggaggccgtggccggcggcgggagcggggtccgcgtgggcgtcgagcatatcccaaggcatctacaagtccagcttctgaagcagaacacttcaggtcatcaccagagttcgaagaatgaggtttcaagccccatatctgttttggagcggaagagtggagagctccacaagggacaacttcatgctacttctgctatgctgcctgtcgctaccatggagaaggcaacgaaatgggagcctggggacataaagggaatggaatcgcatgatgcgtatctgatagccagccagctgaatcttcttgatgaacacagagacaccgcgtatgttgctgacctccagatggagcttcagcaagcacgtgataggataagtgcgatggaaactgagcgacggtcagctaagaagaggcttgaccacttgttcaagaaacttgcggaggagaaagcggcttggaggaacagagagcatgaaaaggtgcgtgctatcctcgaagatatgaaggcagaccttgaccacgagaagaaaaaccggaggcggctggagatgattaacatgaaactcgtcaacgagctgaaggaggccaagatgtcagcaaaacagctgttacaagagtatgagacagagaggaaagcacgtgagctcactgaggaggtgtgcaacgagctagcaagagaggtggatgaagacaaagctgagatcgaggccctgaaacgggactcccagaggttgcgagaggaggtagacgaggagcggaagatgctgcagatggcggaggtgtggcgtgaagaacgggtgcagatgaagcttgttgatgcaaaacttactctcgacgcaaaatacacacagctgagcaaactgcaacaggatgttgaggcgtttattgctgcatgcagtactgctaatggagacgtcacggtagtagagcaagcagagagcataatacaggcaatcaagtcagtcagagcccaagatgctgagttcaggtacgagccaccggccgcatcagaagacatattttccatttttgaagagctgcgtccaagtgaggagcctgtcatcaaggagatcgagccatgttacaagaatagctctgccaaatgtgaaccagaaattcaagaggttagcccaatgaccgatatattcctcgaaaagaaagccaaggcaaactcgaacaaaagccctaaagatgaaagcgacactgaagatggcagcagctgggagacaataagccacgaagatgtccagggttcaagcggttcacctgatggaagcgagccttcggtcagcaacaaggtctgcgacggaagcattccttggaagagcagaaatggattcgagcgtatggagagtgagaagctgaaggatgagtcagctgatgcctgcctgacaaacatgaaccagcccaagaagaaagaatcggccatttcaaagctctggaagtcgtcccgcccaaagaacagcgagatatgcaagaaagacgcagttgaaacggtaaatgcaagatcgtcaaacgtgcggctctcagtcgggacctattccactgttgaaagtggcatccaagaaatagggctcagtccaccgtgtgttgagcagtggagctcaccagactcgatgaacgtccaattcaaccggggattcaagggctgtatagagtacccgcggatgtcccagaagcacagcttgaaggcgaagctcatggaggcacggttggagagccataaggtccagctccgccaggtgctcaagcagaagatctagtgcaggccagaaccagaaggcgaaacattgtaaacctagcattcaatccaaggaataatgtaaaggagtacctagatgcttcgtttttcatgttttagagtaacctgtattgcatgtacaacaaggactag

SEQ ID NO: 21266 - DNA, 1720 bp, Zea mays
  Clone ID: LIB3279-207-F3_FLI
ggaatctgtcacgcagtcaaggatcacgatcgcgagatgctcccatccgaatcccaggatccgaccgtctcacgaatctcgaggcgagctgttcgatcaccactatctgacgtagcttcttcgctcggctcttcttcaccccacccctctcccactcggccactcccccccgcggggacaccgagcgctcgccgccgccttcgagttcggagcggagccacagccacgcatgccaatggccgtctccgctgttaccgcctcccatctcgctctctcttttccagcacgtagtcgccggagacgcgctgcgccccgcgccgcggcaggcggcctaacggctcgcgcacggcggctgcgctgcgagttcgtcgccggtggtgggaacggggcgctctccggagaggacgaccctcgcctcgtcgaccgccaaaaagttcttgatgccgctatgaatgacataaacaactcttttggaaaaggaagtgttacaagattaggcagtgctggtggtgcttttgttgagacattcccaagtggttgtctaacactagattttgctctgggtggcggtcttccaaaaggaagagtagtggaggtatatggtccagaaagcagtggaaagactaccctagctttgcatgcaattgctgaaatacagaagctcggaggaaatgccatgcttgtcgatgcagagcatgcttttgatccagcttattcaaaagctcttggggtagatattgaaaatctgattgtctgccagcctgacaacggagagatggcactagaaattgcggaccgtatgtgcagatctggagcaatagatcttatctgtattgattcggtgtcagcgctcaccccacgtgcagaaattgaaggtgagataggaatgcagcagatgggtctacaagctcgtctgatgagtcaagcattgagaaaaatgtcaggcaatgcctcaaaggctggctgtactcttatgttcttgaatcaaataagatacaagattggagtgttctatgggaatcctgaagtcactagtggagggatagccttgaaattctttgcatctgtccgtcttgagatacggctcattggaaagataaaatctgccaagggagatgaagatgttggtgtgaaggttcgtgtcagagtgcagaagagtaaagtatctaggccctacaagcaagctgaatttgaaatcatttttggggagggtgttagtaaattggggtgcgttcttgattgtgctgagctgatggatgtagttgcaaagaagggttcgtggtacagctacaaagatataagattgggccaaggcagagagaaggcactgcagtatctccgagagagcccaaccatctgcgatgagatagaaaaggtggttcgagctatgataccagaaggatccagacatatgagcctactagctttcgggcagtcatcatcaactgaagatgaacaggcgtatgatgaacaataatggtacatgaggttccgaagatggaacacttgtgaagccgtcaagctctggcttgtgtcccttgcggataacagaaaagatcagaggtaaccaaccaatatggcagttgtgtgagcgctggagtggagttgactaaggtcttgttcggttgtttgggattggagccccggattaattcctagcgggattacttctctaatttatatagattttgatgagctgaaatgaatcctgtcttatttc

SEQ ID NO: 21267 - DNA, 1080 bp, Zea mays
  Clone ID: LIB3279-207-H1_FLI
ggcgactccgaacgcaacgccgatcgtgcgcctcctccctcaccgcgcgccgccgtcgctcccatcggttcctttcaaccggtggatcaccccgctttccataaccgtttatccttggttgtgctcagcgtctggttccgccactggtcccatggctgccccgcgcgccgcggcggcgtcggcgaagcaggtgacgaggcagaactttgcggaggccgtgctggagctgagggcccacctggaggcatgcgactacgtggccgtggcggcgcagaagaccggtgccccgacgggatggcgccgcgcgttgccggtggacactgcggaaacggcgtatctcaaggccaagctcgccgcagagtcctttcagccactccagatcgccgtctgccccttcagacagcgcaactcttacccgtctaccctcgtcgcctacccgtacaattttcacttatttcctagagatgaactacagctcggaatgccttcatacagtttctcttgtcaaccatgttatttatcaactatagctaatgatggttttgatttcaatatgtgcatatatgatggtatttcttatctatcaagggttcaagaatccttagcaagggaaaagatctttactcgtcctcaccaattgttgtcatcaccaaacacatcagttgctgactcagttttcatgaatagaataaagtctaggatagtgaactggcgaaaaagatatgctgacccaagcaaaaaacatgatggctctttggttagttcccttagcagattaatattgggtgctgaaacgtatggttccaggcccagtatgagtattgatgtctgcagtgatcggcaagttcaattggtcttggaggcagtaaaccatatctctgatgaccttgtatctctcgttccacacaaagctggagttggtagggctgtgcgtgtgatctttactaattcgaaagaggataagaatcttctcctgatggatatccagaaattagaagatgaacaaaactttaaattccgtgggtttcgagaagttattgatctactatcatcttcacagaagccaatcatatcatacag

SEQ ID NO: 21268 - DNA, 426 bp, Zea mays
  Clone ID: LIB3279-208-B2_FLI
aggagacggggtccgtccttggctgggacctcgccgtgcggcactggaacgtcctttccacggcgaaggaatattcttcttcggtggaggaggaggaggaggaggaggaggaggaggaggaggaggatgaagaggaatactacgaagaagacgacgacgaggattaagtagacagtgattagattattaatctcagggggtaaatgtaataacagaccttggttgatctaagaaaccattcaaactcgggacaaatgacctttgaaatgctcgccgtacggtaaattcctgtggatttcaaggggggaactggcgttgggaaggccgaaggggcactatggctaatcctagtgttccctatgatttagccgtgactgtaatctgtaaacattttagagtgtgtttggtagcaaagttttgaatact

SEQ ID NO: 21269 - DNA, 2037 bp, Zea mays
  Clone ID: LIB3279-208-G7_FLI
caccaatttctcagtacaccatgctaacggcctcgccgtcgtctcaggtgaagccgcaacaatggggtacatgcggggtcagcgtggcatcgacgccggcgcttcttccgccaccggccgccggacggcttgtcgccgtcgagaccaggaggaggacgaggacggttgcctccgccgcgcttggtcctgtggccaccgagcccgcagaaaggtctcccgtgccacagcctccgccactgtccagcgacgaggagacggtgctccggctcggcaactacgtcccggtcttcgtcatgctcccacttgaagtggtgaccaccgagaacgacctggaggacgcggggaagctgcgggagcagctgcggcggctgcggggggccggcgtcgacggcgtgatggtggacgtgtggtggggcgccgtggagggcgccgggccggcgctgtacgagtggcgcgcgtaccgggacctgttccgggtcgtgcagggcgaggggctcaagctgcaggccatcatgtcgttccacgcgtgcggcggcaacgtcggcgacgacgccgtcagcatcccgctcccgcggtgggtgcgggaggtcggcgaggccgaccccgacgtgttctacacgagctccagcggggcgcggaaccaggagtacctctccattggcgtcgacgacgagccactgttccatggcaggactgccatccagttgtatgccgatttcatgaagagcttcagggagaacatggcggacttcctggactccggcctgatcgtggacatcgaagtcgggcttggccctgcgggggagctgaggtacccgtcgtatccggagacgcaggggtgggtgttccccggcatcggacagttccagtgttacgacaagtacctggaggcggatttcaaggcggcggcggcggaggccgggcacccagactgggagctgcccgacgacgccggggagatcaacgacacgccggaggacactgggttcttcacggcggagcgagggacctacctcaccgagcaggggaggttcttcctgacatggtactcccgcaagctgatccagcacggagacagggtcctggatgaagccaacaaggccttcctggggtgcaaggtcaagctcgccgcaaaagtgtccgggatacactggtggtacaggcacccgagccacgccgcggagctgacctcggggtactacaacctcggcggccgggacgggtacgcgccgatcgcgcgcatgctggcgcggcacgacggagccgtcctcaacttcacctgcgcggagatgcggaactcggagcaggccgaggaggccctgagcgccccggagcagctcgtccagcaggtgctgagcgccgggtggagggagggggtcgaggtggcttgcgagaacgcgctgagccggtacgaccgccgcgggtacaaccagatgctgctcaacgcgcggcccaacggcgtgggtctctccggcgccgcgcggcgcagggtcgcggcggtgacgttcctccggctctcggacgagctcctggcgagcaacaacttccggatcttccggacattcgtccggaaaatgcacgccgacctggattactgccctgatgcggaccggtacggtcggcccctcaagcccctagagcggtccgcgccggagatgcccatggagcggctgctggaagccaccgcgccggcgccggcgttcccgtttgatccggagaccgacatgagcgtcggcggcgggctcgcagaggctgtcgactgggtgctcgacaagatcgcgtggctatttggataggatcagaatcagatcacactcaggcgatcagcatttccgttggacacgaaccattgatccgcaacaggaatggcatggccagtgatacatgcagttgcgctagcagcaccatgtcatgacaccgacattgtacctgtacacgcttctgcttcgtcctccttttagcggaaggctatttatgatatactgatgaaatttacagcatcttgggtaagatgttttagatgttgtttgaattttc

SEQ ID NO: 21270 - DNA, 587 bp, Zea mays
  Clone ID: LIB3279-209-F6_FLI
gccgcccgtcggcgattcgcaatggccttcgccggcaacgccgacgactcggcggaggactattccgcggaggccaccgtggtgcgcttcgacccgccgctccctctcctccgggcgccagtcccctcgccagcatctagcggcgagggccccgtcctcgccttccgcgacgtcgcgagctggcgagccgcctgggaggccgccgaggccagcctcgtctcccagtgcgagctggccgaggtgcctcgcgatagtcatgcaaggcagtaagtttagcagctgcaaatatcaaggagggcaaaccagctcctggctactggagctcagtggttagggttgacaatgcccccataatcgccggactatgtttgtttcacttatgttttttttactttgtgacgatgtgttctttgtggaaaccggaatggttagggttgacaatgcccccataaccgctggactttcaatgtggcatttatatttgtttcctttttgaaaatgttgtttccagtttccccccagttgggggcaaagagtacaaactacctcctggcatctgaataccagtggtaagggtggcccgtgct

SEQ ID NO: 21271 - DNA, 554 bp, Zea mays
  Clone ID: LIB3279-209-H8_FLI
gcggcggcggagctggagatccccggtgagtgccagtacgcgggggatccagtgttggtgcgaccgagccagccgacgccgcgccacaccctgcacctctccaacctcgacgaccagcggttcctccgtttctccatcaagtacctgtacgtgttcggcgccgacgccgccgtgcccgccgacgcgctgcgggcggcgctcggcagggtgctcgccgactactacccgctcgccggccggctccggccgagcgccgaggaggatgggaagctcgtcgtggactgcaatgccgagggcgccctcttcgccgagggccgcctcccgggcctcgccgccgccgacttcctcagcggcagcgaccggccgcacaagtcctggaggaagctgcactacagggtggaggcgcagagcttcgtcgccgtgccacctctcgtcgtccaggtcacttggctcgcgtgcggcggcatggtcctctgcaccgccatcaaccactgcctctgcgacggcatcggcaccgcgcagttcctccacgcctgggcgcgcgccgcgcgcgg

SEQ ID NO: 21272 - DNA, 1185 bp, Zea mays
  Clone ID: LIB3279-210-C6_FLI
gtgaccctgttttctctttctggtttaaccgacatgctggtgaaggagaaggtggtgaaattgtgtttggtggaatggattctagtcactacaagggtgatcacacctatgtcccagtcactcagaagggatactggcagtttaacatgggtgatgtcctggttgatggaaagtccactgggttttgtgctggtggttgtgcagcaatagcagattctggaacttccttgcttgctggccccacagccattattactgaaatcaacgaaaagattggtgctgctggtgtagtcagccaggagtgcaagactgttgtttctcaatacggacaacagatcctagatcttctgctagctgagacgcaacctgcgaagatctgttctcaggttggcctgtgcacttttgatggcactcacggtgttagcgctggaattcgtagcgtagtggatgacaaagctgggaaatcaaatggtggtctcaagagtgatccaatgtgcaatgcctgtgagatggctgtggtatggatgcagaaccaactggcccagaacaagacacaggagctcatcctgacctacattaatcagctttgtgagcgtcttccttctcccatgggagaatcagccgtggactgtgccagtcttgggtccatgcccgacattgcgttcactattggaggcaagaagttcaagctgaaaccggagcagtacattctgaaggtcggtgaaggacaagctgcccagtgcatcagtggattcacagctatggacatcccaccacctcgtggccccctctggatcctgggcgatgttttcatgggagtctaccacaccgtcttcgactacggcaagctgagggttggcttcgcggagtcggcctaaggaaacgtatggtttggcgcctcctccagaggaggcaaaacgcatgcgccgagagagaagcttcgcttgtttttaacttgtgtatttatgcggccggcggtgtgaatatgctacatgtttagtgatgctttccgagacctgagacaatgcccgtctgttttaacctggcacaaggaaatttctcgatgtgtttgccatcgtggttaagcccatcttgtacccaattgtcaccgtgcatcctggcaacgtgtactcaagtatttttccttgtgttatgcgtgagatctggctgatcttcctctagtcc

SEQ ID NO: 21273 - DNA, 1098 bp, Zea mays
  Clone ID: LIB3279-211-A4_FLI
gtcctgcgtggtttgagtgtttgaccacggcagcacgagcagcccgctccactcctcccctgccgaagcaccacacaggcacacagcagaagcgaaaactgcaggaaggccaatcgggcctggcaggcatgcttgcccgctgccgcaggtgaggcgacccgcagccgtccgagacgcaccccggcgcaagcgcgcatccgccatggatccggtgtccgaggagctcgagcgccgcagccgctatctcaactcgctcatccgccgtactaagctcagcgccacccctgctccccctcctcagccggagccggagccggagcacgaggtagcgccacagaatccggagccggagccggagaccgcggttgggaagcgcgaggaggccaaggcggatccagtggtcgttgaggaggagaagcgggaggccaaagtggcgggggacgggaaggggaaagagatcaaggggaaggacgacgggggtcccaaggaggacaacagcaggaaggtgtcagtgcgggtgcgcgcggccgacatgcccctaccgctgcagcgccgcgcggtccggctcgcctacgaagccatcgtcgccatgccgcgcctcgacagcaagcgcctcgccctcgcgctcaagaaggaatttgatacggcatatggtccagcttggcattgcattgttggaacaagctttggttcctatgtcactcactctctgggcggtttcttgtacttctccgtcgacaaggcctatattctcctcttcagaaccgctgtcgagccattagcccatccgcgatgaggggccatgaaacagtctactagctagcgcattctgtattcgacatttaactgtagaagggtaaggagagtagaacgatcatcgcccccaccccccaatgcaaatatgtagaactaatctgctgtagctaagtttgttccatgtactgtgcactaatcggccatgtggaccttaacattagctttcagagttgtagcttgactcagctcagttcttccgcgcgaggggaattttctttcgcatcttgtaatgccttgtagccttgttcgcaatcgcaatggaatcagtagatgcatcctgtt

SEQ ID NO: 21274 - DNA, 286 bp, Zea mays
  Clone ID: LIB3279-212-D8_FLI
ctttaaggagtttgacaacgacaatatctgtggcactgtctacgttgtcatgtagatgttcgtcgtgctcaccttcggcatccaaatgcccatggatcgtggtcaagttaccccatctacaccataatcagagacaacatgcaaaacaagattgttttacctttcaattagacattacgctagatgacattcagcgcgtaacgcaatggaaccttgatgtcaacgagcatagtgagtagggtgacatgtgaaataaaatcttccatgcacttagttgatttatttt

SEQ ID NO: 21275 - DNA, 895 bp, Zea mays
  Clone ID: LIB3279-212-E1_FLI
ctctcaaggctcccctcctccacagcctgcagcccagctcacgaggaccaggaggagaagaagttgcatagccgcccatctgcatccacatccacactccaacagttgagtccctcctctccctatcccccccagttgccttatctcctcgcgtcctagctacaaccatacctgcgtgcgccggcagcgagaaaggaccagctaccggccgtgacgttcttctcaccgtacgtcgccgagggattagataaactaagcagggcgctgcacgaggatggggtgcggggcgtcgagccagaaggacgccggggcgccgcggaggcggccggtcagcgtcggcgacgtggtcgttttcctcccgggcctccgcgtgccgagggccgtcgacttggcccaggcgctcggcggctgcctggccaggagcgccgtggaccggctgtctgctctgcgatcgcgggtcgtcgacatggcaatgcgagagtcggcggcggcgctcaagcccaggcggagggcggcggcacggcacggtgtgtagagaccggggtggtgtggtatacagcgccgtggattggtaacctagtttttgtctgcaagctggaggcttccactgctgacctgggctgtcgcgtccccgttcgcttctgtctgtgtgcagggtctagtacagccaatcttctacaagccctcgaagactacttgccggctctgctaggactggtaaaagaaggtagcgtcttgaggaacaaagtgcacttcacctggagtaaccaggaggataatgctgaggagacggccatgccagacgcctggtacgaggtgctgtccatgctgcatctgatggccatggtctgcctgctgcaggccaacgccctgcttctcccgaggtcatacggcg

SEQ ID NO: 21276 - DNA, 1347 bp, Zea mays
  Clone ID: LIB3279-212-G5_FLI
gcgaaaccgaaagagaggcagagcttggcaatggagctcccgtggggaatgctgctgccgctgctgctggtcctctccgtctcgtcctcgtcatcgtcgtcggctgctgccacgctcgccgtcagcgctccgcccccactgcctgttcctcctcctcgtcatgctcaagacgccgaaggcatgctcatcaacggcaacttcgagacggcgccgcggaagctgaacaagaccctgatcgtggggcgccactcgctgccggggtggacggtgcagggccacgtggagtacgtctcgggcggtccccagcccgggggcatgttcttcgcggtgccgcacggcgtgcacgcgctgcgcctcggcagccgcgcgtcggcgtcgcagaacgtgacggtgcggccgggggcgctgtacgcgctcacgttcgcggcgacgcggacgtgcgcgcaggacgaggccctgcgcgtcgcggtggcgccgtcgctctcggcgcccgccgacgtcgccgtgcgcacgctctacagcggcgcgtccgccgacacctgggcctggggcttccgcgcctcctcccccgtcgcgcaggtcacgttcgccaaccccggcgtgcaggaggaccccgcgtgcggcccgctgctggacgccgtcgccatcaaggagctgcccgcgccgtacccgaccaaagacaacctgatcaagaacgacggcttcgagatcggtccccaggtgctcaggaactcgacggtcggcgtgctgctgccccccaagcagaaggacgcgacgtcgccgctgcccggctggatcatcgagtcgctcaaggcggtgcgattcatcgacgcggcccacttctctgtccccgcggggcagtacgcggtggagctggtggccgggcgggagagcgccatcgcgcaggtcatccgcaccgtgcccaaccgcgcctacaacctgtcgttcgccgtcggcgacgcccggaacggctgccacggctctatgcttgtggaggcgttcgcgggcaacgtcacgcagaaggtgccgttcgattccgccgggaaaggtgggttcaagacggcggcgttcaggttcgtggccggcggcgtccgcacccgcctcaccttctacagctcctactaccacaccaaggtcaccgacggcgtctcgctctgcggccccgtgctggaccaggtcaaggttgtgcctgtcaaggcgtagtgaaatgcatcgtgagagcgccgagtgacggtctgctctgctcgtcgtctgtagctgtgctcctcgtgatttggtgtggtgggttgtgaaagtgtggtcgaattctggacccttcggaatgtgatcgtggtgtgctgtgctgtg

SEQ ID NO: 21277 - DNA, 1252 bp, Zea mays
  Clone ID: LIB3279-213-B8_FLI
gccattctccccctcccgcgccccgagaagcgctgcgggcctcacctgcccgtcctcctgcctctcaggaaccgcggttcaggaaggaagggaaggcaagtgcctgccggggctcagcaccgatggcgtacagggcggaggacgactacgactacctcttcaaggtcgttctcatcggcgactctggcgtcggcaaatccaacctgctctccaggttcacgcgcaacgagttcagcctagagtccaagtccaccatcggggtcgagtttgctaccaggagcatcagggtcgacgacaaggtcgtcaaggcccagatctgggacactgctggccaggagaggtatcgggcaattacaagtgcgtactatagaggggctgttggagcacttgtcgtgtatgatgtgacacgccatgtgacctttgagaatgtggagaggtggttaaaggagctccgggatcacactgatgcaaacattgtcatcatgcttgttggcaacaaagctgatctgcgacaccttagagctgtatccgtggaggatgccaagggcttcgccgagagggaaagcacattcttcatggaaacatccgcactggagtccatgaatgtcgagagcgctttcaccgaggtcctaactcagatctatcgtgtggtcagcaagaaggcccttgacattggcgatgaccccgctgctccaccaagagggcaaaccatcaacgttggtggcaaggatgatgtctctgctgtgaagaagtcagggtgctgttcatcctaaatcacttatgaccatgaaaaggaaccatatactctccgatcatatgattggtaactgaaaataggactctcttgtgcttcctaacctgttggttatgagattatgttggtgctccagagaaatgattagatgttaagaatttgattccaagctgggacaagaacgttctttccgtggtgtcattgatattcatggtttctttctatggtttatagtgttccacactaattgacattagaatcctccccacacctcacagcttaacataccttgctaaacatgttgtaattggagctactgatgtttccttactgggagcaaagagtgtaactttttctttttatgtcacgagggattatgttccactcggtaaatgcccatctatcgttggtaggcagcaagtgttttagagtgttatatcatgtaattctcacagatgtacaaaatttgggttggaagtttatgttctgcaacagctt

SEQ ID NO: 21278 - DNA, 1401 bp, Zea mays
  Clone ID: LIB3279-213-C11_FLI
gttaattttatttcatggccttggtgatttgaacacatgttcttgtaggttgaatagaagagaagagtagaagcaccaagttgtaccaatggggcgtggaaaagtagagctgaagaagattgagaatccaacaaaccgccaagttaccttctccaagaggcggatggggttgttcaagaaggcaaacgagctagccattctttgtgatgcgcaaatcagagtcatcatattctctggcagtggcaggatgtacgagtactccagccctccatggaggtgcgtgaagcattatttatttatttatttatgtatttatttctgaagcttgtttagtacagtaacatataaggtttagctttattctgctataaggtttaatgagttcaaaagattcatgagagcttcagaactgatttgcaattattcctgccaactacaatcttacaactacaatcttatgtttagtacagtaacatcagaagagacgatgattaggtgtgtggtataagaccggtatcatatattcttattgccagcggttaatagtttcaatagttattatttatgactgagcacccatgaggggttttacgacgtttttatatcgtgctatatatcactgctgcttctggttgcagaatagcaagcgtctttgataggtacctgaaagccctagcacccgttttgaggagatggacatccagcagaaaatcgtccaggagatgactaggatgaaggatgagaggaacaggctgaggatgatcatggcgcagtaaatggcggaggacctggcctcattctccgcgcaggatctgagcaaccttgagcagcagatcgagttctcgttgtacaaagtttgcctcaggaagtaagagctactcgaccagcagctgctcgagatccgccaaagggtacacaacattccaacctccgatccgtcgcttggtagcctgtacacatctctctttcaaaaggcccgagttgttgtgacacacaagagttctgtttcgtcctaaactttcgaaggagatgcacatgccagcagagcagggcggctacctgtgcctcatgaacctggctgcggctactgctagcgggcaacaccagcaggctggcgagatggtgggaattaacccgaggccgttcctgtggtgggacgtgggagccagtggcagtggcagccagagccagcagctgctgcacggccgggacgccgcggagtcgtcgatgacggcgctggggctatcaccgcagatgcataggtacagactccatccgcgacagcccaacctgcggcaggacaccgacgtccacggctggctatggtaagctgccgccgcctgtgcctggacactcatttgatgttgactgttgtggcagaggagtgcgttctcaaatctc

SEQ ID NO: 21279 - DNA, 1619 bp, Zea mays
  Clone ID: LIB3279-215-C5_FLI
cacacgcagacacgcttccgcggcgccaccaccttccgccctccgctgcccgctcgcctccgcgcccgaaaggcaaagcctcctcgctcctgccccgccccctcctcgcggcgtcggtcaaaccctagcacaccgtacgcgcaggcccgcccgctcccattccccacctccacccatggcggcgctctccgcgcccctccgcgccgtcgccgccggatcccgcgtcgccgcgtccgaccccgtcaaggtctcgtgcgtgaggagcactggctcagctcacttcggctgcgccttcccctacatcagggcctcctcttcggctgcgaggaacctcgagccgctgagggcgatagccacgcaggcgccccctgccatgccacaatattcgagtggggagaagacaaagattggcatcaacgggtttgggcggattggcaggttggtcctgcgaattgcaaccagcagagatgatattgaagttgtggctgtgaatgaccctttcattgatgctaagtacatggcctatatgttcaagtatgattccactcatggcccgtttaaaggttctattcgtgtcgtggatgattcaaccctcgagatcaatgggaagaaggtcacaattacaagcaaaagagatcctgcagagattccatggggtaactttggggctgaatatgttgttgaatcttctggtgtcttcacgacgactgataaagcatcagcacacttaaagggtggtgcaaagaaagtggtgatatctgcaccatcagctgatgctcccatgtttgtagttggagttaatgagaatagctatgatccaaagatgaatgttgtttctaatgcaagttgcactaccaactgccttgctccacttgccaaggttgtccatgaggaatttggcatcgtggagggccttatgacaactgttcatgcaacaacagctacccagaagaccgtcgatggtccttcgatgaaggattggagaggaggacgtggtgctgcccaaaacataattcccagctccactggtgcagcaaaggctgttggaaaagtcctgcctgagctgaatggaaaactcactggtatggccttccgagttccaacaccaaatgtctctgttgtggatttgacatgccggattgagaaaagcgcctcctatgatgatgtgaaagcagccatcaagacggcatcagagggtgcactcaaaggtattcttggctacacagacgaggatgttgtttccaatgattttgttggtgattcaaggtcaagcatctttgatgccaaggctggtattggactgagctcttccttcatgaagctcgtgtcttggtatgacaacgagtggggctacagcaaccgggttctggatctgatcgctcacatggctcttgtgagcgccaagcactgatgttcgtactcgttcctccagtaccagtagtagcctagataagaggctgcagttttgacggccattttcttttagctgttgtttggaataaaagaccaaatgttggaacacttggaactcgcgcaaaactggaatccgattcatgacctgtgttttagttgtagagggggcaaatttgcatcgtactatatgcgggattgttgatcgg

SEQ ID NO: 21280 - DNA, 439 bp, Zea mays
  Clone ID: LIB3279-215-D2_FLI
gccgccgccaccccggtttccttcgtaagcccgtcgtcctccgtccgcgactctgcgcgagaagcgagagtatggacacccaagtgaagcttgctgttgtggtgaaggtgatgggaaggaccggctccaggggtcaggttacccaggtcagagtgaagttcttggatgaccagaaccgtctcatcatgaggaacgtcaagggaccggttcgcgagggagacatcctcacactgctcgagtctgagagggaggctaggaggctgcgttgaggcgggatactgtcttggtagttttcgtatggagttggatgtcatctaattgtgctatgtttgtcaaactttggtatgacctttaaaacacctgccttgtatgattatttgtgagcctggtggtaagattgcagtttggtttttatgatccggttgagggtatgtttggc

SEQ ID NO: 21281 - DNA, 2716 bp, Zea mays
  Clone ID: LIB3279-215-E2_FLI
cggacacgtgggctgaaagctgctaaggttggagatatgaatgttataaagatgctcctgatgggtaatgttgatgtcaatgaagccgactctgaaggaaacacagcacttcactggtgccttagtggtgcttcatgtaccaaggaaccaaggattgtgtggcttctgctcaagaatggcgcaagagttttccaggggaacaaattagggctcacaccagtacacagcgctgcagctaagggcaattacaaagctcttcagtcacttctgcttcatgcccaagattgtgttgatatacctaccaagaccaaagaaacgccattattttttgcagtgaagaatggttctgtggattgtgcaaaacttcttttgcgtttcggggctgataccaaagcccggaacctgagaaagcaaagacctattgatgtggcaacatcccaggacatgcgtttcatccttagctctgcaaatgtgttactattttcagggaaccataactcacctcaaaagaatcgtgtgatgagaaaggaaatttacaaagagcttggtgatgaatttgacgattttgacaaggattcctgtgatgaaagctacactgggcttaagacatcagtagggcaacgtgatttctgctccagtaatctttctgcacaagggcctaagagtaagagccaatatgttccaaaacaagcacaaggttcaaagtttgtgcctcggaataatcattggccgaagcatgattacactcgcaaaatttttgttggaggactcccaccttcagtagactcagaataccttattgaattcttcaatgctgagtttggtcctgtggaggaagcagtagtcatcggcataccaattggcaaccgagttcagtcccgaggttttggctttgtaaaatttgagagagaagaggatatgataagtgcaaaggaagctcatcatgtttacatgcttgggaagagagtggaggtaaaggatgctgttgctagagcatacttgcctttagaagaccaaagatatacttctttgaggcaattcatcaaggagcggccaaagatccacagggtgctggatggtgaactgactgaggaacacaacatccagaagcggcgaccattgccagaaaagtgtcttccatcctggttctttatattcaggaagtggttacctggatttcttgaagatgaaacagcacgacttagaggagagaggtatccgttgagctccctgaagggtgatttcagagcgacttgcaggatggagcttgatcacaccgcacttggttatcctaagctaagtgactttatccgctccctccctggcatctgcagaatgtgtgtagttcctgttggaagtggacctgcaacgcacatggtcctccttccaccactctcacgaccgaagtatgtacccctgctagagccttgttcctttgatcatgacgagcttgcagaatcagtatcagatcagcactccccacgatcaccacttaacactaacatcgcggatgactccccacgtaacactgacagccagcagggtgatgatgcatgcagtgagaccaatgttcagatccagcaagttgatgatgcatgcagtgagacttgtgttcagagtcagcatgactatgggaaaagccagcaggatggaagttcctccgacaatggtagcttactggacgatattcctgccagtactacaaagcttgatctgattgagtctgtaacttcagtaaagcctgctttgattgaacctgtacttccaagaaagcctgatctaattgactctgtacctccaagcaagcctgatttggttgagtgtgtacctccaaggcccaaattgattgagtccgggtttcttcctcaaaagaatgaatccgggcctgtacagaagcctaatttgcttggttttggaccttcaagaaatcttgagttgattgagtccaggccttcagcatgcttcattgatagtccttttgaaaggacagcagttactcctagcagctgcgaaggtgaaatgagattctctttcttccagtctcagtgggacaagtacctggcaccatatcccaggagtgactcctgcatcatatgtcgatcttgtgaagctgggatgcaacttgttccctgctttcataagatatgtgttgcgtgcatgatgaggtgcaatgtcagagcatgtatggtttgtggcacttctgtaagtggagttaagtcatcccctgcagtggatgcgacatacagatacatgggactcaccgagcgtgttttagatctgagatgccagttgatggtggtctgccgtggagctgaggcaatagtcagatgctcaccatgtatgcacaccatcgcttgccggggttgcttccttgcctcagtgacactactgaaatcctgcaccacctgtggctgcatggttgaacacttcaagatcgtttgacaagacttatctcccaatacacagtagtattactaagcaatctaaggtatagaataaagcaagcagtcctacgatctgaaggggagatctgattactctcgttcggttttgccacacttgtgggatgcgctaacaggctattttggtagtggtataggcaccctcgctcttgtgagcctgaggtgctctcttttgctccctttctgttcttccgtagaaacactttttcagtatcagacatgctcgatttatatgctattgctatttctgcttc

SEQ ID NO: 21282 - DNA, 534 bp, Zea mays
  Clone ID: LIB3279-216-B10_FLI
tctggacgaggccaagggagatgaagctcgcggggctcaagtctgtggacggcgcccacgaggagtccatctgggcggcggcgtgggcgcccgccgctgaccaccgccccacggcggtgctcctcactggcgcgctcgacgagaccgtccgcgcttggctccccgacgacctcgctgccttggggtcccccacgcggggccacgcgctcggagtcgtctccctcgccgcccaccccgccggcgcgctcgccgccgccgtgtcgctcgacagcttcatccgcgtcttcgacgtcgacacgggggcatccgtcgccacgctggaggcgccgccgtccgagatttggggcgtccagttccatcccaaggtgaaatggagaagggtggaagaaggacaaagatgaaagaagaaggaactgagatgataaaaatagggtcgcagaaagaaataagacgaaaaaactttcttgtttatttgtactgaaaatatgtaacactctctttggatttaataaagtgtgtcaactttagacgaag

SEQ ID NO: 21283 - DNA, 586 bp, Zea mays
  Clone ID: LIB3279-217-B6_FLI
ggcagcaacagcctgcagccggcagtcctcgcctccgcctcctccaccctgaccgtcaacagaggaagacgaggatgtcgggatccaaggtgtacaccctcgaggaggtggctaagcacaacaccaaggacgactgctggctcgtcatcggcggcaaggtgtacaatgtgaccaagtttctggaggatcaccctggaggcgatgatgttctgctgtcttccactgccaaggatgctaccgatgatttcgaagatgtggggcacagcagcactgcccgtgcaatgatggacgagtacttagtgggtgagattgatgcagccacgatacccaccaaggtgaagtacacgccccccaagcagccgcattacaaccaggacaagacccaggagttcgtcatcaagatcctccagtttttggtccccctcgcaatactgggtctggccgtcgctgtaaggatgtacaccaagtcggaatctgcctagtctcttgtcatcaacgctgcaaacataacatcatccacaaactgaataagttagtgttaaaatgctgcaaagatcattaattctgaaacttgagtctttgctgt

SEQ ID NO: 21284 - DNA, 1492 bp, Zea mays
  Clone ID: LIB3279-217-D11_FLI
taaaaaaaaaaccagaaaacgcagccacctccctccaggctccagctagcgtccgtccgtccgtccggccggccagcagcagcagcagactcgctcgctccaagccaggcgccggggcgcgcgatggacgacgacaagcagcagctggcgcggcaggaggaccaggcagggcgcgcgtcgtgggtccccggcgcggtcatcgtgggcgcgggcccgtcggggctggccgtggcggcgtgcctggcggcgcgcggcgtgccggccacggtgctggagatgtcggactcgctggcgtccacgtggcgccaccgcacctacgaccggctgacgctgcacctgccgaagcgcttctgcgagctgccgctgctccccttcccgcgcgggtacccggcgtacccgtccaagggccagttcgtggcgtacctggaggcgtacgccgcggcggcgggcgtggcgccgcggttcggcgcccgcgtggaggaggccgcgttcgacgcgggcgccggcgcctgggcgctccgcctggcgggcgctggcggcggcggcgccggcgacctgctcctggcgcgctggctcgtcgtggccacgggcgagaacgccgtgccgcgcctgcccgacctgcccggcgccgcgcgcttcgccggccgcgtcctgcacacgtgcgactacaggtccggggaggagttcgcggggaggaaggtgctggtggtcgggtgcggcaactccggcatggaggtcagcctggatttgtgccgccacggcgccgcgccgtcgatggtggtgcgcaacacggtacatgtgctgccgagggagatgctgggtctctccacgttcggcatcgccatggcgctgctgaagctgctccccgtccgggtggtggaccggatcctcctggcggcggcgcggctggcgctgggcgacacgggcaagctcggcctgaggcggcccaagacggggcccatcgagctgaagaacctcaccggcaggacccccgtgctggacgtcgggacgctagcccacatcaaaaccggcaaaattaaggtagtgggagcagtgaaggaggtgacccagcgcggggtcaggttcgcggacggcaaggaggagcagttcgacgcaatcatacaggccacggggtacaggagcaacgtgccgtcctggctcaaggacggaggcgacgtgttcacgagcgaagggatgcccaggatccccttccccaacggctggaaagggaagaacgggctctacgccgtcggcttctcgcagcgggggctgctgggcgcctcggccgacgccctcaacatcgccagggatatacaccgtcagtggacggacacggccacaagacccgtcgtgctccgatgtaacagtgctgtcgtctgactcgttttgaccccgcgggaaccccccgtccgtgtgtgtgtgtgtcactgtgtgtttagtgtacagaagtaacacaaccgatgcaagtggttatatatatatcccgtctctt

SEQ ID NO: 21285 - DNA, 1371 bp, Zea mays
  Clone ID: LIB3279-217-F4_FLI
gcaagctagctagagctagccaagccgcggcgtgcctccgctccggccggcccgcccctgtcagagcccccaccgccgctgccacctccgccagccgtcaccccaggcgttggatcggggccctctcgatccgcgcccggcgaatccagacggacccgcattggggttggggccccttcgatccggcgcttggtgggggtttggctgggagctccaggctgaggggacggggcggggggacctgatccttcattccgttcggatttcgcttttcccccgtggggtctcgactgccggagggggaggaggacatggatttggcgtcggtcaacgaggagctggccgagatcgacgggcagatcggcgatatcctccgcgtattgcaaaatgggttccagaagctggagaagatcaaggatgccaaccgccgcagcaggcagcttgaagagcttactgataagatgcgagactgcaagagactcatcaaagacttcgagcgagttagcaaagctgaggctgagcatactgatccagcaacagcaaaaatgttgcatgacagaaagcagtcgatgatcaaagaattaaactcctacgttgctctaaagaaacagcaggcaagtgaaaacaagagaatcgatctttttgatgggccaagtgctgaagatggctttggtgaagaaaatgtcctgttagcatcaaatatgacaaaccagcagttaatggatcaaggcaatcaactaatggatgaaactgatcaagctattgcacgatctaagcagactgtccaagaaaccgtcaatgtgggcacagaaactgcagctgctctgaaagcacagacagaacaaatgagcagagttgttaatgagttggattccatccatttctccatcaaaaaggcatctcaattggtgaaagaaatcggtcgacaggttgcaactgatcgatgcatcatggccatgctttttctcattgttgctggagtcatagctataataattgttaagattgtgaacccacacaacaaggacattcgcgacatccctggcttggcaccacccgtcagcaggcggctgttgcgatagaggacaggtgaattccatacgtggtgtaaaaattgatgtggcgcggcgccttggcaagcccatctgtattcgacgtcttgtaaaacgctgctccagtcatgtggtatattgctgtaaaacttctcatgggatccactcctactccttggctacacacagtgcgtgtatgttcctcctagttcgccttcctgtttttgcaaaactaactctgaacggtgttctgttagaatcatgtgcacacatgatggttgagatgtgtctatgatgttcattgtgacgaacgattctt

SEQ ID NO: 21286 - DNA, 575 bp, Zea mays
  Clone ID: LIB3279-217-H7_FLI
gttatagatgccactcgggttggaagtatagcccgtctgatcaatcactcatgcgagcctaattgctattcacgtgccataactattcttggagatgaacacatcatcatttttgcgaaacgggacatagatccatgggaagagctgacatatgattataggtttttttcaagtgatcaacgacttccatgtttttgtggattccccaaatgccgtggagtagttaatgatgttgaggcagaggaacagtcggctaaaatcagagttaagagaagtgaattatttgaaaaaagtgaaaagtaaaggtacatcatattggttgggatatgacatgcttgtgtgatatgcttgccagtgcctaaaggcaaattctaaaaaatggttgagtttcattcttgaatcctgataattcttctcattatttgagtggaagacgaatctaattgtataggtacccaatataggatcggcaatccaatttggggacataagttgaatcaattgtcgtgtaccattgaaatgttagttgttacacatatttcggccatttatcttgttgaacctaccctattttc

SEQ ID NO: 21287 - DNA, 2086 bp, Zea mays
  Clone ID: LIB3279-218-A5_FLI
ctcgcacgcaccaccccggtccgccgcgatgcctcccttcccggcggcgaccaccacctcccacctcgccctcctcgtgctcttctcatcttcctcccttttcttcctctacaaatccctccgcctccgccgcaaaccgtcccccgcccgcactgccactcctacccttctcttcgcctctgtaaccggcacctccaaaaccctcgctgcgcgtctctccgcccgactgaccgccgatgccggtttccccgtccgcgccaccgacgctgccaccttcgaccccgacgaccttccttcagtccatctcctcctgctcgtaatccccacccacgacggcggtgcgacgcccccttctgcggccttcctttcgcgctggcttgaggagtccgccgctgacttccgcgcgggtgcactcctcctttccggtctccgcttcgccgtcttcggggttggttcccgggcctatggggagaccttcaacgctgccgcgaggaacttctcgcggtggttgcgcgcgctcggcgccgttgaagtggttcctctcggggagggcgacatcgatagcggggatctcgaagcggtgttcgaggagtggaataggagggtgctgagggtggtgaagggcgaggaggttggttatggggctaatgaaaaaaacaatggtcttgacgagttggagttggaaggggaggattgggatgacgacgatgaggagatggtggatgcggaggttgacatggaagatattgctgggaaagcaccggcgaggaggaagaacgggaatttggagggtgttctagctaatggagtgcataacggtgtaaaggacatggtcacaccaatcattaggacgagtttggagaagcaaggttacaaaattattggttctcatagcggagtgaagatttgcagatggactaagtcgcagctgcgaggtcgtggagggtgttataagcactcattttacggcatagaaagtcacagatgcatggaagcaactccaagtttggcttgtgcaaataaatgtgtattttgttggagacatcacacaaatcctgttggaaagagctggaaatggaagatggatgaccctcttgacattgtgaatgctgcaattgaccagcatactaagatggttaagcaaatgaagggcgtaccaggagtaaagccagaaaaacttgacgaaggtctgtcacctagacattgtgcgttatctctggttggtgaaccaattatgtaccctgagataaatgctcttgtggatgagctacaccgaagacacatatctacgtttctggttacaaatgctcaatttcctgaaaagattaaggcattaaaaccaatcactcagctgtatgtcagtgtggatgcagctacaaaggagagcttgaaggctgttgataggccactattttcagacttctgggagcgtttcctggattcactcaagtcactgcatgaaaaagatcaaagaacggtttaccgactaacactggttaaaggctgaatgcagaagagatagatgcatatgcgaaactgctagatcttggccagcccgatttcattgaaatcaagggtgtaacatactgtggctcgtcagcaacttcaaagttgactatggaaaatgtaccttggcactctgatgtaaaggaattctccgaggtgttggcatcgaaaagcggtggtgtatacgaagtagcgtgtgagcatgctcattcatgttgtgtcctacttgcaaaggtagataaattcaagatcaacggcaaatggcatacctggatagattatgaccgtttccatgaactggtgacatctggaaagcctttcaatagccgagattacatggccatgacgccctcatgggctgtctatggtgcagaggaaggtggattcgatccggatcaatctcgtttcaagaaggaaaggcgccatggaactgctgccctcagaagttgaagttgatcttattgagaagacatggacctgctactcccgaacactgacctatgttactgctttttagaggcaaaaactttggaagcaaggatttttgaaatgttagcttccaagccatacattttctgtt

SEQ ID NO: 21288 - DNA, 766 bp, Zea mays
  Clone ID: LIB3279-218-F8_FLI
tcaatcaaatagacaagaggccacctctaccaccgccatccgcagtccatacagtgacccccacgaggtcaagaacctgtacgaggagaggaaagaacctggaagagaggagcttgaggagttgaggagatggcgagcgccgagggcgagaggtgggtgggactggcgacggacttctcgcaggggagccgagcggcgctgcagtgggcggcgaccaacctgctccgcgccggtgaccacctgctgctgctgcacgtcatcaaggagcccgactacgagcagagcgaggccatcctctgggaatccaccggctcccaaatatggagcaaaacccgacatggaaaccttggacctcctgaacactacagctacccagaaggaagtgagcacaccaagcctctgattatggtggttgtgaaagtcctgtggggagatccgcgtgagaagctctgtcaagttatccatgacaccccgttgagctgcttggttataggaagcaggggccttggcaaactcaagagggtgctcttaggaagtgtcagcgattacgtcgtgaacaacgcaacctgccctgtcaccgttgtcaagtcatcaagcaccgaaggttgatctcatcaccgaaatgcctgaatattgctgttgttataataaaagatggttggcctcatgaagaacatgcactagtttctagctacctgaaacatgttgaaccgggcaatcctattgtaataatagacaaagtgccttatgaagggcatggttatgt

SEQ ID NO: 21289 - DNA, 1000 bp, Zea mays
  Clone ID: LIB3279-218-G12_FLI
tttgctgctctccgaccccgagctccgaaggccgcagcatcaggcgaggcccccctcgcgtgtgaccgagatggcgctgccgaatcaggggaccgttgattaccccagcttcaagctcgtcatcgtcggcgatggtggaactggtaaaactacatttgtgaagaggcatctcactggagagtttgagaagaaatatgaaccaaccattggtgtggaagttcatccgttggatttcaccactaactgtggtaagatcaggttctactgctgggataccgcagggcaagagaagtttggtggcctcagggatggatactatatccatggccagtgtgcgatcatcatgtttgatgtaacctcaaggcttacttacaagaatgttcctacgtggcatagggatctgtgcagggtctgtgaaaacatccccattgtcctctgcggtaataaggttgatgtgaagaacaggcaggtcaaagccaagcaggttactttccacaggaagaagaatctgcagtactatgaaatttctgccaagagcaactacaactttgagaaacctttcctgtaccttgcaaggaagctggctggtgatccgaaccttcactttgttgaagctgttgctcttaagcctccggaagttaccatcgacatggctatgcagcagcagcatgaagccgagcttgctgcagcagctgcacaacctcttcctgatgacgatgatgatctgattgagtagaaaggatcatgagtcttggacttgagcaggagttgtgccttgcacgatttaagttgttctagggtggactctctcttgagttatcattgtctggatcatctttttctccttggacttgttgcaacttttgagtgtggaaatggattggaatagtcgccatgaatttgctggctactttatacatgtctttgttcataaaccttgttttaagatgaagttgtggcaatcctcttagtgctaatataatgttctattgtcagctgt

SEQ ID NO: 21290 - DNA, 2212 bp, Zea mays
  Clone ID: LIB3279-219-D12_FLI
gggggattctcacacccatagaaactgaacctactacactgtcatatcacacaagaagagagcttcagcgtgtgagcaagagcaactctcagaaaagaaacaactagtcaagagtcaagactgcctgcggcctgcctgccctccaaggctccaactctccgaggctccaaagtccaagctacttcggcgtccctgactgggcttgtggtctcagtctcagcccttcgttgccgcagagaaccctcagtagttccgctgcaggttgctaattaattaatcgacgagaagtaggagggagcgctgatcgtgtgtgtgcggcatcgcaggatgggggatactagtagttctagccattcaaggcaggatccttctcttcttggctatggcttccatggcgccatcgccaactccactcctcctgcaaacttctttgaccaaggaggaggaggcacctatttcggagagctggaagaagcgttcatgcatcaggtcgcctcgctcagaagaactcaacaggctgcaaccgtctctgcacctcatcatggagacaccaagccctttcccactgctgctggtgctacagctgcaacggctacggctacggctaggccacctcctacactggacatcttcccagcttggcctatgaggtctcgtcttcacacgcccaaggagtgctcgaatgtgacagcagacagcacagacgactcggagagcagcagcaagaaccacagcaaccactcctcagaccagctcggagcagcagcagcagcaaacatggcgagccagttcgagcaagcttcacagcagcagcttcagcacaaaaatatggctacaagttccactccaagaactggcaaggctcttgatccaaaggtaatcagaaggctggctcagaatcgtgaggctgcacgcaaaagccggctgcggaagaaggcgtacattcagcagcttgagagctgcaagctgaagctttctcagatggaacaggacatgcagcgagcccgtacccagggcctctttcttggaggagatccgggtgcaagcaccagttcaggtgccgccatgtttgacgtggagtacgcccggtggctggacaaccacagccggcgcctggccgagctgaacggagccctgcacgcgcacctggcagacggtgacctcagagccatcgtcgacgacgccctcacccaccacgacgagctgttccagctcaaggccatggcggccaaatccgacgtgttccacctcatcactggggtgtggacgacccccgccgagcgctgcttcctctggatgggtggattcaggccctccgatctgctcaagacactgctgccccagctagatccactgacagagcagcaagtggtcggcatatgcagccttcagcagtcatcacagcaggcagaggaagctctctcgcagggcttggagcagctgcatcagtcgcttgctgacaccatggccggtgggtctctgactgacgacgccaacatgagcttcatgagccaaatggctcttgccctcggcaaactggccaaccttgaaggctttgtgatacaggccgataacttgaggcaacagactcttcatcagatgcaccggattctgacagttcggcaggcagctcgatgtctcttggcaattggcgagtaccacaaccgccttcgtgccttaagttccctctgggcttctagacctcgagagatactggtgaccgatgaaggcaattgtgagataagcattgcagcacaaccatcccaaaaccaattttcaaccttctgactgacacatgttgtggaactaaccctcagcataggagcaagagaaaaatgactgcgaagagagattgtttagatgcacgtggcagatatctgagagctacagaggaaagctgggaaatagaagaagctctaaaacaaggagtgtttctggaaattctttagttttcaaaaaacactttctgaaaatgtgtgtacaaggaaattccaggaaggtgaaattgcttcgttgactgcagtgggaaggggaaagagaaaagctagaatctcatgtcgagtactccagtacaatgtgttcttttgtctggtctaaattcttgtaacagctcttcctatgatggaagaatccattcaacaattccacctatgattactggattgagtatgttgaataggttggttgaggctatctagtaatttttatgact

SEQ ID NO: 21291 - DNA, 523 bp, Zea mays
  Clone ID: LIB3279-219-E2_FLI
gagaatccgtcgccatgtcttccagcgaggtcgcctgcacccttgccgccctcatcctccacgatgacgggatccccatcacttccgagaagatcgcgacggtggtgaaggctgccggaatcaaggttgaggcctactggcccgcgctcttcgccaagctcctggagaagaggagcgtcgatgacctcatcctttccgtcggatctggtggaggtggtgctccagctgctgctgctgctgccccggctgctggtggtgctgctgccgctgaagagaagaaggaagaaaagaaagaagaggccaaggaagagagcgatgatgacatgggcttcagcttgttcgactaagctgttcaattccagttctcctgtgggttcttctatgcgaaagacttgtcttatgtgcttttaggtcgaattttgaagatttattatgttatgctgtttgagactaagtatctgtgcaatgagtactgcaaaacctccttgggatggtcttgttagaatgaaaatggttctacatt

SEQ ID NO: 21292 - DNA, 908 bp, Zea mays
  Clone ID: LIB3279-219-H1_FLI
gcgagctagagctagagctatagagatcactctccttctccgcgtgaggtagtgacgtgacgcccagccatggcaacaatggcactgcgcgccgtggcgacggcgctgctggtggcggctgcgtccgtgtgcggcgcgtcggcgtcgacgctggtgctgtacaaccggtgcggggagacggtgtggccgggcatccagccgagcgccgggaaggaggtgctggcgcgcggcgggctgcagctggcgccggggcggtcggcgtcggtgcggctccccgcggggtggtcggggcgcgtgtgggggcggcaggggtgctcgttcgacgcggcggggcgcgggcggtgcgccacgggcgactgcggcggcgcgctctactgcggcggcgccgggggcgcgccgccggccacgctggcggagatcaccctgggcaccgcgccgtcccaggacttctacgacgtgagcctggtggacgggtacaacatccccatcgcgatgacgccggtgcacgggtcgggcgcccggtgcgcggcggccgggtgcgtgagcgacctgaaccgcgtgtgccccgcggggctcgccgtccgcggcgagggccgcgtggtggggtgccgcagcgcctgcgccgcctacggcgcgccgcagtattgctgcacggggcagttcgggagcccccagcagtgcaagcccacggcctactcgcgcctcttcaagtcggcgtgccccaaggcttactcctacgcctacgacgacccgacgtccatcctcacctgctccgccggcgcctcctacgtcgtcaccttctgcccgcaccgccgctgaacttttatttttttaaggtcttcggccgcgtgttgttagttatcctctgcctgcgtttgcgttttgatgttctggcgtgcgttcgtttc

SEQ ID NO: 21293 - DNA, 1338 bp, Zea mays
  Clone ID: LIB3279-221-A8_FLI
cgtcaacatggtataggagccaactatcgatcccagatgtccacagactcctctcttttttccgcctcctccccttccaccatgactaccaacgctccagcattccaatctgcctgcattccaattcctctgcaccatgtggtaaccatccgtcttaccaagagcaactatcttctatggcacgcccaacttgttccgttcctcaggagcgcgaaactcatgggttatcttgatggcacattgccggcgcctgcccaactgatcgcctcttcaacggcgactggtgctgcgcaagtggcaaatccagcatatatacgctggtatgatcaagatcagcagcttctcagcggacttctctcatcgatgactgaagatgttctttgggacgtggttgcagccacctcatccaaggaggtgtgggactctctgtagaagaagttctcctccactcgagctcgcacggttcagatctgtgttgaactcgctacgacaaagaagcgtgactcaacagctgctgactactatcgcaagattacagggctggcaaatgagctggctgctgctggcgctccactccaagatgatgaggttctctcttatctacttgctggcctttctgctgaatatgatctgtttgttacttccattaccaccaagacagatcctctctcacttgacgatgtgttcgcccatctgatggtgttcgaagcacgacaacttcagcatcaggctgagattcaactaaacaccggcatgtccgcgaactatgttgggcgtggtggtcgtggtcatcgcggtcgtggccgcaacacttgtggctgcgggcattttgcacctagggggggtgcgcctcctcgcgcttccggtggtcatggctcatcttctcgtcccacttgtcaaatttgtgaaaaggaaggacatacagcaatcaagtgctggatcgcatggatgaatcctacactgagacaccttcatcctcagctctggtggccactacttcgtacaagatcgatccaaactggtatcttgatacgggcgctaccgatcacataaccagcgatctcgatcgtctggccatacgagaacgctacaacgatgatgagcaagtccacgtcggtaatggagcaggactggcacaccaagaaaagcctgctggacgggaagtgtgaggccggcctatatcccatcaagccttgtgatgtcatcgcccttcatcaagctttgattagtaggactccaagtcgcgcccaatggcatgctcgccttgggcatccctcatctcaagtggtccagtcaattttgcatcttaataaatttttatgtcctagtgagtcttcc

SEQ ID NO: 21294 - DNA, 1774 bp, Zea mays
  Clone ID: LIB3279-221-B4_FLI
ggcacgccccagttctgtcccccccgacatcctcgcccatcgagccgcgcacgccccatgtcgcgcttccccaccacgcccgccgcacacgccgcaaaccgtcgatggaaggtgagcggggcgtggccgcccctggcatggcgctatcaaaataggccctccgcgcacgcctcgctccatcaatggaaggctccatcaatggaagttttacagattgtcttgtcctactgcctactatctgccttgaggaagtaccaaggggtttccgttctgtcttcagtggtgcaaacaaaattggtgatggtggttttggttctgtcttcagtgacgcaaataacgactttgtgctactatgctgaggaacaagctttgtgacttattttggatttgagcagcacggtcataacattgctgttctatttcattcatatgttcgggtgaatcttttctctagcaagatgccaagaaagatgatcctctatgttcactacatcttgcactatgtcctgcgtgttaccggccaaacaaaacaccttggagtgcagcgacgacaggaactacctctacaggaaccggtttaacgagtaatttgacgacgcgtgggtggagcagacctggtgggaagtacaaaacagcatctactgaataaggtgaaggccacaattatgacttgttcgaggaaaaaatataaaaagattccccttccaaggctctgtacagctgttcagccatttctcccttcgatgttggtgtttgtcactgctctgtgtgttggatcaccattgacaataaatatcaaggttgttttgtcaccttttggattaaccatattgttgctccttttttcattccacacctcatcttctgtagctggttatcatcttgctggttcttggtttcttaagtcggatgatgtaaaggcactacaaaggacaatatcttttgagacaggcatgcaaagtagccttcttgctcttgctttagtagatgacgaaaaagtagaagttgttcgagctacggtttaagatggtgtgacgagtggctgatttcgcgaacctgcagataagacgagcggctaaaaacactatcggatattgctttctatgtgttttaaaatataagtatgaaaaacatagcttttctagcttttacaacaccagtttaccatacaaggcatagcatatattttgaatagattcactgattatttacagatttgactcgtgtttcgcttttgtctattttcaaggcataacacatattttgatgaaaaatggaataccttaatgatatgttgatgaaatggtcttttgctaattgaatctactggttcggagctgtatggtgcaacatcacattatttgaagtgtgatgctatcatttttagcttagctactattaagccattgttattttttggcattattcaaaccagaccagtagataaaaactgtattatcaatatggcttacttgattgctaggcaagcagttgattgcacctgtctatggctctggtaagcagcttgtcacacatattttttccctccgaacatggatatttttttattattatatgcttgcaatgcaggatatgcaccctttgaaacctgatgagatggttgaccatctgaaacaaggacttggaaaggagggacatattttcacttatataacgttctgagcaaaatagtagtgttttagtattgcactcacctataacagtataacacttatttgtacataagttatctgatattatatgtttccgttgc

SEQ ID NO: 21295 - DNA, 740 bp, Zea mays
  Clone ID: LIB3279-221-C8_FLI
ggcgccgctcccctcccctcgccgccgccggagatctgatccgatccgatccgatccgtttgtgcttgtgctgcagcaggagtgagaagtaaaaaaatatggctgccctgccactggccaccgccgaagtatgcgacgctaaccctcacctgatcatgaacggcgagctccgcgcgctccagccaatcttccagatctacggacggcgccaggtcttcgccggccccatcgtcacgctcaaggtctacgaggacaacgtcctggtccgcgagttcctcgaggagaaaggccacggtagggtcctcgtggtcgacggcggcggcagcatgcgctgcgccatccttggcggcaaccccgtccagcaggcgcagaacaacgggtgggctggtatcctggtcaacggctgcatcagggacgtggatgagatcaacggctgcgacatcggtgtccgggctctcagctcgcaccctatgaaggccaacaagaaggggatgggcgagaagcacgtccccgtcaacatcgctggaaccaggatttgcgacggcgagtggctctacgccgatcccgatggcattcttgtctccaggacggaactcaccgtgtagacagacacctggttgtatgtgtgtgtgtataaggaatcgggcgctcttgctgttaagcccgagcttgcaataatggattcttgctggatcacacatttatacttagaataatcgaatgcttgcttccttggttac

SEQ ID NO: 21296 - DNA, 354 bp, Zea mays
  Clone ID: LIB3279-221-F4_FLI
ccgggctgggttcgtcgaccggttttccaatgcactgttgtattacaagccagtgttcgagtcacttgatgtggcgatgccacgggactcaccggagagggtgagggtggagcgatgcatgtttggggagcgcattagaagggccattgggccagaggaaggagcagagaggactgataggatggcggctagtagggagtggcagacgctgatggagtggtgtggctttgagcccgtcagactcagcaactacgccatgagccaggctgatcttttgctttggaattacgattcgaagtacaagtattcgcttgttgagctaccaccagcgttcttatctctggcttgggagaa

SEQ ID NO: 21297 - DNA, 769 bp, Zea mays
  Clone ID: LIB3279-221-G6_FLI
gcaaggaggaggaggcaagggaagccgccgccgccgccgccgccgccgcccccgccccgtccctcctcgccggcccgccgccacaggtttcaagatgtcaacctgcacgtttgcgacctcctgcgtgctcttgggcaatgctcggacaaccgatgtcccccagaaagcgctcaagagccgtgtgagcttccttggccgaggcgcgctgcagctgccgagcctgaggtcctcctcaaagaagaagctggatgtctcagcggcggccacgtacaaggtgaagctggtgaccccggaaggggaggagcacgagtttgaggcgccggacgacgcctacatcctggactcggcggagacggcgggggtggagctgccctactcgtgccgggcgggggcatgctcgacctgcgcgggcaagatcgaggcgggcgcggtggaccagtcggacgggtcgttcctggacgacgcgcagcaggaggagggctacgtgctgacgtgcgtcgcctaccccaagtcggactgcgtcatccacacccacaaggagggcgacctgtattaggggtctcacctctggctcccccggttgtgttgagtagaaccttgatgctctgtaaaaccaatcttgatggttgtttatcccctgcctgcctgcctgtgtgctttggtcgttagtcggattgttgggtgaacccacccatggagatggagatggagatggagatggaggagaatgagaaataagggactaaaatgcagtttcatggtttttgcg

SEQ ID NO: 21298 - DNA, 1953 bp, Zea mays
  Clone ID: LIB3279-221-H9_FLI
cacgaacaccgcaccgcaacgtagccggctaggggaagagctctttccttcagctgtgccgtgcacaacgcacggcacgctggtttggtttgcatcgcccccgccaagaaagacgctgccgtgagcgggctgagcgggcgggaagcagcagcaggcgggcgacatgccgagcggcagcgcgttctccgggtcggtgaacctcaagcacgtcaagctggggtaccagtacctggtgaaccacttcctgacgctgctgctggtgccggtgatggccgccacggcgctggagctggcgcgcctcggccccggcgagctgctctcgctgtggcgctcgctggagctggacctggtccacatcctctgctcggcgttcctggtcgtcttcgtcggcaccgtgtacgtgatgtcgcggcccaggccggtgtacctggtggactacgcctgctacaagccccccgccagctgccgcgtgcccttcgccaccttcatggagcacacgcgcctcatcagcgacgacgacaagagcgtgcgcttccagaccaggatcctggagcgctcggggctcggcgaggacacgtgcctcccgcccgccaaccactacatcccgcccaaccccagcatggaggcctcgcgcgccgaggcgcagctcgtcatcttctccgccatcgacgacctcgtccgccgcacggggctcaagcccaaggacatcgacatcctcgtcgtcaactgcagcctcttctcaccgacgccctcgctctccgccatgatcatcaacaagtacaagctccggagcaacatccgcagcttcaacctgtcggggatgggatgcagcgccgggctcatctccatcgacctcgcgcgggacatgctccaggttcacccgaactcgaacgcgctggtggtttcgaccgagatcatcacccccaacttctaccaggggagccggcgcgacatgcttcttcccaactgcctgttccggatgggcgcggctgcgatcctgctgtcgaaccggcggcgcgaggcccggcgcgccaagtaccggctggtgcacgtggtgaggacgcacaagggctcggacgaccgcgcgtaccggtgcgtgtacgaggaggaggacgagcagggcttctcgggcatctcgctgtccaaggagctgatggccatcgccggcgacgcgctcaagtccaacatcacgacgatcgggccgctggtgctgcccatgtcggagcagctgctcttcttcttccgcctggtggggcgcaagctcgtgaacaaggggtggaggccctacatcccggacttcaagctggcgttcgagcacttctgcatccacgcgggcgggcgcgccgtcatcgacgagctgcagaagaacctgcagctgtcgccgcgccacgtggaggcgtcccgcatgacgctgcaccgcttcggcaacacgtccagcagctccctctggtacgagctcgcctacatcgaggccaagggccgcatgcgccgcggcgaccgcgtctggcagatcggcttcggcagcgggttcaagtgcaacagcgccgtctggaagtgcctccgcagcatcaagacccccaccaacgggccctgggacgactgcatccaccgctaccccgtcgacgtcccggaggtcgtcaagctttgacctacgggctacggctacgacgacaacgagcgagctcggctggcaccaccgccgccgccgccgccgtcctactgtgtacctgtacgtcctctctgttctcttctcttcccatttccttcgctattaatataaaaagggtaaaaaagaaagaaagatccatatacactctgacagttggaaagtattgtcatccctcaggccagggattgggtgattggaatttgcttgaatgagaatgaatcgagcacttgtaaattgtaatccatgttgtaactgtgtgaaagggatacatgcattctcctgat

SEQ ID NO: 21299 - DNA, 439 bp, Zea mays
  Clone ID: LIB3279-222-A11_FLI
gtcaggttcacgggcgactgacggacgaggagaagatgaacatctgcagggggctcagctacgagaagctatcgccggaatgctgcaagcacatgttgcggaacggcgagttcccgaccacggcggcggtgcaagcgctggcatcgcagcacacggtgttgaagagcgtcgtgctgcgcgaaccgggccaactgaagtccgtgtcgccatcccctaccgcttccacgggaaagcgccgcgacggctatgacgacgacaatggcggcggcgagaacgacgggcaggtgatcctgtacgcgagacggctggacctgtcggtggagaaccagaacctgcggtcgctccttgacgggatgcactggcgggtggtggagctggagaaggtgtgcagccggatgaagacgcggatgagcaagatgaagcaggccaggagaggcgg

SEQ ID NO: 21300 - DNA, 1364 bp, Zea mays
  Clone ID: LIB3279-222-E8_FLI
cgccagccgccacgccagcgcctgccatggctcctctcctcctcctccccctccccctccgacccatccccgccgagaactccatttcccggctcgcaccgaggccaaggttccctcgtcccttctccaggcggcgcctacgccttcccgccctcctccaagtccaatgcctcgcggccaccggccccgccgcgcccgcgccgcggtggcacgcggcactgtccgccgcggcggggctgtacccggcctacgtcgcagccggcgcctccgtggccttcacgcggcccgaggcgttccggtggttcgtggcgctggcgccggggtcctacaccgctacgctcggctttatcatgctcgccatgggcctcacgctccagctcagtgacttcgccgccctcctccgcgacaggcccctcgccattttgttcgggtgtgccgcccagtacaccataatgcctgtgtttggcgctatcattagccacgcgctggggcttcccccgtcgctctcagctggcctcatcctgctgggatgctgtcctggaggaactgcatccaatgtggtgactttagttgctcaaggtgacgttccattatccgtcgtgatgactgtctgcagcactcttgctgcagtgttccttactcctctgttaacgaaaattcttgctggtgcttatattcctgtggatgccgttaagctctctctcagtactttgcaggtggttgttgccccaattctattaggttcattgatacaaactgcattcccatcagtagctcaatttctgagtccttttgcacctctgatggcagtcttggcttcgtcacttctggcatccagtgtcttctctgagaactttgtgcgcctaagatcgacaattgccgatgcatcccctgtgaatggaatgttctttggggatgtcgggactgtcatcttctctgtcttcttgctgcattttgctggtttctttgtcgggtatgcagcagcagctataggtggtttcaaagaaaaacaaaggagagcaatatcgatcgaggtaggaatgcagaactcgtccctaggggtagttttagcaaccgcgcatttctcctcgcccttggtcgcgctgcctcctgcagtctcggccgtcgtcatgaacatgatgggtagcacactgggtctcgtatggcaatataccagcacttccgtgtcagagaacgaaaccagtgcgtgatctactcttactgtcgccatgtgcttaatctaatatgtcgtatctaccaccaccactactacccgaatatacctttcgagtacttttgatcatgttggggaacggggtcgctgatgatgaccctggaatggaaaaaatcttgctgtcttaatt

SEQ ID NO: 21301 - DNA, 847 bp, Zea mays
  Clone ID: LIB3279-222-F1_FLI
ccgtccgccctcgcgctctccgccagcacgcgggtcagcatcctccggctcccgctggcgctgcggcagcgggcggaggcgcgcgtgcccggcgcccagttccgcccgtcgaccgcgtgctcctgggcgcgccccttgctgcccgagctcgcgggggcggtccctcgtgccggcgcccgcggcactggcaggaggacgcagccgctgttccggcctcgcgcattgacgacgacgtctcagattgccagctgcgccttcaccctgggcacggtcgccgtcctccccttctacaccctcatggtcgtcgcccccaacgccgacatcaccaaacgcaccgtggagagcggcgctccctacgtcgccctgggcctcctctacgcctacctgctctacctgtcctggacccccgacaccctgcgcgccatgttcgctagcaagtactggctccctgagttggcgggcatcgtgaggatgttcgcgagcgagatgaccgtcgcctccgcgtggatccacctcctagcagtcgacctcttcgcggcaaggcaggtgtaccacgacggcctcaggaacaacgtcgagaccaggcactctgtctcgctgtgcctgctcttctgcccggttgggatcctggctcatgtgctgaccaaggtactggcaggggcagttgcccgctcacactgatgattgcaattgggtggttgtattgtatctaggattcttccattgttaccatgtggagatgtggattgagcggaattgatagggtttaccgtttgattcaccaaatgtaacgtaaatgataagagtaacgattcacactcgaataccggtggtaataaatttaaat

SEQ ID NO: 21302 - DNA, 557 bp, Zea mays
  Clone ID: LIB3279-223-B7_FLI
cgagacgaagggcctcacgctttccacatcgacacaaaaaccaaccgccgccacctccctccgctcgcgctagctgtgtgcgttccttgcctgccacaactctagcactcggagtcttcgacgacgacgacgacgacgacgacgacgacgacgacgacgacgacggcaggggaggagaaagagaaacaggcgggcgggtcatccatggagacggaggaggagacgacgcccaaggcgaagaagcggtcgcagtcgctgctcgggagcctgcgggaggcgatcaccaaggtccggttcctgctctcctccagcgcgacgcggtggatgctgctcaggtccctggcccgcggcggcggcggcggcggcgccccggcgcggcgcctcagcttcgacgcgcggccgggcctgctcgacaccatcgccgcgtcgccggactcctcctcctgcagctccaggacctccaggtcggccagcctgggcacggcgaccacccggaccctgtcgcgggccagcagcgccgcgtcgccggaggccctgacgagggcctcgtcgtcgtc

SEQ ID NO: 21303 - DNA, 1483 bp, Zea mays
  Clone ID: LIB3279-223-C11_FLI
ggatggaggttcctctgacgtgttgtagtcttacggacacctcgcgttcaactattttaattggatttgaagtttcttccttctcctcaagtggtgttcacgtataaaccaatcagctcccgtccccgtcccacaccacacacagagaaagagaaagagccacgcattgcacttggcttgcacaagcccggaggagccccaaacgcggcggcggacggaatgcggctgcgcctgcctcagtcagtgaacattctgctgtgatggcgaaggagtactacactacgagcagccttgtggttgggtacgcgctgtgctcgagcctgctctcgatcatcaacaagtacgccgtgacaaagttcggtttcccaggcctcctgaccgctctacagtactcgacatccgctgctggtgtctggatcctcggaaagctaggcttcctcacacatgaccccttcaacctggagaccgcaaagaagttcgcgccggcggctctcgtcttctacctagccatattcaccaacacgaacctcctctgccacgccaacgtcgacaccttcatagtcttcagatccctgaccccgctcctggtcgccatcgccgacacgacgttccggaagcagccatgcccttccaagttcacgttcctgtccctcgtggtcatcctgggcggagcggtcggctacgtgacgacggattcggcgttcagcctcacggcgtactcgtgggcgctcgcgtacctggtgaccataacgactgagatggtgtacatcaagcacatcgtcaccagcctggggctcaacacctggggcttcgtgctctacaacaacttcctctccttgatgctggcccccgtgttctggttccttacaggcgagcacaggtcggtcttcgcagcgatggagtccaggggcgaaggctggtttcaactggacgccgtcgtggcggtggcgctgtcgtgcgtcttcgggctgctcatcagtttctttggcttcgcagccaggagagctgtatcggcgaccgcgttcaccgtgaccggggtcgtgaacaagttcctcaccgtggccatcaatgtcatgatctgggacaagcatgccagtgcgtatggttcggtctgcttgctgttcaccatcctcggtggggtgctctaccagcaatcggttacggtgaaaggaaacggtgcagttgtggcacagcgtgagctggtgcccgagcaacctgaggaggttgacgaggagaaacaaagcttagtttcttcagctaaataatacggtgcaacggatcacttgcaatgataggatccgtttgcaggtttattctttggcctttgaatgggctcgtttatgtgtctgcgaaacaaacatgagggaatactatactagtggaagtagcacttccgtcaatggaagccctgctattgtttgaatttgcatcaagattgcaacgttttgttcactgcgaatgtgtactttagctgataaaggtg

SEQ ID NO: 21304 - DNA, 1533 bp, Zea mays
  Clone ID: LIB3279-223-C6_FLI
gggaggcggcgcaccagggggtggaagctgaggagcgggaggttggagatcgtacggaagcggagcagaagcagaagcccctgaccctccccatccccatccccgtggtggcgctggcggaggaggaactcgtggagaatactaagggaaggcagaagcagcagcagcaggaggaggagcaaacccagaagccaccgccaccgccgccgcctcctccccaggttgccgggtgcgacctgtaccggggtcggtggacgttcgacgcggccggcgagcaggcgccgctgtaccgcgagtcggagtgcgagttcctgacggagcaggtgacgtgcatgcgcaacggccgccgcgacgactcgtaccagaagtggcggtggcagcccgatggatgcgacctgcccaggtacgatgctcggttgctgcttgagcggctgcgcaacaagcggctcatgttcgtgggtgactcgctgaaccgcaaccagtgggagtccatggtgtgcctggtgcagtctgtggtgccctggggccacaagacgctgcacaagttcgtcaacaacggatcgctcaacgtgttcacggcgcatgattacaacgccaccgtggagttctactgggcgcccttcctggtggagtccaactcggatgacccgcaggcgcacagcgtcatgaaccgtgtcatcgcctggcgcgccatcgccaagcacgccaagaactggaagggcgtggactacctcgtcttcaactcatacatctggtggctcaacacattcgagatgaaagtcattcgccgtcatcagcatcagcttgaaaaggaggaggagggggtgaggtggagcaagtacgcccttgtggaccggccggtggcgtaccgggaggtgctcaagacgtgggccaggtgggtggaccgccacatcgaccccaaccgaacaagagtcttcttcatgggcatgtcgcccaaccacgtcacgccgtgggcgtggggtaacgacggcggcatcaagtgcgccatggagacgcagcccatcagcaacaaccggacggggcgactggacatcggcacggattggcgcctgcacggcgtggcgcgcggggtgctggcgcgctacctccgccgcgtgccggtgcacttcgtcgacatcacggggctgtcggagctgcgcaaggacgcgcacacctccgtgcacacgctgcggcaggggaagctgctcacaccggagcagcaggccgaccccaagacctacgccgactgcatccactggtgcctcccgggactccccgacacctggaaccacttcctctacgcgcacatcctctcgctctcctcgtccgcccaggatcactaaccatttttgcccagcctcacaatgtcaagcgcttcctttcaactcctctccctagaccacccacccaccctggatacctattactactgctgctgctgtagatcttcgtttcattttgacaaatgcatgcaggtcttctcttgtaatttctataaaaaacatccctgatttaattttgactagcagtacc

SEQ ID NO: 21305 - DNA, 1769 bp, Zea mays
  Clone ID: LIB3279-223-D2_FLI
gcagtacagcaccagaaacagaaaggtagtagatcaaggaacgccagtgcggcgacaatgaccggcagtggaagcacgggcgccaatggcaagagccagagatccagggccaaggcaatgctgctcgccttgggcaagagctttcctgaccaagttctgcctcaggagaaggttgtggagagctacctccaagaaagcagctgcgacgatcccgccaccagggccaagcttcagcgcctttgtaagcttctttgtttcatcacagttgctgttctataaattcatcttgtcttcacgttgaaaattttaggttgacaaatgcagcttagctctagtcataaacatctatggtctaaacaacaacgctcactgaataaggaaaggacaatgagtacaatagatcaccatatacagccttcagtatttatgtgatgattcgatttgcctccgataaacagatgagtattgcccaaatgattttattttccaggcacgactacaacagtgaagacaaggtacactgttatgtccaaggagctattggataagcacccagagctgaagatggagggtactccgacactgacaccccgccttgacatctgcaatgccgcggtgatcgaccttggtgctgccgcagctcgcgctgcccttgacgaatggggtcgccctgcagctgatattacccacctcatctacatctcatccagtgaccttcgtctcccagggggcgaccttcacctggctgctcgccttggccttagcccaaacaccgtgcgcacttcccttctcttccttggctgctccggtggtgctgctgccctccgcactgccaaggacattgctgagaacaatccagggagccgtgtcctagtaacagctgctgagaccactgtgctaggcttccggccaccaagttatgaccgtccttatgaccttgttggtgctgcgctgtttggtgatggtgcatcagccgtgattataggagcaggtcccatgacaccagcagaaaatcctttcttggagcttgagttctccacgcaggagttcctacctgggactgataaggtaattgatggcaaaatctcagaggaaggaattaattttaaactagggcgtgatttgcctgagaagattgaaagccgcatagaaggtttctgcaggactctcatgaaccaggtagggataaaggatttcaacgatatattttgggctgtgcatcctggtggaccagcaatattgaacaggcttgagttctgccttaaacttcagccagagaagctcaagattagcagaaaagccttaatgaactatggaaatgtgagcagcaatacaatcttctatgtgctggagtacttgagggacgagttaaagaaaggggcaataagtgaagagtggggattgatcttggcttttggcccaggcatcacctttgaaggactgctagttcgaggtgtaaagaaaaccttcacaagctaatataatggtgggtacatggcaagcataaagattaattatatatacagaaacatcacataaagagcatagatgtctcggtggaagctgagcaccacatagcacatcgctaatattttactgtatttgtgttcttcatctatcaaacagtgtaaggtacttgagtttgcttcctagacattgtacaaataaggcactatacagcctgttgtagtgttgttccactgtactatgcaatgattgcaggattactttaatactgcttgtatggatgagtgaactgattacagtgc

SEQ ID NO: 21306 - DNA, 1429 bp, Zea mays
  Clone ID: LIB3279-224-A8_FLI
cgtagttctcaacactccttcgtggggcgtgctcgctcctagaatcctagggtccgcttctgcgtcaccgatcggtagtaagcacagagtcaccgcaccgccgcgtctaggtcaccgccatggccggggactggcaggagctgggccaagcggcggccatcggcctcctcttcgccttcctggtcgccaagctcatctccaccgtgatcgccttcaaggaggacaacctccgcatcacgcgctcccctccgacctcccccactgccgccgccgcagccgcgcctcccgtcccctcccacgacggctccaccgacggcggcagcggcagcgacagcgacagcgactgggagggcgtggagagcaccgagctcgacgaggagttcagcgccgcctccgccttcatcgcggcctccgccgcctccggcaccagcgtccccgaggaagcgcagctgcgcctctacggcctctacaagatcgccaccgaggggccctgcaccgcgccccagccgtccgcgctcaagctcaaggcccgtgccaaatggaatgcttggcataagctgggtgctatgcctacagaagaagctatgcaagggtacatcacaattgttcaggagctattccctaactgggatgcaggtgcaagtgcgaaaaggaaagatgaagatagcattgcttccgcatcagcttcaaaggggcccatgggacctgtgtttagcagtttaatgtatgaggaagacgaaggaaatgaatcagaacttggtgacatccatgtttcagcaagggaaggagcgactgatgacatagtgaagcttctggcagctggtgttgaggtcaacgtgagagataccgaaggtagaagtccgttgcactgggctgttgatcgtggccatcttagtgctgtcgaggttcttgcaaatgcaaatgcagatctgaatgctaaggacaatgaagggcaaacggcactccactatgctgctgtttgtgaaagagaagacattgcagagttgcttgtcaagtatcatgctgatcttcggatcaaggacgaggacgggaacacggcacatgacttgtgcccttcgacttcgagctggtcttttatgaaccaggcaaactgacaacacgaatatacggatatgcttgaaggtggcatctgccaagaaacatgctagctgtatcctaaagcccatacggcacatatggtgtatcttagtgtcatgtgtgacgtgtgggaaatcaggcaggttgtttgcccgcgacatctgccgtacgtggtgccctctctgaaatcagatgagttgttttatcgtcctcatcgaaccagttgtcaaaggatagtattagtgttgggaagatacatgtattgctttaatcaaaagaatcatgctggacaccaatgcaagcccaaatgggaagaaaaggatgtgcggac

SEQ ID NO: 21307 - DNA, 544 bp, Zea mays
  Clone ID: LIB3279-224-B6_FLI
atcgcgaacaggcgccagagtgggatccagcagttgctggctgcggagcaggaggctcagcaaattgtgaatgccgctagagctgccaagtcagcgaggctcaggcaagcaaaagaggaggctgagcgggaaatagccgaataccgtgcccagatggaggctgagtttcagaggaaggttgcagagagcagcggcgactccggtgcaaacgtcaagcgtctcgaggaagaaacggcggcgaagatcgagcaactcacccagcaggccgcaagcatctccccggatgtcattcagatgcttctgcggcatgtcaccaccgtcaagaactgaggagtgctgttcccgaactatgctcgcagacttgtaccgtcgatctatttatttttgtcaagagtgagagtggtgaggaataatatgcccgcttgtatccataattcctgttcgtaactacggaataagccgccgcagctttagcggcaaacgtgactagtactgtcagaacctaccattgttatttggtacaattggtaaataatattgtttt

SEQ ID NO: 21308 - DNA, 578 bp, Zea mays
  Clone ID: LIB3279-224-E10_FLI
gcgtcggttcacttctccaggtaaggaaagggttcgtactcatggcgccgccgcagccaaagtcgggcctcttcgttggcatcaacaagggtcatgtcgtcaccaagcgcgagctgcctccccgcccgtgccaccgcaaggggaaatcaacgaagagggtgtctatggtcaggggcctgatcagagaggttgctgggtttgctccttatgagaagcgtatcactgagcttctgaaggttggcaaggacaagcgtgccctgaagcttgctaagagaaagcttggaactcacaagagggcaaagaagaagagagaggagatggcgggcgtcctcaggaagatgaggtcggctggtacgcacactgacaagaagaaatagagagcatttcaagttcatggagcctgccagagattatgttccagtgtctgattttccatacatgtagaacctaatagacatgtcaaagtattatgtatcgaaccagctcatgggattttgctccttccaatgcatccagggtttatgtatcgaaccagtttatgggatcttgctcctattccaatgcatccatggtttgtg

SEQ ID NO: 21309 - DNA, 1449 bp, Zea mays
  Clone ID: LIB3279-225-C6_FLI
agacggtgccgcaccgcccgcccgttttcttcctcagcgccggcacggcggcacatccactccaccgcaactgagccatctcttctccttcctcctccgcgcttctgaatgatccatccgagaacaagcagccacttctccgatgccgtcctcaatggccaaatccctcctcctccctccccagttcgtctccgtctcaccccgccacccccaccgcgccggattccccgtcctcaagccccgccgcgcctcgctgctggcagccaccggtggagacgtcacgcccgcgccggacgccgacaacggctccaacaccaaccctctcgtcgaggtgccccgcgcgctctggcgccgcaccctgcagcctctcggcgactatggcttcggcaagcgcagcgtctgggagggcggcgtcggtctcttcatggtctccggggccgccctcctcgccctcgccctcgcatggcttaggggattccagctccgctcccgcttccgcaagtacaacaccgtcttcgagttcacgcaggcgtgtggcatctgcgtcggcacgcccgtccggatacgaggggtcaccgtcggctccgtcgtccgcgtcgactcctccctcaggagcgtcgatgccaccgttgaggttggagatgataagatcatcataccacggaattcagtggtcgaggttaatcagtcgggtcttctaatggagacactcattgatatcacacccaaggatccactccctgcaccttcagtaggaccacttgacccagactgcaccaaagaaggtttgattctctgtgacaaagagaggatgaaaggacagcaaggtgtaagcttagatgcattggtgggaatatttacccgactaggtagagacatggaggagattggcgttagcaaaagctataagttggctgaaaaggttgcatctataatggaagaggcacaacctcttcttacacggattgaggatttagctgaagaaatgcaacctttgctctctgaagtccgtgatagtgatctgctgaaggatgtggagactatagctaaaggcctggccgacgcgtctgttgacctaagaaggctgaagtcgtccatgctcaccccagagaacacggatcttattaagcagtctattttcacccttatatttaccctgaagaacattgagagtatcagctcggacatctctgggttcacgggtgatgagacgacaaggcagaacatcaagcttctgatcaagtctctcagcaggctattatgattgtttttcaatgtgcagaacagaatgatggattgctttgctttgctttgctttgtttgagacaggaattgatgctggtagagtagggtgactgtgtgtgtcttggtggcacagaggtgtaggaagagtagcagctaattaatgttccacaaggttttggttattctggtaacaagttttttttt

SEQ ID NO: 21310 - DNA, 1085 bp, Zea mays
  Clone ID: LIB3279-225-D8_FLI
ccagccaacagaggccggtggaaaggagagaatcgagcagagccaccaggttgctcctcatttccactttccactgcgcctccgctgcccatcgccgtccccgaccgcagcgcaggactgaggatgagtgaagaggataaggctgctgcttctgctgagcagcctaagagggcccctaagctcaatgaaaggatcctctcctctctgtccaggaggtccgtagctgctcatccatggcatgatctcgagatcggtcctggtgctcctgctgtattcaatgttgttgttgagatcacaaagggaagcaaagtcaaatacgagcttgacaagaaaactggactgattaaggttgatcgagtcctttactcatcagttgtataccctcacaattatggtttcattccaaggactctttgtgaagacaatgacccaatggatgtgttggtcctgatgcaggagcctgttgttcctggttcgttcctgagagctagagcaattggccttatgcccatgattgaccagggtgaaaaggatgacaagataatagcagtatgtgctgatgatcctgaataccgtcactacaacgacatcagcgagctgtctcctcaccgcctgcaagagatcaagcgcttctttgaagattacaagaaaaacgagaacaaagaagtcgcagttgatgcattcttgcccgcgacaacagctcaagaagccattcagtactccatggacctgtatgcccagtatattttgcaaagcttgaggcagtagattgcaagcaacaatttatctatcatgcgtcttggatgggggcgtgattttaataagccaaatcgcttgctatattgggaaccttggaattgagaacagcgtcactagctgtgattcgctcctttctcgttaaattatcatatgaataggccaagtccatacgtttaccgtgtggcgctctgtcagtcttcgtctacccaagtagctagctgcatggagggatgtctagcgttgctatgagatggcactcgtgggtctgcgggctggctacatgggtccgttcctgtgttttccgtaaaataaaattataattctat

SEQ ID NO: 21311 - DNA, 370 bp, Zea mays
  Clone ID: LIB3279-225-E4_FLI
gcggaagtaagaggcgatggggcactccaacgtgtggaactcgcaccccaagaactacgggcccggatcccgcgtctgccgggtctgtgcgaaccctcatggactgatcaggaagtacgggctgatgtgctgcaggcagtgcttccgcagcaacgccaaggacattggcttcatcaagtaccgctgaagtcagctgggcgggctatctgaatgccatctcttggacagtgtagtagaggcgatgccacaattttaattactgtcatttagatgttcccttcagaactctgctatttaagtccgccatgtttgtgatggagaactgaagctttgtttgttatactgattatgagttacctgtgctttgcct

SEQ ID NO: 21312 - DNA, 900 bp, Zea mays
  Clone ID: LIB3279-225-F2_FLI
caaaaaatccatcaactactcaaccccctcctccagcctctgctcgccgcgcgcggcgctgtagcattctgccgtccatcgtcgccccggctccccatccctgctcctggcgtcaacatcccaaccatccccggagcgcgccaggggtggcggcgacacgaggctgcttacgatcgtcggcgacagcgcctcctcccactccatgccgtcggcggtggcggagcctttgccggatggcaagtacgaaacggatcgtgccggggcggtaaccgtcgtcggggcaggcgcagatcacagcatcgacggagcggttaatggaagcaaagacgagtcgttcttcgaagcgaggccctggctagattccgacagcgaagacgatttctacagcgtcagaggagatttcactccgtcaagaggcagcacacccgttcatccgagattaacgccctcaagtgggcggatgctggcagacaggtcgggtccttctctggtaaaaaagaagcagagactcctcgagcttcttcaggaggagcagcattatgacgacgaggatgacagcgtcaccgatgctagcaatgatctggaaagtagcgcagttcatgccatagaagaagaagaagaacacacgaggactcgtcgcagaagtgagaaatcgaagaagtcatcggggtcaggctgccttccaaccttcatctggaagcgtagcttcacagcctgcaggaagaagaaaaaagaaaaaggagcagaaggataaagcgaccaagcattacggtgccaagttatgattttgtaaagaagaggagaacagattttaataggctgcggaggtgcgtgtacatatacgttttgagcggtgtactctgctaaagaaaaaaggttaaaggaaagatgatgtagggt

SEQ ID NO: 21313 - DNA, 1563 bp, Zea mays
  Clone ID: LIB3279-225-F3_FLI
aaaattcatttttttctttttcatcatgcaaaacttctccctaaaacaaaaataaggggagaagtatacaacacttgttctaagcttgtatctaggttccaccaaacaaaatattttctaattaatccaaagacattttgcaagttaatgtaatagcttgttgacgatgccaaattaaaccaatagaacatgaactatgaattaattacacttatagggtggaggaatccagttaaaatttcaagataaatgaaatgtactagttggtgctcgtcaccattagatctgcttgtggttattatataaggagttaaatgcatgagtgacctttgaacttgtagagtttgtcacataggtccacaaaatttgaaaatatatttttagggtcctgaacttgttaagtggcacaatacaatggttggtatggttttagaaatggacctgaatgcaccatggatgtgtggtacatctcttaacaagttcaaggacctataaatgcattttcaaggtttatgaacctaaccgacatctcttgacaagtgacatggtctttccttatttaagatggagatatttgtccaggtcagctctctctcccacatctaattcttttttccatgtagaaatttgtacttggtcaactaagtcaaaccccaattaatgactttttatttgtaattgtagtcgaattatgactcttgacttaattgactaggactcttgtaaccctcacctatggactatataaagagaactatacaaggaggggagggactctccctaactagcgaacacattatctactgtattatgaattagattgaagttgtatgcacatatgtttgatttgaaaattttgtgggtgaattgatcgttttaacccgcaatatgatgatacattttaattttacaattgtagacacatcaatgtattttattttctatttaatgaattactgaacaaagtatatgtttgtgaagcatctttgagttcccaggcgccggtggaccctgtcctggtggcaagaccagtccaatatttgtttcttcacctagactaaatattagctctctcgacctttttctccaagtaagtcttctgtcgatacacactgaaatttttgcaactagttgaatttgttttttatatttgacattgtgtgaactgtactcccttctgaattaatgccaacacatggaaccttgatgatgttttatgtaataacgcacgattccaaaaacctacttgatttggtttaggctaaccctcatatttgcatgtctattcctgttctttgttgctcatccttttgcaatccatttaccaataattcatttacatgaattatgtagccattgctttatgaattggcaaaatagagctaatccatgaaaacgaagcatgtttgttgcagaattggggtaatgttggtatctaaaaaatgaaaccctatatatttggttcactctaatatctcaatattacaaatcaaacacccctgcttgtttcaacaatatctaccaaaaacatgtgattttttagataacgggacaaggttgaag

SEQ ID NO: 21314 - DNA, 592 bp, Zea mays
  Clone ID: LIB3279-225-G9_FLI
gaaaatttgtatgtaaagttctaacctgagatgtgggaacgggagatatcatggcatatgctggtcctgctgcggttcggtcctgtacaccttagcgtctttccagctgcatggaactacagcttaccaccatttgtagtcttcttgtacaatgcgcactagacaaagcattgaaaccagctgaaaccaatagttgcatgaaattgtagaagcaatggtacgtgtctcatgcacatccaatgctttggcgaggttttagttggctacaatgcacatcgctaaaatacatagcattttcctctcttcctagactccaaacgaccaagattaccaaatagtcgaatccacctacggtcttgttcgattattctctatcccatgtggatttgatgagattagaaaaacttataaaggattttgacttgtttgcgatttaaacacatccaatccacatggatttagagcaaaacaaaccaagcctagctttgtaacccgtttgcgtgaatcgacaccgagagaggatcaagtatttgtgccagggaaggcatgttcgctcctcggatgtgcaaagcagtgaatgcaggttctgcat

SEQ ID NO: 21315 - DNA, 670 bp, Zea mays
  Clone ID: LIB3279-226-C3_FLI
cttccggccggtcttcgtttcgacatccaggaaatggctaccgcggcgcgcctcctcctcgtcgtggtgcttctctccgcggcgataccgatcccgtccttcgcgacaagcttcgtcgtcggcgacaagaggcatcgctgggctcccaacgtcaactatacagactgggcggaccgtcaccagttccacgtcggcgactggctcgaattcaggtacgagagggacaggttcgatgtggtgcaggtgaacgagacggcatacgcggcgtgcgacgccagcagccccatcctcagctacagccgcggccacaacttcgtcttccggctcaaccacacgggccggttctacttcatctgcagccgcggctactgctggagtggcatgaaggtctccgtgctcgtccagccgccgccgccgcccccgtcgctgccgccggcgtcccactcccacgcgtcaagcgccagtgcgcgtgtgcggccggcggccgggctttggtgtgcggctctctctaccttgctgggctgggcggtgctcacgccgccgctgtcgtttcgggtctggagttctggacgtccaggcgcgcacacgagtctaaactctaaagctgtttgctaatgtactacccatttcttcttttttttagtatggaaataagagttccggctttagc

SEQ ID NO: 21316 - DNA, 1536 bp, Zea mays
  Clone ID: LIB3279-226-G4_FLI
gtggaaagaagtgggttcttgcttgagctgagctcttgctgcccttgaatctgtttgggagtggagaacggagtatggggcgcggcaagatcgagatcaagaggatcgagaactctaccaaccggcaggtgaccttctccaagcgccgggccggactggtcaagaaggcacgggagatcggcgtgctctgcgacgccgaggtcggcgtcgtcatcttctccagcggcggcaagctctatgactactgctcgcccaggacctcgtctgtccattgccctctcattctttttattcttttgcttgtttattatcgtccttcttcttttcttgtgtgcaagcaaaactgatcgcaaagacccaaacttggttggaaaggcaaaactgagtaaaaaacacggttaagcgtaaaattgaggacaccaataaaaatgagggcaccagcctaaaaaacccaaatttggtttggtggcaggctgtccaggatcttggagaagtaccagaccaactccgggaagattctgtggggtgagaagcacaagaacctgagtgcagagatcgacagagtcaagaaggagaacgacaacatgcagattcagctcaggcatctgaaaggcgaggacctgaactccctgcagcccagggagctgatcgctattgaagagggcctccagaatgggcagaccaacatgcgcgagaagcagatggactactggaggatgcacacgacgaatgggaagatgctggaggacgaacataagatactgacttttaggatgcaccaacaggctgttgatctgagcggcggcatgagggagctggagaccggataccatcaggtccagcacgacagggatttcatttcccagatgccgttcaccttccgggtgcagcccaaccaccccaacctgcaggaagacgagtagctacagcctgctggatagtgttctgcatgccgctctgaactgaagctgcaggaagacgagtagctacagcctgctggatagtgttctgcatgccgctctgaactggagctcctcacctgcagcttctttctcgcgtttcatcattcagcgttagctggtgatgataatgttggggcgaaggcgaagacgctatcattcgctcgatgccttcgtcgccttcgtcgtctcgcttcaccaacgacgccaaagacgccggtccaatgaggacttcgcgactggacttcgtgggcgtccttcgcccttctccattgcgagacgaaggcaagactccgacgatgtctgctagcctcacgtcctcatcgggtccggaagcccaagggagattcggcccactgtaacgggccccgcaaggataagcgtgttacgggcttcatctgtaatagtcttttctgtaatgacggtctgtaacctcccctggggaatattctaaggatactttgggttcccgagggcataaacgtccttgtttgagcgtggtaggcactcgggcacctataaatactcccgtacagtacccttgaggggacagattaacagagctattgtcgttccc

SEQ ID NO: 21317 - DNA, 1391 bp, Zea mays
  Clone ID: LIB3279-227-E10_FLI
ctacaatttgctagcagactgcaaacatagcgttaagaatatctgatgcatgttaaattggaatctgttgaagtttcttaaatcttaactgctatagtgcaattgggattttggtgaaaaccatttcgctgctcatgcttggatccataattcttgatgcacaaattacatgttaaatatgtccaatggatgaattacacatcgcgttactgtgtgatgtgcttggacagccaaatcacaatcactgccacagttgctaaacctacaattagtagaattacattgagaatagtctgtactattggaggtttatcttgtatttggtacttatcacatttctttgtctgatctgaatataattattatttaggtactagtaagcactactgtcgatggtctgctgctcctaccgcatactagttttattcagatattaattttcatggcctatttggaacggtactggggaacataaactagcatgacagattgactgactgatgcactccccctaggcccctacattgtagctatacagtattttttttgctctcttattgttactgttgcttatcaaaggacaaacattccccattatgccttgtttcttttgagtgttcaaatgcttattgaggttttatgttctataaaatcatttctaactgttagttgtcttcttgtagcaaatttatgatgcatgattggtttggcattgtgttgcagaccaattttttgggttatattctttgttttgttggttctgttaatttacttatggtcattttcggatgcagtatctttgattctggcaacactgattttggtgattccaagatcccaaacactactgagatcaaaaccaagcctgatggttgggaaactacttcaagaggacaggatgggaacatatgggatatctcacagcgagaagatgacattctaatacaggaatttgaaaggcgaattgcttttagtaaacagcagattgctagcttcatcaaaacccacatttttagtcggaggcgtcctatcgatggatggaagtacatgattgaagaaattggccccaacgcaagaaaaggaaaggggagtgtgcaaagattaccaagtgtcagtgatcctgcaacccagccttacagggaagaaactcctgcaattgcttctagttcctccttcagaggcaatcggccatgatggtgttcgataaaccaaatcttttgctggtttcactggcatagtttatacaggcattttccccttccttttggcttcaaatgtatggtggatgactccttgcgaagaacatgacgaactttccttctgcgttgtataattttgtaatgaatgtgacgctttctgatgaaccagcaatggaagcgtttaagttttct

SEQ ID NO: 21318 - DNA, 1272 bp, Zea mays
  Clone ID: LIB3279-228-F11_FLI
gcggtccgcaactcctctaaacccttcctctccctccggcgccggcgccgacatggccgtccactacctcctccgccgcggggtcgccggtggctcactgctccaccctatccgcggtctcttcgtcgcctccaaggagcttgggaggcgtccgttgggctctgcggcggcgggagacgcagcggccgagctgaggggcgcgcgggaggacgtcaggcagctgctcaaggccacctcctgccatcccatcctggttcgattaggttggcatgatgctggtacatatgacaagaacattaccgagtggcccaagtgtggtggagctaatggtagcttgagatttgaagtcgagttgaagcatggggccaatgctggtcttgtgaatgctctgaagctgatccaacctatcaaggacaagttttcaggtgttacctatgcagatctgtttcagcttgccagcgccacagccattgaggaagcaggtggccccaaaattcctatgatctatggaagggttgatgttattgcccccgaacaatgcccaccagaggggaggcttcctgctgctggcccaccttcacccgcggaacatttgcgtgaagtattctacagaatgggcctgaacgacaaggaaatcgttgcactgtcaggagctcatacacttggacgtgcaagaccagagcgtagtggctggggtaaatcagaaacaaagtacactaaagatggtcctggtgcacctgggggacaatcttggacatctcaatggctcaagtttgacaacagctatttcaaggctatcgaagaaaggcgagatgaagacctcctaattctgcctactgatgctgtgctgtttgaggattcctcattcaagatctatgctacaaaatatgccaaggatcaggacgcatttttcgaggactacgccgaggctcatgccaaattgagcaatcttggggcaaagtttgacccgccaaagggtatctcactcgagtagttgtggatggaggtgactgaacaggaaggggtcatgtttctttgcgtgaccattttcgaaggttggcaaggaaaagttattggggttgaatgatagctccacaaattggattcaccgattaaaggattttttttcttagcgtgccctgtttttttagtagtatcctacactatgaataaagcaacacctgtcatttcaagataaatatctgttacactaactgaaagcatctgaatcctaagtggtttcggtgattaatgacgacataagattgttat

SEQ ID NO: 21319 - DNA, 381 bp, Zea mays
  Clone ID: LIB3279-228-H8_FLI
gagaggcaacccctgttgcctacatgaactagtttcttgaggtagggatagatgactctttttttgcggtgtgagcagcaggtttggtgtagcattgtaagttgaataaactattgtacactgtaaaggcaaaggaaagaaagaactaccaacatcttctccattttctttcatttttgggacgaggccggccggtggcctgccatctgtggccgtgggagtgacagagcagcaaacattttgataggcgtataattcaatagggattttccagatacggcacttgtaacagaattttcttggaggtgtatatgaacaacggcgatgtgacaatcttttctgtacggaacatttatactattgagtgattgatttactatt

SEQ ID NO: 21320 - DNA, 848 bp, Zea mays
  Clone ID: LIB3279-229-F2_FLI
ctggttgttgctccgtgtgcggtgcgacagctcctagatctgaatcgaatagtctcgttgatttgttgcataattataaattgattgaataatatacttactaacttgaaaggattcgtctccggcattatctgcacttttgctttattggtgacaaaaacaatttctctggatcatttgctagaatagtaaatctatctagttgtcctataattaagctgtcatcagtaattttgtacatcaaacgttctagaaacatgagctaaatgcatctttactatttttgcctgtatcattctgtctcggcttcgccttttatcccgcgaaaccccaagcgccagaagcaaatttcatctgacctaccttttcgtttttatgcgatgcttcaacaggtcctggagcttgctgggaacgcagcgagggataacaagaagacccgcatcgtgccgcgtcacatccagctcgccgtgcgcaacgacgaggagctgaccaagctgcttggtggtgccaccatcgcgagcggcggcgttatgcccaacatccaccagcacctcctccccaagaaggctggctcgtccaaggcttccaccgtcgatgacgatgacaactgaagctgcccactggagaagaggcattcgctaccgtcttgtttcctaggtttagcacgcagttagtcagcatgtctttgagagctcgatgtgtttgggaatgacaatagctcctttcttggttccctaagatcgttgattcagatgtgaatacggctaaggtttttgggctatgcaactctgggacgtacgccagttgatttgatcgtttgaaaagaaatggaaggacgttaaagcttg

SEQ ID NO: 21321 - DNA, 996 bp, Zea mays
  Clone ID: LIB3279-229-G3_FLI
cgcccgccgctctcctctcctgccggcctgtccaacttcaaaagagcacgcgcttccgccccccgccctcctgtaccgctctccttccccgacgatggatcccgcagccatgtcgagatccccgtgctctatcgtctcgccgggctccttattaaccgccccacttctcccagtacgcctcgccgtccagccacgccgccgagtgcctgcttttattgcgccctccggcaggccgtccgtcgcgcggcgcgccgcggccggagacaagttcgaggccgagacgcccatagagaaaagtttccctcccttcccaactgtcatggacatcaaccagatccgtgacatcctgccacataggtttccgtttcttctggttgacagagttattgattacaaaccaggagaatatgctgttgcaatcaagaatgtgacaattaatgataacttcttcccagggcatttccctgaacgacccataatgcctggtgttctcatggtcgaggcaatggcccaggtcggaggaatagtgatgttgcagcctgaagtgggtggatctcgagagaacttcttttttgcggggatcgataaagtgaggttccggaagcccgtgatcgctggagacaccttgatcatgagaatgactctgatcaagctgcagaagagattcggaattgcaaagatggaagggaaagcttacgttggcgccgacctagtatgcgaaggggagttcttgatggctactggatcagaatgaaggcaggagacacatggattgatggatacataatatttcaagtttttactgtgaaatcagctttccagtctaataagttttgaactgtgtctgtaatagcggtgtaatgtcgttgccttgtagtcttagtgagtgttgctgtgttggtgtgtatgagtaacagggctctaaggttaacaaccactgccatggaatggaacaaatggaaactgacagcgcgtttggttgtttttagagcgttt

SEQ ID NO: 21322 - DNA, 802 bp, Zea mays
  Clone ID: LIB3279-229-G9_FLI
ggaaggagaaaacaggatgggatggaacccggagcccaatacgtggatgatggattattggatgggatgggatggagaaatttgggattaacactccccattaagtgcgttctcgggctgcttgtttcagtctcataccatacatgaatttgcaacgccatgtacttgttgatggcaaggtcaggactgacaagacctaccctgctgggttcatggatgccatttccatccctaagacaaacgggaactaaacgttgcctccgtcttcacccaattagggatgaggatgctaagtttaagctctgcaaggtgaggtctgtttagtttggccagaaaggcatcccctacctgaacacctacgacggtcacaccatccgctaccccgacccgctcatcaaggccaacgacaccatcaagatcgatctggagaccaacaagatcatggacttcttcaagtttgacgtcggcaacgtggtcatggtgaccggcgggaggaacatcgggcgtgtaggagagatcaagaactgggagaagcacaagggcagcttcgaggtcatcgatgtgctgcttggagctttttgctatgtctagttttctcctatttgttgtacaggaaaacatagaatggaattcaaatttggtggtcgcaaaagtgtggagacttgaattcatataaagttaggcttaacattagtgcaaactgttgtattttagtttagatttagagtatacttatgtatgcgttgtttgacaatgcttatttatgatatattgaatggtacttatttatattatattaatt

SEQ ID NO: 21323 - DNA, 917 bp, Zea mays
  Clone ID: LIB3279-229-H2_FLI
ccggaagccgctaccgctagcacctccgatcgagtcggcgccatggaagacgtcatcaccgacgtgccgccgccttcccgcttttcccctgacgacctcgacaacttcgccgctccgccagcgcagcccacccccatcttcgtcgtttccccgaaccctagcccaccggccccgcgcctcctcgtcgtattcatctcccccacctccctcgcgctcctcgcctccccgccgccgctccacgcatccctgctcctcccggacctgcccctactcccgcacgcgcccatgcgcgtgtacctccacccctccggcgcgctcctcgccgcggcgcacggcgccttccccgcccaccgcgcgcgccgccgcgaaggctcttgtctccaggctccagccggaggaggtgctggttttggacgcggtccggagcgggacgtaccggggccgcctcgccgcggacgagcccgtggaagggaagttggagacccgcgcggcgcgcgcgcggggaggcgtgggggctgccaaggcagtccaggctctggtcccacccggcagcgtggtggacgggctcggcgccgccgtgctcgcggagtgcgagatccggggcaaggcggccagcatggtggtgacgtggccggcggacgccaggcccgcggagttcggggtcatgcggcgcgtggcggcggagctcggcgtcgacaccggcaaggccgcggccagggtctccggccggcccgacctggattccttgtacacttgagatttctctgttactgctgctgaattgctgatttcgttggctgtggcgttgggttgtctgatgagtgagtgttttgttggtttgagacaatttggggtcaaatctggtctgacggacgagttggtttgcgtgatttcatatatgaacaaattctgatctc

SEQ ID NO: 21324 - DNA, 1048 bp, Zea mays
  Clone ID: LIB3279-230-B12_FLI
ggcacgaaacctaacccacccaagcggcaaccatggagccctcccccgtcggcgccagcggctcggcggagcggtggcgcgcggaggcggcgcgggcgttccagcactacctggaccgctcggcgccgcacacggcggggcggtgggcgggcacgctcgtggccgcggcggtgtacgcgctgcgggtctactacgtgcggggcttctacgtcgtcacctacgggctgggcatctacctgatcaacctcctcatcggattcctgtcccccatggtcgaaccggagctcgaggccgggcccgggctcccaaccagcggctccgacgagttcaagcccttcatccgtcgcctccccgagttcaagttctggtatgccgtcacaaaagccttttgcattgcctttgtcatgaccttcttctctgtattcgacgttcctgtcttttggccaatacttctctgttattggattgtgctttttgtcctgacaatgaagcgacaaattgtgcatatgatcaagtacaagtatgtcccattcagcataggaaagcagaggtatggcggaaagaaaggccctgcagccagtgcatctaaggagtaaagacggagggagggtgtgggacctcgagagcagtgcctgtgctatctgtgaggcatcctgctggcatggtggtattttgagtaccagggctactgatagtgaacgcacaccatattcgctagtggagagtggagatcgcagagaagctgaccagacttttgcattggttgatgatttctgttttacgtgtcggtagtttatgtacaatggcatggagcatagctagtagatcaaatttccggatcctctgttgtactgtgcctttgtggacaagttgtggacctgttggatccttgcaaacgcattgtgatccaagaccgagaggacaaaatcaaactgtccagcgattgttacttggaccttccaacattgattacttggaccttccaacattgtgatccaagacctggggccacatggcggtgaaacatagctgcttttttttcttctct

SEQ ID NO: 21325 - DNA, 1709 bp, Zea mays
  Clone ID: LIB3279-230-F3_FLI
gaaaaaaaaatctcatcgactctctcctgagtcctgactcctgacatctccgatcgtcaccgtccccgtccccggcgccgtccctctcgctcttgtcctcggtgccgcacctcctacatctctgtctcaccgctttagcacggccaccacgcccgcctgcgctagatcccatctgaagccggcggccatcatacccgtgagcgctagctgggctgcatctctcacctccacagccagcaagcgagcgtggttagcgccgcagtggtttcaccgaccttagatcgggccgtaagctcgaggactgaccttaatttcttgagcttaaggtctcagtgggtttaatcccgtagtgtatgaggttgacctttaaaggccttacggcccccttgtttcgcacgctacagatatcgagctgttgacatctgcgggtgcatctgcggacagccttgacgaggctgccgacgatgtcgtctctcaactcgctcttcaaccgctccaccttcggcacaaaatgcaaaacatgtttaaatcttgtcatttcaagaatcaagctgctgcgcaacaggagggagttacaactaataaatatgcgcaaagaaatggttcaatatcttcagactggccaggaatcaatcgcgaggattcgagtggagcacattattcgggagcaaaatatattggctgcctatgagatcgttgagcttttctgtgaatttgttctggcaagagtccctattgttgaggtccaaaaggaatgccccttagaactgcgtgaagccattgctagtataatctttgcatcaggaaggtgttcagacttgcctgagctaatgcatctccgtaatttgtttaccaccaagtatggaaaggagtttgttgctggtgctatggaattgcgccccgacagcagtgtcaaccgcacaataattgaaaagctctcggtgaaggctccatcaggtgattcaaagctaaaagtcttgaaagctattgcccaagagtacaatattgaatgggattcatctaatactgaagcagaattcaacaagaaatatgaagatctactggacggctcgggatcttcggtccaccagatccagacacctatcattgagggctcagtgagctcaccagttgtttctgctccaagagataagacgccagcattgaattcacctgtcattgatgccgaaaaacaccaagttcgcgaatctccgacttcaccagctggaggtgcaagagctggtgttgtcactaagggcaatgtggtaaccatgggccatcactcccccgctgaggagatgccctccaccagcccaagttcatcagacgcgctggagaaagcccgagctgctattgcagctgccacccgcgcatctgctgctgctcgcgccgcagctgaacttgcaaaagttaaaattacaaatcaatgacacctccagttcgggcaaggcgtgtcaggaagtttaatctggcaactgatcaccaggacagactgaaatgtatttcattgaataaattgttactgtatattccctttgtgagcacttggcacatcatataaggagcgtggctcctcgcctttcttcgaatgtactcaaagagaactatctggaatgcataatgttgcatttactgttcactagttagttattgtatcattacggtttttttacaatacaaaccaatctaaattgcagtggttagagacg

SEQ ID NO: 21326 - DNA, 1655 bp, Zea mays
  Clone ID: LIB3279-230-G9_FLI
gaactccaccgagagaggggaaggactcggggagtaaactcgggtccgtgtgacggcagagagtttccgtcgaggagagagaagcagctgggaagggcactcacggagcttaccgagaaaaaggggtcgaggttcatgcccgtttggttcctcggttgctgcgtgaggcggccggaggagtcgtgaaccgggaatgacgggggtggtggtggtttccagcgcggggtgcaagggtggcggcggggggaagagggccgccggcggcagaggtggcggggaggaggagcggcggcggcgggcggcggttctggagctgctgctcgcggccgtgcggcgctccgtggtggcgtgccgggtggagcgcggggccgccggagccgggtggccggcgagagaggaggacgcggcggtggcgctcgaggagatggagatcggctggcccaccgacgtccgccacgtcgcccacgtcaccttcgaccgcttccacggcttcctcggcctccccgtcgagttcgaggatgagatgccctgccgcgtgcccagcgccagcgccagcgtttttggtgtctcggctgaatcgatgcaatgcacgtacgatggcaagggaaattcagtccccacgatattgctgctcttgcaggagaggctgtatgcccacggggggctgaagtctgaggggatctttcgcattaatccagagaatgaccaagaggagcacgtgagggaccagctgaacaaaggaattgtacctgatgacattgatgttcactgcttggctagcctgattaaggcatggttcagggaacttccagaaggtgtcctggatggcctgtcccctcagcaagtgcttcaatgcaattctgaaggggagttccttgagcttgtgacactgttgcgccccactcaggcggcactcctcaattgggctgtcgagctgatgtctgatgttgtcgaagaggaggagctcaacaagatgaatgctaggaacgtagccatggtgtttgcccccaacatgacacagatgtcagatccactgacagcactcatgcatgccgtccaagtcatgaactttctcaagacactgatcttgaggacgcttcgggagcgcgatgatgcagccaccaccggagagtacacaccatactcatctccagcatcatccagtaagcatgatgacgccgaatgctgctatggcagtgagcaggacatggacaggagctgtgagatgagtgacatgcatagccagatcagcaagtctgggcgacatgcagactatctcgtacgctacaatacctgttttgacagcgaacaagaggtcgacgatcatctgagtgaggttgaagaaggtttcttgcgtcggttggagcgtgatcttggagcagacagaccagaggtttcttgcagaaaaatctcagagatcatggccctggaggatgctgagccgaaagctgaaactagagcagtggagaagggcatacagaatgagaatgaagaggttgctgaacagctataatgatggaagttctgtgtttttaggcagtaaagcttattattgtaagtactgaacactgaccaatggtctttatccaacacctcggttgaatgtattgctccagtgtatgatgtaaacttggctgatccttttaatgcttggt

SEQ ID NO: 21327 - DNA, 678 bp, Zea mays
  Clone ID: LIB3279-231-C10_FLI
cctccgaattcctcgatcgattcgtgtcgaaaaaccccagcccctccccaccgccgccccccgtcggaatcccgaatccatccccgatggcgcaaggcaccgtgccctccgcagccggggccggcggcggcggctgcccctcggcccccgccgtctcgacgactcctccgggcacgccccgggctgccccgcctccgccatctaccttcccgaccggattctactacgccgtggagctctatttcgacccggcgctggagaaccaggtgctcaaagcgtggaacgcgctggcgcggcggcagctaggcagccgcctcatcgacgctgccgcccgcccgcacctcccgctgctccacctccccgccgccgcgctcccgcctcctggcaccggcgcgggcggggatccgctcctccgcctcgcaccctcgctccgcgcgctcgcgtcgcgcctcgacccgctcgcgctcgcgctctcctcgctcgccgcgctcccggcctccgcctcctcttccccgcacgacaacgttctcttcctcgcgcccactccaaccgccgcgctgctcggcctccatgcgcagctctgcgagctgctgcggaaggacgctggcgtcgaggtccccgacgcgttccggcccgaccactggctaccgcggtgcgccgtcgccgtcgacgtgcccc

SEQ ID NO: 21328 - DNA, 1021 bp, Zea mays
  Clone ID: LIB3279-231-F10_FLI
ctgctataaaaccctccgcctccaccggcggctcgccaaactccgtttcgaattctagggttttgctgctctccgaccccgagctccgaaggccgcagcatcaggcgaggcccccctcgcgtgtgaccgagatggcgctgccgaatcaggggaccgttgattaccccagcttcaagctcgtcatcgtcggcgatggtggaactggtaaaactacatttgtgaagaggcatctcactggagagtttgagaagaaatatgaaccaaccattggtgtggaagttcatccgttggatttcaccactaactgtggtaagatcaggttctactgctgggataccgcagggcaagagaagtttggtggcctcagggatggatactatatccatggccagtgtgcgatcatcatgtttgatgtaacctcaaggcttacttacaagaatgttcctacgtggcatagggatctgtgcagggtctgtgaaaacatccccattgtcctctgcggtaataaggttgatgtgaagaacaggcaggtcaaagccaagcaggttactttccacaggaagaagaatctgcagtactatgaaatttctgccaagagcaactacaactttgagaaacctttcctgtaccttgcaaggaagctggctggtgatccgaaccttcactttgttgaagctgttgctcttaagcctccggaagttaccatcgacatggctatgcagcagcagcatgaagccgagcttgctgcagcagctgcacaacctcttcctgatgacgatgatgatctgattgagtagaaaggatcatgagtcttggacttgagcaggagttgtgccttgcacgatttaagttgttctagggtggactctctcttgagttatcattgtctggatcatctttttctccttggacttgttgcaacttttgagtgtggaaatggattggaatagtcgccatgaatttgctggctactttatacatgtctttgttcataaaccttgttttaagatgaagttgtggc

SEQ ID NO: 21329 - DNA, 3498 bp, Zea mays
  Clone ID: LIB3279-232-B3_FLI
gggcagcgctgcctgcttcttcttgctcacgcgaagggaaggggtagccgatctcggcccgcgttgatccggttgcgggggcttgtctctcgcttggtcctccaccgcgcggcgccgcaccgtgaatcgacgaccggccacgatgttcgtcaagaagctcgtggagagggcctccaagaagcaacatatcggcagcatcagctcccttcgccccgagaacgtcagcccgcggctagccttccactacggcgtccctgcggacgccgccctccttgcctacgaccccgttctccacgtgctcgccgtcgccaccaggaatggacagatcaagctgttcggccgcgacaacacgcaggcgttgctccagtccccctcccctctcccttccaggttcttgcagtttgccgagggccaaggggttctgctcaatgtcaatacccagaaccagatcgaggtttgggacattgatgcgaaaaaactctgttatctgcacccggctgaaaaggcgatcactgcattctctgtgctgcagaagagcttctacatatatgttggagatagttctggaagtgtgtccccattgaagcttgatttggctcagagatgtctagctgacctgccgtactggattccttttactgaatcttatggttccactaccagtgccggtaatgatgtggaagtagtatttgtttcaccccagcctttgtctgaatcgaacagggtgctcattatcttcagagatggggttatgagtttgtgggatattaaagctagcaaagcagtatccatatctggtaaaactacgcagcagcaatcacagaaggaggctaaaaatgtaacatcagcatgctgggtttgtgccaagggaagcaaaattgctatcggatacgataatggcgatttatacatttgggccattcctgaggttacaagtacacaaaattcctcatctatgggtggccagaatctacctattcagaggcttaacctaggatacaagctagacaagttgccaatagtctctttgcaatggatccctagcgatggaaaggcaggccgtttgtatatcaatggtttcaatgatcatggacacctatttcaggttctgattctgaatgaagagagtgagtcgcgaattgtaaagatggttttgcctatcgctgaatcttgccaaggaatggaacttgttacagggcttagtgacccaaataagcacagacaaagtgcccttgcactcttgttgaaatctggtcacatctgtttatatgatgattcagaaattgagcgctatctccttcactctcagtctagatcccctccaacacttccaaactgttcatatgtgaagcttccttatggtgattcaggcatcagtgttgcaaagttctatacaagtaaccctgcagcgttagcttctttggacgaggattatttttcatcagctaccaaatatccatgtctgttttcaatgaagggtaaaggtcagactttaacaagttttaccaacattcataagacccggaacctctatataactggacatctagatggaaccataagcttttgggatgcatcttgtcctcatttgctgcagatttttatgataaagcagcagaataaagacgatacatcaactggtaaccctatcacatcattacagtttgatatgtcctctagcattctattgtctggagaaaggagtggaatggtccatattatcacattcaaaaaggactccagcgacaacatattctcctttttaaatgcaaagcaaggagacaactatgatgtcagaagtataaagctcaaaggtgctgtaaccacaatgtcttctatctcaaaatcaaagcattttgctgttgggacagaaaaaggaattgtatcagttatcaacgtagaagatgctacaatattatatcaagaacagtttgagtgtcgactgcctggtggaatcgcctctttgcaatttgaaatctatagccataatggatatgacaaggacattttgataatagcgatggaagattcatctatttttgttatcgaggaagaaacggggaaacttttgaaccccaacccagttcagacagacaaaccctctaaagccatccttctgcagatgttggagttatcgcccaatgacacaccagcagtttcagataaccaagatacagtatcgaaggaatcattgctgctactttgcactgaaaatgcgatccgtttgttttccttgggccacgcaattcagggcacaaagaagataatcaataagaagaaattgagcagctgttgttgtttcgcctctcttattcatagttcttctaatgacattggacttatactcgtcttctccaatgggaaacttgaaataagatccctgccagacttgtccttgttgaaggatgcctttttacgaggttttgtgtactcaagaaacttgaattcaagtagttccataacatgttcatctgatggagaagccatcttgattaatggagaagagacctattttttctctacgctctgccaggatgagatatacaggcacgtagacagcattagtacagtgtacagaaaagagaactcaaccagggaagactcttcttttgtagtgaaatctcctaaagaaaagaaaaagggtctgtttggaatgattatgaaagataacaaaggaagcaaatcaaaagaaagtgatgcaattggcagcgaacaatgtattgcaacgacttctgaagagctggcttcaatattttcatcaactaactttgctccgccatctgagggaaggaacagttcactacgagatgatgaaaatgccgagctggacataggtacatgctattatttttgctattacttgtgtagcagtatatacttatgtttatagtatatattttttgtctgaagatgatatcgacattgatgacaacccacagaagccaaaaggtccacatttccctggtctaagcaaagataaaatcagcaagggactccaaacccttaaaggaaagttgaagcccaagactgaagaaaagataagctcgggaaacaaaaaaactgaagatgaaacatcagtgagtcaagtcgatcagataaagatgaagtatggatatgcaaatacaacaaatgatgactcaaccagtgtcacaaaaatgattgggaacaagctgcaggaaaacatgaaaaagttggagggcattaaccttcgagctgccgatatggcgagcggcgcccagtcattctccacaatggcaaaagagctactccggacaacaaagaacgagaaggggacctcataatcacctacaccaatttcccctcctttgtatagttcgtcttttccttttttttcatccctggatcgtggatctgacgatctggacctccccgttgtcagactctaaatagtgaatggagtgtaagtgactgaagtaccctttacatcttggtatagggtaacagcagggacttcacatagttattttttgccgcggc

SEQ ID NO: 21330 - DNA, 866 bp, Zea mays
  Clone ID: LIB3279-232-C9_FLI
gcccgcacaaatctctcctcccctcttgccctcgccgcattgcccgccgacgacccccccggcccccgccggatagagaggaggaggagcggcgcggctgcgggagagccgggcggcggcggcggcggcggagcgggcttcatgtgcgacctagtggcccgcacgggccggcatcagcagcggtacgaggatggccgtcggctagtggccggatgcataccatttaggtatagagctaacaatgatgaaacctctggtgacaaaactaagaaactcgtggaagttctcatgataaattcccaaagcggacctggtcttttgtttccaaagggaggatgggagaatgatgaaactgttgaagaggcagcagctcgagaagctatagaagaagctggagttcgaggtgatatagtgcattttctggggctctatgacttcaaaagcaagacgcatcaagatgcgtgctgccctgagggtatgtgcagagctgcagtgtttgcgctgcatgtaaaggaagagctggcctcatggcctgagcagagcacccgacagaggacctggctcacggtccctgaagctgcatcaagttgccgataccagtggatgcaagaggccttgctgacaggcttctctgactggcacgacaagtggagcagaggcggcggcggcacaaactgtgacccggcctaactgctgacaggcccatctgcagtcgtccaatttgttcatctcctctctttccctaggcccccaaccttgcagaatgcaataatacagtgtacttgtcttgatgctgggttggtcattgacatgttatcttagttgtagtgggacgaggtacatctcatcaagacgagaattctcac

SEQ ID NO: 21331 - DNA, 683 bp, Zea mays
  Clone ID: LIB3279-232-E5_FLI
gcgcacagtagcggagcaagatgcggggaggagaccggccatcggcgtcgctccagctcctctcgctgggcctcgtgctcctctacttcttcacctcaggcagcaccgttggtctcgtggagggacaggtacggcctttggctcttgacgctctatctatctataagacgtggtgcatcgcgaagccgtcggcgtcgaacgagatcctggcgcagaacctggactacgcgtgctcccaggtgagctgcgccgtgatccagaagggcgggccgtgctactacccggacagccccgtgtcccgcgccgccgtcgccatgaacctctactacgcctacagcggcaggcacccctggaactgctacttcaacaactccgcgctcgtcgtgcagtccgacccaagctatggctcctgcacatactactgaggaggagtgtgaggaggagtggagagacgaggagaggagagagatccattcgtgcctggcggtggcggctccactgcatctgtatgcagagtcttggttttctagtctcgactgccaatttaccaaatgcacattgttgtgttgtgttgtgttgtgtagccgtgctgcagctgacatttcgcagcgaactcgtggatactccgtttcgcattcatgtgctttgaagtacattgcagcggcgctgcacaaatttccccc

SEQ ID NO: 21332 - DNA, 1404 bp, Zea mays
  Clone ID: LIB3279-233-B11_FLI
cgaaaacccacgtctaaaacaggtggcccaccaacgattcacttccccgatcccagggggcggcgatcggaattcgcaacttctcccacgcggcgaacacggcagagatgatgagctcccgggccggatccatcctcctccgccacgccggctcccgtctcttcaccgcagcggcgatctctccggcggcggcctcgaggccactgctcgccggcggcaatggtgttccggcagtcatgctacggctgatgtccacctcctcccccgccgctcccacggaggcgaaggacgaggcagccaaggcctccaaggtgggaggggacaagaaggcggtggtgatcaacagctactgggggatcgagcaaaacaacaagctagcgcgggacgacggcaccgagtggaagtggacttgctttaggccatgggagacgtacacggcggacacgtccattgacctcaccagacaccatgagcccaagacgctgatggataaggtcgcatactggaccgtcaagtcgctgcgcttccccacggacatcttcttccagaggcggtatggctgccgggcgatgatgctggaaaccgtggcagcggtgcctgggatggtgggcggcatgctgctccacctgcgctcactccgccgcttcgagcagagcggcggctggatccgcgctttgctggaggaggccgagaacgagcgcatgcacctcatgaccttcatggaggtggcgaagccgaggtggtacgagcgcgcgctcgttatcaccgtccagggcgtcttcttcaacgcatacttcctcggctacctcttgtccccgaagttcgcgcaccgcgtcgtcggctacctggaggaggaggccatccactcgtacaccgagtacctcaaggatctggaggccggcaagatcgagaacgtccccgccccggccatcgccatcgactactggcgcctccccgctaacgccacgctcaaggacgtcgtcaccgtcgtgcgcgccgacgaggctcaccaccgcgacgtcaaccactttgcatcggacatacattgccaggggatgcagctgaagcagtctcctgcgccgattgggtaccactgatgcagtgatgctgtttgtgctctgctgagttttgcgtcggtaataagcaaatgagtgtcttgccttcaagggaaagaaagaattgagttacgatacggcgattaggaggatattttccaaccagttgtttgagagtgaaacctattatatgtacgtctccaccgtcttctttatcagagcaatctatgtacatatctctaaagttcgagaggtgcttttttggcgtctatcacttcttcctaaagttcctttgtttttcatgtcagctgaattgggctcgctaatctcgaatgtacaatttctgcat

SEQ ID NO: 21333 - DNA, 995 bp, Zea mays; identical to SEQ ID NO: 17314
  Clone ID: LIB3279-233-E1_FLI

SEQ ID NO: 21334 - DNA, 2510 bp, Zea mays
  Clone ID: LIB3279-233-G8_FLI
gtagtatactagaagaggaggaggagagggagaagacgaagcgaagccatagcaaggtcgtcggagccggagagggaggagggtggggaacctcttcctgcgtcacgtgacaactgtctcctgacccaccggagcggcggactccctctgcgcgccgcgcacggcctgttccggtgcggtcgcaggccgacggccggcgacggaggcagcaggaagctactataccaaccggcccaagagaattgcgggtccagaggcagtgatggcggggcgctacgattgacgtgctacgattatgggcatccaagggaacaaggcggcgacgcacgagcacgacttcctctcgctgtacgccgccgccgccgccaaggacgctcctctcctgctacacgactccaaggcgccgcctccttctcaaggtaatttcctcttgaagacgcacgacttcctgcagccgttggatcagaagccgggagcgccgccggagccgtcgccgctgcccgcttccgccgcggagagcaggcaccagccgcagcagcaggtcgtcgtcgcgaaccagcacgcgctgcccctgcccggcggcgtcggcaccttcagcatcagccccgcgcccgtgtccgtcgcgctgccggcggccgtcgtcaagtcggagccgccgttcgtgctctggggccagcctgccgcgacgctccatccgggcgcgcgagggcaccagcagcagtgggcgctccccttcgccggcgccgggcaggtcaggctgccgccgcagcaggcgcctccggatagaaagggccggggcggcgccggtggcggggtcatggagtctggctccagatccagcggcggggcggggttcgacgacgacgacggcctcaccacgcgccgcgaggtctcctcttcgctccaagatttgacagtaagggtggacaggaagggtgggagctgcagcgatggtggtacggatcagcggccaaacacaccgcggtcaaaacactcggccacagagcagcgcagacgcagcaagatcaatgataggtttcagatacttagggagctgttgccacacagtgatcaaaagagagacaaagcaacatttctcttggaggttattgaatatatacggtttttgcaagagaaggtgcaaaaatatgaggcaacatttccagaatggaaccaagaaaatgcaaagatgcttccatgggtaattgcttcattctccaaagctccaatgcttgctagttgctactgctgtcagggaaggaacagtcaattcttgattgtctgtgtctgaatgtagttatacatttttgcagtcaaatatgtattttcgatcattctggaaaaatgcacaggcaagtgtttgttgctaacaatgcatttgccttactgaatcgttaatgatgtatcaataatttccgaccaacaccttatgcattcttgttatccttgtgctgcagagtaaaggccaaatctcaggagattccccgcctgacccttcacatttcatgagaaatggatcttcccctggatctaatttcactgggaaacttgatgataatcacaacatagtgacatctgcagctgcatcaggggcacaggatcaggcagaaaccgaccacatggctagcggatgctacagatcagcagaaactacggcgaattttacaaataatgctatgtctcagtcccaacctcaatggaccggtccgtcccctgtggatgactgtgcagtgaacagtgagacgcttaacaaccagcagttggtgattgatgaaggaacaatcagagtgtccagtaactattcccaagagttgcttaactcgttgactcatgcccttcaaagctcaggtgtagatttgtcccaagccaacatctctgtgcagatcaacatgggaaagcgtgccgtcaagagacccgctgctggtgtatccaccaactccaaggaaccagctgatccggcatctagcaacgaattagggcatcagctgacgctgtctggtggcggtgccggtgccgacggcctctctcacgcaacaaagcggcataaacggggtagcagctgatgtccgctgtccctcacctcgctccccaacggacggatgacggattggtgacattcttcttttccctcccagccaacggggaggctgtacattgtgtgctgtgcttggtgacaagctgagacctccggcgtattctttgattcgatcacccccctcgctcgccatcccattgtttacgtagagaagaggaaccgtggagctttccatcgcggattgtgaagccgctcttgtacacaggcttccattcaatgtgagaagcttcccccctccttgacagatctccgtgttgtagacctgtagccacctgtaagatatgtgatgatgtccaacaaacaactctgccagaccactggctagtcgagttgttgggttacttatgtacggtgttctgttttgctgggagtgtagttgccccgccgtctcagtgaactgatcgtcagttgtgtg

SEQ ID NO: 21335 - DNA, 803 bp, Zea mays
  Clone ID: LIB3279-234-B10_FLI
gctcttctccacctccacctccacccatggcggcctccaccttcagcggcgacgagacggcgcccttcttcggcttcctcggcgccgccgccgcgctcgtcttctcctgcatgggcgccgcctacgggacggccaagagcggcgtcggcgtcgcctccatgggcgtcatgcgccccgagctcgtcatgaagtccatcgtccccgtcgtcatggcgggagtactcggcatctacggcctcatcatcgccgtcatcatctccaccgggatcaaccccaaggccaagccctacttcctcttcgacggctacgcgcacctctcctccggactcgcctgcggcctcgctggcctcgctgccggcatggccatcggcatcgtcggagacgccggagttagggcgaatgcacagcagccaaagttgtttgtgggcatgattctgatccttatcttcgcagaagctcttgctctgtacggtctcatcgtcggtatcattctctcatcccgtgcaggccaatctcgcgccgattagaaggcttgatatacgccacactgagtcatctgccattgtattcaaagtgttcttttctcggtgaacaatgtgagggatcatgttgagcctgttccacctttgtaacattatattgctattatgtgaagacaaacctagctagctgttgcagttatgctgttgtacttgtatttgtttgaaaataataggcagcgagccccggatgtgatgaataataagcaagctggactagttgttaatgttttttctttaatgtggattggttttgttatgtgt

SEQ ID NO: 21336 - DNA, 1276 bp, Zea mays
  Clone ID: LIB3279-234-D4_FLI
gatttttgtacccgccggctgggcctcggcctcggcgtgcaagaaactagaaagaggagcagacaaacaaaatcgattagaattaaccccaggccagaaacccactctctctctcccccgattcctttcctcgtcctcgtcctcatccgtccaggggagcaaacaagcaagcaagtaaacgggcgaggagctggatagaggccggcgactcgaagcaaccgccgatcggagccgcggctgaggaggaggagcaagctcgagatggtgggtctcgtcggcggcagcacggcgcgggcggagcacgtcgtggccaacgccggaggagagacggagtacgtgcgccgcctgcaccgccacgcgccggccgagcaccagtgtacttccaccctcgtcaagcacatcaaggcgcccgtccacctcgtgtgggagctggtccggagcttcgaccagccgcagcggtacaagccgttcgtcagaaactgcgttgtgcgcggtgaccagctcgaggtcggtagcctgcgcgacgtcaacgtcaagaccggcctgccggcgacaacaagtaccgagcgcctcgagcagctagatgacgacctgcacatactcggcgtcaagttcgtcggcggggaccaccgcctccagaactactcatccatcataactgtccacccggagagcattgacgggaggccaggtaccctcgtgatcgagtcgtttgtggtcgatgtgcctgacggcaacacaaaggatgagacatgctacttcgttgaggctgtgatcaaatgcaacctcaagtctctcgcagaggtatctgagcagctagcagttgagtcacctacatcgccgatcgatcagtgagtcgcctgcatccccgatcgatcagtaacaccggtacaaagacatgaatcggcaacaaataagaagtttcaaaggctggctagagggttcaacctttttgagattggtggtttcgccatcgtcttctgcgtgtatgtctcttggaatatggaaggtttagtggtatgtaggtttaaatatcttgctgtagcttgtactacctccgttctcgaatatttgtcgttggctagtttatttttaaactaaaccgtgacaaataaaaaagaacggagggagtatgttagggatgatttagccttaggaactgcacctacatacctcatggcatctatgcacactgctagtatgtgtagaaatcagggaaagcatggagcggtttttgcatcattggtgcatggagatatatgccttttttctctcc

SEQ ID NO: 21337 - DNA, 792 bp, Zea mays
  Clone ID: LIB3279-234-D5_FLI
gccattcatcatcagagctagctagctcagagaagagaagagctgttgcgtagcgcgcgcgcgcgctgtgacgacgactgtgagtagcgagagagtgagtgagtggtgactatttcaagaacatcagctcggccgtttcttcgaccccgcgcccttttttggaactaactgaaccatgagaggcacgctggagtacctgtcggacctgctgggcggcggaagcagcagcagccggcgccggtacaacaggaggaggacgcagttccagacggtggagctcaaggtgcgcatggactgcgacggctgcgagatgaaggtcaggaacgccctctcccgcatgaaaggggtgcattccgtggagatcgaccggaagcagtccaaggtgacggtgcaggggtacgtggagcctcacaaggtggtcaagcgggtgcaggccacggggaagaaggcggccgagatctggccctacgtgccctacagcctcgtcgcgcacccttacgccgcgccggcctacgacaggaaggcgccgccgggctacgtgcgcagggtcgacgccgtcatgcccgtctccagctacggcggacccacggcggccggcccgcaggaggagcggctcgtcaacatgttcagcgacgacaaccccaacgcatgctccatcatgtgaatttgagttactactgtgtcaaatagctatagacacagaccgaccacgggtgcagctctcttcgatcacagaacaaatatatgcatgatcgcctcggttggattggatgtttatatccatgacagaat

SEQ ID NO: 21338 - DNA, 2725 bp, Triticum aestivum
  Clone ID: LIB3281-016-D6_FLI
gcgcgcgcacacaccagctagcagccgtggttgcatccttccagggttcggcgcaggagatggaggagggcgctgccggaggaggagggggtgggggcggcggcgtcgccgtcgccggcgatcgatcgagcttcgtgatcggcctcatcgagaaccgagccaaggaggttggtgttgcggcatttgatttgagatcagcctcactgcacctatctcagtatatcgagacgagctgttcataccagaatacgaagacactactgcatttctatgatccgaatactgtaattgtgcccccaaataaaactgcggcagatggtatggttggagtttcagagctggttgataaaaattaccaagcaagcaaaaaggtcacgatggcacgtggttgctttgatgataccaagggggcggttatggtaaaaaatctgtcggctagagacccatctgcacttggtttggatacttactgcaagcagtactatctttgtcttgctgcggcctctgcaacaattaagtggatagaatcagaaaaaggtgtaattattactaaccattcactatcagttacattcaacggctcatttgaccatatgaacatcgattcaactaggtattgttttgaaacaaccgaccctcaaattctatcaatgttcaaacattagaaataattgaccctctccatactgaactgtggggtactagcaacaaaaagaaaagtctctttcagatgttgaagactacaaagactacgggagggtctagactactgagagccaacttattacaaccattaaaagatattcaaactatcaatgctcggcttgactgcttggatgagctagtgagcaacgaggaactattctttggcttgacacaaggtctccgtaaatttccaaaagaatcagataaggttctctgtcacttttgcttcaaacccaaaaaggtcacagatgaggtactgaagcctgccaatggtcgaaagagccaattgttgatatctgacattattgttctaaaaactgctctggatgcaataccattcctctccaaggttctgaagggggcgaacagttttcttcttcagaacatttatcagaccatatgtgaaaacccaaagtatgggagcatgagaaagagaatcggagaagtgattgatgaagatgttattcattcgagggctccttttgtagcctgcactcagcaatgtttcgctattaaaccagggattgatggcctacttgatgttgctcgtcgatccttctgcgatacaagcgaagagaggagtttactctgccaaatttgaagataccgtataacaatagactggggttttactttattataccgcagagggatattactgaaaagcttcctaataaatttatccaggttgttaggcatgggaagaatgtccattgctcaagctttgagctagcttcgctaaatgttaggaacaagtcggctgctgctgagtgcttcttgcgcactgaactctgtttagaaggacttattagtgagatcagagaagacattcgtatcttaacaatgctcgcagaagtattatgtcttttggacatgattgtaaattcttttgcctatacaatatctacaaagcctgttgatcgctacactagaccggagttcacaggtgatggtccaatggcaatcaatgctggacgacatcctattctggagagcttacatactgattttgttccaaataatatcttcctttccgaagcatcgaatatggttcttgtcatggggccaaatatgagtggaaaaagtacatatcttcaacagatttgtctaatagttattcttgcacaagtcggctgttatgtcccagctcaatttgcatcactgagagtggttgatcgtatatttacacgcataggcactggagataatgttgaaaacaactcgagcacgtttatgacggaaatgaaagagacagctttcatcatgcaaaatgtttcttcaaggagcttggttgtagtggatgagcttggaagagctacttcttcctctgatgggttggcaattgcatggagctgctgcgagcacctgctatccctcaaaggctacacggtgtttgcgacacacatggagggcttgtcagagctcgcaacgatgtatccaaacgtgaaggtcctccatttcgaggttgacttgaggaatggtcgcttggatttcaagttccggctgaaggatggcgtccgacgggtaccgcactatgggcttctactagccagagtggccggcctccctgcttcagtgatcgacaccgcgaccagcatcacttcacgtatcacagagcaggaaatggttaggatggatgcgaactgtgtgcagtaccagccgctgaggatggcgtaccaggccgcgcaacggctcatctgcttgaagtactcgaaccaaggggacgactacatccgtgaagcattgcaggacctcaaggagagttacgctgcaggcaatttgatatgaaacaacaggagattacgtctccaggaatttgatagaggtctgtttgtaggtctatggccgcagaggatccatcagtcttattttcatctgtcactgtaattatatagtatattagtcaaaatccgacactgaaagtggcgataagggagagatcccctaacacaaagcacacccggagtcgatgttgagacgcggaataggaggaatcctccttacaattgcatatttgcgc

SEQ ID NO: 21339 - DNA, 178 bp, Homo sapiens
  Clone ID: LIB33-018-D2_FLI
gcggccgcccgggcaggtacgccaagccccggagaaccgcgatgctgactttccccaggatctcctcgggaatcctcttggcctctttcagcacctggtccagggagccgccgtccatgtgttccatgcaaatgctgatctccccgtcactgtagaaggccccgtagaagcccacgat

SEQ ID NO: 21340 - DNA, 1387 bp, Zea mays
  Clone ID: LIB3332-001-E7_FLI
cagagtaacagacaccaaacaacgcccatcactcgcgccgtacatcctgcctcctcccgcgcgcgcgcgcgcgtgcacgctagctagctgccggtcgcctcgccaccatggtgttcgacgcgagcggcagcaggtcggcggcggcggcgtcggggaaccctctccgcgtgatcctgacgcgcgggttcgcgcggcaggtgctcgcggggcggtggttgacggtgttcgcgagcctgctcatcatggcgtcctccggcgcgacgtacatcttcgggagctactccggcacgctcaagtcgtcgctcgggtacgaccagcgcacgctcaacaccgtgtccttcttcaaggacctcggcgccaacctgggcgtcttctcggggctcatcaacgaggtgaccccgccgtgggtggtgctggccatgggcgccgccatgaacctgtccgggtacctcatggtgtacctggccgtgtccgggcgcaccgcgccgccgccgctgtggctcgtgtgcctctacttcttcgtgggcgccaactcgcagtcgttcgccaacaccggcgcgctcgtgacctgcgtcaagaacttccccgacagccgcggggtggtgctcggcatcctcaagggcttcgtcggcctcagcggcgccgtgtacacgcagctgtacctggccctgtacggcggcgacgacgccgagtcgctgatcctcctcgtcgcctggctccccgcggcggtgtccgtcgtgttcgtccacaccatccggtacatgccgtacccgcgccgccgtggcggcgggcaggagacgagcagctccgactccgaccccttcttctgcttcctctacctctccatcgcgctggcgtgcttcctcctcgtcatgatcgtggtgcagaagcaggtgcccttctcccgcgccgcgtacggcttggccgccacgccgctgctcatcctcctcctcatgcccctcggcgtcgtcgtcaagcaggagtacaagatctaccgggagcgccagctcgacgccgccgacccgccgccgccgaccatcgtctccgcgtcggcaacggacgccatcaagaaaacagagcagcagccggcgtcgtcgtcgttctgtgggtgcgtgaggaccatgttccgtccgccggctcgtggggaggactacacgatcctgcaggcgctggtgagcgtggacatgctggtgctgttcgtggcgacaatctgcggcgtgggcgggacgctgacggcgatcgacaacatggggcagatcggcgagtcgctgggctaccccgccaggagcgtcaacacgttcgtgtccctgatcagcatctggaactacgcggggcgcgtgacggcgggctacgcctcggaggcggcgctggcccggtaccgcgtgcc

SEQ ID NO: 21341 - DNA, 1204 bp, Zea mays
  Clone ID: LIB3332-001-G6_FLI
caaaagctgctgcatgtggaactctttcggttctttcctcaatgtcaaataaagtttacaatgaccaaggaactccagcagcattcagagttcctgcaggtgctgtgattccttttggatccatggaggacgccttgaagaaaagtggatcactcaaatcctacactaatcttctagagaggatcgaaacagctcaaattgaaaatggtgaacttgatagcctatcctcgaagcttcaagcaactgtttcacttctttctccatcggaagaaatcattgaatctttgaagaaaacatttgatcagaatgttcgactaattgtgagatctactgctaatgtggaggatttggctggaatgtctgctgctggactctatgaatcaattcctaatgtcagtctctctgaccctagatcctttggagctgcggttggacaggtttgggcatcattatacacaaggagagcaatccttagccgtcgagcagccggtgtacctcagagagacgcaaagatggcggttctcgtgcaggaaatgctgcagccagatctctcttttgtgcttcatacaattagcccagttgaccatgatcccaaattagtagaggctgaggttgcccctggtcttggagaaaccctcgcttctggtacccgtggcactccatggagactctcatgtcacaagcttgatggcaaagtcacaactctagcttttgcgaatttcagtgaagagcttatggtgctcaactctggccctaccgatggtgaaatgagtcgtaggaccgtagactacagcaagaagccgttatctgttgatgcaacctttagggagcagtttggtcagcgccttgccgccattggacagtatctggaacagaagtttggaagtgcccaagatgtggaaggttgcctggttggccccgatatatttatagttcagagcaggccacaaccacaataaacaaaaagttttgtgtggttacctggctagctgaataaaaatggatactggctgaagaaatatatggacttcgtagcacgcgtagcagtgatcgagtcttttttaatatgctatctcaggtaaaataataatttattggcacaggtttagccattcactaacttgtatcaattttgtgaactaaagaacttactattacatgtgggagccacatgctattctatttcgatggtacctattttttc

SEQ ID NO: 21342 - DNA, 2862 bp, Zea mays
  Clone ID: LIB3332-002-E7_FLI
gggaagcataaacacctcaaagggaaaaggaaaagctgttcttaaattgagtttggatgaacctaaaggcccacatactaggaatgctgcgcgcagaaaagctacttcagagaaagatgttgaactgaagccatcacatggtcacatcacttcagaggatgaagatcttgatgcttctcctgttgagattgatgatgctttaattcttgatgatgatgacgaggatgtcccagatgatgaagatgatgatcatgaggcggttctccgaggttctcttccttcctgtgttcctgagagagtgcatgatgtgaaattaggagatgctgatgattctagtgttgcctcattggcaaatgataaccaggcacagccctcatctggttctagtacaaaaaatacttctagcaggggattggacactgctgaatttagaagtccagccacatttggttcacgaggtgcaatgtcgtttgctgcagctgcaatggctggattaactccagtaggtggtcgtggaattagaggtagccgagatcggaatggccttccattgggtgctcgtgcaactgagcattacaacaaattgatatttacagctgctgggaagcagctgaacaaacatttgactgtatatcaagctgttcaaagacaagtagttcatgccgaggatgatgaagatcgattcggtggatctgatttacctgatgatggtaaccacttctgggatgatataaggggtgatgtgttcactataacgtatcagaaggctgataacacagcggagaaggggtctgttggaggttcagcttcagtgccaaaatcttccaaatcagattcttgcagaactttgtctgaaaaacagtgtacttctcttcttgatagtattttgcaaggagagcttccctgtgatttagagaaatcaaaccaaacctacaatatcttatcactattacatgtgttggagggtttgaatcagttatcacctcgtctgagactgcagtcagcctgtgatgattttgctgaaggaaaagttgctacattaaatgggctatacgatgttggagctaaggtaccctcaaaggagtttatcaacagtaagatgaccccaaaacttgctcggcaaattcaggatgttcttgcactgtgtagtggcagtttaccatcttggtgttatcagctgacgaaagcttgtccttttctgtttcctttcgaaacacgaaggcaatacttctattccacagcttttgggttgtctcgtgcacttcatcgtcttcagcaacaaccgggcaatgataataacactgcttttgaaagagaagtcaggattggtagattgcaacgccagaaagtccgtgtttctcgtaaccgtatcttggattctgcagctaaagttatggagatgttctctaatcaaaaggctgtcctagaagttgaatactttggtgaagttggaactggtcttggtccaactttggagttttatactctcttaagccgtgagctgcaaagggttgacttaggattgtggagatctcattcttcagataattctgggatgcaaattgatgcgaatgctgatgatttaataagaagtaaaaatcatgaatcagaatcacttactgagagcaggaacatagtacaatcacctcttggattatttcctcagccttggccacctactgctgctgcatcagaaggtagcaaattcttcaaagttgtcgagtatttccgcttagttggtcgagtgatggcaaaagcattgcaagatggaaggcttctcgatttgcctttgtcgacagcattttacaaacttttgcttggacaagaacttgatttatatgatatattatcttttgataccgagttcggaaagacattgcaagaattgcaaattctcgttgcacgtaaacaatttttggactcctgctctagtgagagccaaaagatagatctatgtttccgtggtgctcccgttgaagatttatatttggacttcactcttccgggctatcctgaatatgttctcaaggaaggtggagagaatgcagaggtcaacatttgtaacttagaagagtatatttctttggttgtggatgctactgttaagaccggcataatgcggcaagtagaggcatttaaggcaggattcaatcaggtgtttgacatatcatcactgcaaatattttctcctcaagaacttgattatctgatttgtggtcgctgtgaactttgggagccggaaacactgcctgaacatataaaattcgaccatggttatacctctaagagtcctgcaattattaattttcttgagatcatggcagaatttactcctgagcagcaacatgctttctgccagtttgtgaccggtgctcctcggcttccacctgggggtttggctgctctaaatcctaagttgaccattgttaggaagcactcttctgtggcaaataataattcaaatgcaactggagcgacagagtctgcagatgatgatttgcctagtgtcatgacttgcgccaactatcttaaactaccaccatactccaccaaggctatcatgctaaagaaactgctttatgcgatcaacgaaggccaagggtcatttgatctttcgtgaatctcaacactaacataggtattggtccacctagaaatctgcgtcattgttacccagagttagtttctacctcattcatgtatgacataggttaaactcagctctccggagtcccaccgaaggtttggagcccgtacctttgggtgtggatgtctatactctcttttcttcttggttgtatattcttgcggatctttatagtgaataatagtaataaattgttttgcgcttcttactatgct

SEQ ID NO: 21343 - DNA, 2329 bp, Zea mays
  Clone ID: LIB3332-002-G6_FLI
cccaaggccgcagctcactcgtgtcgtgcacccgtcccctcccacccgccaagaactagcattgccgccgccggtgccagggggcggaggagaggccgcggcggcgagggagcggcaccaggcgcagggggtcaggagagccgccggcaggatgttcgggcgggacccctggggcgggcctctggagatctccaacgccgactcggcgacagatgacgaccggagccgggacctggaccgggcggcgctgatgcggcagctggacgagacgcagcagagctggctcctggccgggcccggcgaccaggcgggcaagaagaagaagaggtacgtcgacctgggctgcgtcgtcgtcgaccgcaagatcttcatgtggaccgtcggcaccatcctcggcctcggcgtcttcatcggcttcatcatgatgatcgtcaagctcgtcccgcacaagcgcccgccgccgccgccgcccgaccagtacacgcaggcgctgcacaaggcgctcatgttcttcaacgcgcagcgatccggtccgctgccgaagcacaacggcgtcagctggaggggcaattcctgcatgaaggatggcctctccgacagcaccgtccgccggagcttggtcggaggcttctacgatgcgggggacgccatcaagttcaactaccccatggcctggtccatgaccatgctcagctggagtgtgatcgagtacagggcgaagtatgaggccatcggtgagctcgaccatatcaaggagctgatcaagtggggaacagactacatcctcaaaaccttcaattcatctgctgacacgatagacaggattgtcgctcaggtgggtgtaggtgacacctctaaaggcagcagtcagcctaatgaccattactgctggatgagaccagaggacatcgactacaaaaggccagtcaccgagtgtcactcttgctcagatctagcgtctgaaatggctgctgccctggctgcagcttccatagtgttcaaggacagcaaaacctactccgacaagctcgtcaaaggcgcaaaagccctgtacaagttcggaaggctgcagcgcgggcgatacagccccaatgggtctgaccaggcaatcttctacaattccaccagctactgggatgagtttgtgtggggtggtgcgtggatgtactttgccacagggaacaattcatacctcacggtcgccacagccccaggaatggcgaagcatgctggagcctactggtttggaagtccaaactatggagtatttacctgggatgacaaacttccaggagctcaggttcttctcagcaggttgcgactcttcctaagtccagggtacccttacgaagaaatactgaggacattccacaaccaaaccgacaatgttatgtgctcatatctgcctctattcaattcattcaacttcactaaaggaggactaatacaactcaaccatggaaggcctcagccacttcagtatgctgtcaacgcagctttccttgcttctctatacagcgactatcttgaagctgcagacacgcctgggtggtactgcggacctaacttctacaccacagaagtcctccgcaagtttgccaggtcacagctcgactacatccttggcaagaacccattgaagatgagctacgttgtgggtttcggaaacaagtacccgaagcgccctcatcacagaggcgcgtcgatacctcacaacggcgtcaagtatgggtgcaaaggaggttacaagtggagggacacaaagaaggcaaaccctaacatccttgtcggagcaatggtggctggccccgacaggcgcgatggctacaaagatgtccgcacgaactacaactacacggagcctactctcgcagcgaatgctggtctggttgcagcgctgatctctatatccgatatcaaaaccggacggttcggcatcgataagaacaccatcttctctgcgattcctccgatgttcccaacacccccgccgccgccatcagcatggaaaccatagaggcaatacctctgaatgtttttccaaagcatcgaacagggaagtggagcaaacgtgtgatcatttggtacagcgaaggccagagacaggaaagctgacagcataagtttatagagcttctatttctgtaccaatatgacagatcagtataagatcctctgtcagacatagatcggaagctgtgtgcatcgcgtggagctaatttttgggggtcttgttgctattggcactccagctcatgtgtgaagttctttttgtagaaatggtacctttacaaattgttttataggagtgacttttcattattatagt

SEQ ID NO: 21344 - DNA, 964 bp, Zea mays
  Clone ID: LIB3332-003-A10_FLI
gcaggcaggtcggcgaggagggcaggaagaccgaagaccgagccgtgcgggggctcgggacgggaacgggacaggaccccaaaatctcagatccttcctgcccgcccgcccgtgcccgtcgacgcgtcgttcttgccggccgcgccccacctccgccctctcctcctccagggggatcggatacgccacaggctgcgcgatggtgctgtgggtcttcggctacggctccctcatctggaaccccggcttcgacttcgacgacaaaatcctcggcttcatcaagggctacaagcgcacctttaatctcgcttgcattgaccacagaggcacaccggagcatccggcgaggacctgcacgcttgaaaccgacgacgaggccatatgctggggaattgcatattgtgtcaagggtggtccagaaaaagagctaaaagcaatacagtacttggagagaagagagtgtgagtacgaccagaaaatatccattgatttctacaaggaaggagatcccttgaaaccagctgtgacgggcgtcttagtgttcgtttccactccagatccaattggcaacaagtactatcttggccctgctcctctgcaggatatggcaaggcaaattgctacagccaatggccctactggctataatagggattacctgttctcaatggagaaggcattagccagcattagccacgaagatgattcgatcatagagcttgcaaacgaggtgaggaaggtgctcaacagaacaaaggagaccaagatcactggtgccaatgcttccatgaaatcacatgcccctcttgtgcacctgtccgcgcttccagaaggcaccgttgtggactcgagatagcgacctctactcggaatttactttcagctcttgcatgtttgtggttgtggccatcatgtactgattttcccttttcaacagttgtcgtgaggctgtatcgtctggagt

SEQ ID NO: 21345 - DNA, 1243 bp, Zea mays
  Clone ID: LIB3332-003-A3_FLI
cgccgcggctccgaatggcaacttccccgaaccccgcgacgattcaccgagccggcgcccagtgacccttccagaagcttccagaaggtcaccgccatggccgcgcccttcttttccactcctttccagccctacgtctaccagagccagcaaggatctgtgacggcgtttcagatatccggtggagatgtgcaggtcctgcaggtgatgctgaagtctcaggagaagctgactgcaaaaccaggtgcaatgtgctacatgtctgggaatatgcagatggacaacaattacttgcctgaaaatgatggaggcgtgtggcagtggatttttgggaaacgtgtaagcagcaccattttctttaattctggatctgatgatggatatgtcgggattgctgcaccatttcctgggaggatactgccggtagatctaacaaactttagtggagaacttctttgccaggcagatgcttttctatgttcggtcaatgatgtctccgtctctagtacagttgagccaaggccacggaatattgagattggtgcagagatgatccttaaacaaaaacttaggggccaggggatggcttttcttgttggtggtggatcagtcatgcagaaaatccttgctcctagagaggtgataactgttgatgctgcttgtattgtggctatgtcggccaccattaacttccagttgaagagccctaaccagcttagaagagcagtttttgggggtgataaccagctaacagcatctctcacgggaccaggtgttgttttcattcaaagtctgccattccatcgactctcacagagaatcgccagtagatcagtggcaggcccaagcttgagggacaacccaaagttcttcatccagattgtcatgttcttcttcctggcctatgttatgattgtatcatccataattctgacagatgtttaggcgattcagtgagcttttggtgtattcctagacaagttatcgaagagttaaagctacctccccaatgttaatgtagatgtaagagaacgaatttcacaagctgttgttagaaaccttagcagaaggttcttcatttttttttctctaacagtttggagggggcggggcgggtttcttggttagcgtgtaaagaggaagacagcaaaatcaagttgcacagcgtatggtgaatatacagtaattttcctcctaaactggtgcgatgcattttgaataattgaatcagtgatttggcttg

SEQ ID NO: 21346 - DNA, 1938 bp, Zea mays
  Clone ID: LIB3332-003-B1_FLI
gctcgtggagacgactgggcgaccgccggcgccgacctacgccaggtgcccaagccttcgacgggaccatcgccgacgacgagcactcacgagtcagaaatgtcttcagtcgggagcggcagtggcaccagggctgcgaatggtgcagctgccatcagtgctgccgcgacggcagcaggctcggccgacgccagattccacccccaactactacagcaggacaggcaaagtagatgggctggctgcttttcaggcttatcatgtttcggatcgcagaagggcgggaaaagaattgttcctgcagcacgtacttctgatgggaatggatcaaatgctcgcggaaatggtctccagtctggtgccaattcaaaccaaaatatgcctatgaatttatctcttctggctccaccatcatcaccggcatccttctcaaactctgcacttccttcgactgctcaatcgccaaattgctttctgtctgtatccgcaaactctcctggtggcccaacgtctaatatgttcgccgttgggccatatgctaatgaacctcaacttgtctcaccacctgtcttctcaacttacacaactgagccatccacagcaccgttgaccccaccacctgaactagcccatgcaactacaccttcttctccagatgttccatatgctagatttctttcttcttctatggatatcaaaactgctagcaaggagcataacatgcctttcttatcaacaacctattctggtggttcaggactccaagcatcctacccactttaccctgaaagcccttgtagcagcctcatctcaccggcttcagtaactccgaggactggtctatcctcacctatacctgagcaagaggttcctcctgcccattggaagacctctaggtccgcgtgcgacacaccatatttcagggcttcgcccattcctgagcaagaaaccactgcacaatggaagacctctagatctgcttgtgacacaccgtatgccaggacctcaccaaccaatatttttggtctggattcaaataccccgagaaactatatgctagatagcaatttctttcggccagcggcatctgctcagttctacctggaccaggctcagcaggcatttccacataatggcgggagggttagcgtatccagggagaagcaagatgccgatgaaatcgaagcttaccgagcttcatttgggtttagtgccgatgaaattgtccaatctcaatcttatgttgggataccagatgcagttgatgagtcattcagtatatcaccattcggaaacaatgctcctgctactgagatctgcccattcagtgatctgcctagtgaggttcagaaggcggataaatcatgcacctacgttaaagatggcacgagcccaaagaaatcagcaaaccatctctcgattgattctccaaataaagttctgcgcttggacgtgttcaaagtaacaaaagggggtcatctgtctgaggacgagggtattgcgagagatggccatcctttcagaaggacaacggatgaaatatctctaaaaccgatagaggtaaggaagaaatctcctcctggccattcttgctcagacgcagagatcgagtacagaaggacaaggagtctgagggatgccaacggtgttttatcacggcgtagcgcattggcaagacaactgcactaataagtcactagtatgcatggcaatttcatagttcatgtagagcagtgtgcattgaattcgagctgtcattagagtgatctgtaggcgaagagtagcctttatcgtatatgaggattatattaccagattgtgtgttctgggtatgtgatgatgagctttgtactctgtttgaactccaagatcctctttgtagacacctccagtcgttcccaggagcagtgaaatgaaatatcgttggcaaattacagg

SEQ ID NO: 21347 - DNA, 1717 bp, Zea mays
  Clone ID: LIB3332-005-A11_FLI
tgcacctccattcccttagttgtttttgggttttgtttgcttccttgttccaataacctgtttcttatggattgtttcttctggatcagatgaattacttacgcatcgtcgttggaattggatgacttattgattgtgcttgtggtcctgttacgtggtcttatttaatcttcgcctccagccatgggtaaggagaagtctcacatcaacattgtggttattggccacgtcgactctggcaagtcgacaaccaccggccacctgatctacaagcttggaggcattgacaagcgtgtgatcgagaggtttgagaaggaggccgctgaaatgaacaagcggtcctttaagtatgcttgggtgcttgacaagctcaaggctgagcgtgagaggggtatcaccattgatattgctctgtggaagtttgagaccaccaagtactattgcaccgttattgatgcccctggacaccgtgactttatcaagaacatgatcactggtacctcccaggctgactgtgctgtccttatcattgactccaccactggtggttttgaggctggtatctccaaggatggccagacacgtgagcatgctctccttgcgttcacacttggagtgaagcagatgatttgctgctgcaacaagatggatgcaaccactcccaaatactccaaggcacgttatgatgagattgtgaaggaagtctcatcttacctcaagaaagttgggtacaaccctgataagatagcatttgttcccatctctggttttgagggtgacaacatgattgagaggtccaccaaccttgactggtacaaaggcccaaccctgcttgaggctcttgaccagatcaccgagcccaagagaccctcggacaagcccctgcgtctccccctccaggatgtgtacaagattggtggtattggaactgtgccagttggtcgtgtggagactggtgtcatcaagcctggtatggttgtcacctttggtccaactggcctgactactgaggtgaagtctgttgagatgcaccatgaggctcttcaggaggcccttcctggtgacaatgttggcttcaacgtgaagaacgtcgctgtgaaggatatcaagcgtggttatgtggcctccaactccaaggatgaccctgccaaggaggctgccagcttcacctcccaggtcatcatcatgaaccaccctgggcagatcggtaacggttatgccccagtgctggactgccacacctcccatattgctgtcaagtttgctgagctcattaccaagatcgacaggcgttctggcaaggagcttgagaaagagcccaagttcttgaagaacggtgatgctggtatggtgaagatgattcccaccaagcccatggtggtggagacattctcgcagtatcctcccctgggtaggtttgctgtccgtgacatgagacagacggttgctgttggagtcatcaagagtgtggagaagaaggacccgaccggtgccaaggtgaccaaggctgctgccaagaagaaatgatgcgacctgtcgttgatgcagcgtctgcttttccaatacgtagctgagatgttccattttgacataagttttgtatgctgtggttgctgtttaccttgtgaactgttgagctctactattgggtgtccgtttatctgtttatgtagcatcttgttatttcacctattgcaatacaagaatgctatatgac

SEQ ID NO: 21348 - DNA, 990 bp, Zea mays
  Clone ID: LIB3332-005-B2_FLI
ttccctgcgattcctctcccctcgcctcctcgtctccccctaggggatcgtcggagaggaatcgcaaagagggccgtctcatccgagttaaggaagccatggagcacaaggaggctgggtgccaggcccccgagggacccatcctctgcatcaataactgtggcttcttcggcagcgcggcgaccatgaacatgtgctccaagtgccacaaggagatgataacgaagcaggatcaggccaagctggctgcctcctctatcgacagcatcgtgaacggcagcgacgccgtcatggagccggttgttgctggcagcaacacggtagtagctgttgcccaagttgagttgcaaacaatgaacgtgcagcagcccgctgatgttgccggacccagcgagggggtggcggcgatctccaaaggggggaaggtagggccgaaccggtgcagcgcctgcaggaagagggttggacttacgggattcaactgccggtgtgggaacttgtactgcgcactccaccgctactccgacaagcacgactgcaagttcgactaccggactgctgccagggacgccattgccaaggctaatccggtggtgaaggcagacaagctcgacaagatctagggggggttccctacggttgggtatcaggaagattgtaaaccgcggtaactcgtcatgcggaactgctgccttgccccccgcgcctttctcttccatgtttgctgctacaatcttgttgttgggcattgcagtgcacggtgcacacttgtgtagcccgcctcgagaattcctgcctctgcatctggtcagttctaaaatgatttgcatgttggctatgttgtgtaagctctatttatggtggtctcgctgagacgggtatttggcttcgcagttatctagctatgtgatgtactgttgtcttgtccctgggtattatatggtacactgcagccagtaatagtaatctgcaactgtgcgttaaatggtc

SEQ ID NO: 21349 - DNA, 771 bp, Zea mays
  Clone ID: LIB3332-005-C5_FLI
cgacgacgtctgccggcagtgctcctgctcctcctcctcctccttcccggccgccgcgcgagcttggtgggttagtgtctcttcttcgcggagacctgtgagaggagccatcatcatggccgccgttgagactgttgtcctcaaggttgctatgtcatgcgagggttgcgcgggggcggtcagaagagtgctctccaagatggaaggagttgaaaccttcgacatagacctcaaggagcagaaggtgacagtcaaaggcaatgtcaagcctgaggacgtcttccagacggtttccaagtcggggaagaggacctcctactgggagggcgaagccacggccccggacgctgcggcggcttctggagccgaagcagctcccggcaccgcggcagaagcgcctcctgctgctgctccggcggcgccagagatcaccccagccaaagctgacgcctgatcgtcacgctattattcactcacatgtgatgctgcggctgcgactcctaaaccttaaatctagaaatagctggggattgggtttgcattgcatcgtgttcttgccggtctagcaagtgactataagaataatggaataaacgatgacccagtgtgtgtatgatttccgttctgaagaacaacacatcccttgcaggattgttgttcagtagattctacttgtaccgcggctttggagttccgcaaaggactttacttgttcaagaacttcttctctgacaggaaataacatgtgagtgcagtccgtgcttttaaaac

SEQ ID NO: 21350 - DNA, 1173 bp, Zea mays
  Clone ID: LIB3332-005-D1_FLI
ccctccctgctgacctccgagcggagcagagcaaggaaccggcaggaggaaaggaaaggtccatggcggggagatcgacgtacgacaaccccttcgaggagggcgccgccgcggccgaggtcaaccctttcgcggaccaagctaaacgaggaggaccgacggctcagtccagctattctggcggcgcgttctacacgacgtcgcaacgcccggctcctcctagcacgcgcctttcgccgcttgctcctgaacctgctggcttctacaatgacttcgctactccagtggatatccccatggacgacacaaacaacaaggacacgaagacaagggagaaggagcttctggccaaggaggccgagttgaacaggcgtgagaagctggcgttgtgttggaagagaaaaactggccaccgtttttccccgtcatccataacgatattggcaacgagatacctgtccatctgcaaagtacactgtatgtcgcattcgcgtcactcttagggttggtcctgtgcctgttttggaacataatctgcgttacggctgcctgggcaaaagggtcaggtcctaagatatggtttctcgcaatcatatacttcattcttggatgcccaggcgcctactacctttggtaccggccactataccgtgccatgaggaacgagagcgctcttaaatttggatggtttttcctattctacttggttcacatcgccttctgcgtgtacgcagctgtttctccttcgattctcttcgtggggaaatcgttgaccgggattttcccagcaatcagtttgataggcgacagcgtgattgtcgggatcttctacttcattggctttgcactgttctgcctagagtctttgctaagcatgtgggtcattcagcgtgtttacctctacttccgaggaagtgggaaggaagcggagatgaggcgggaagcagcacgcagtgctgcgagggcagcattttgacgaaccgtgtatatattatatagcacggcgtgcgttttgttcatagtttgaagtgtttgtagatcaacatacatatgtagagtagtgttgccgtgttggtgtactgtaaatcttcagaatttttcttaccagtatttttagccctaataataaaattgtaatgatgatctcactcaagcttttagggggaaaaatat

SEQ ID NO: 21351 - DNA, 1940 bp, Zea mays
  Clone ID: LIB3332-007-F5_FLI
ccgccgccctcgcccgccaagcacatcaaggccacgctcgccaagcgcctcggcgggggcaagcccaaggagggcaccataccggaggagggcggcgcgggggccggggccggggccggcgccggcgcggccgttggtgccgccgattccgccgaggccgaccgcccgttggacaaaacgttcggcttcgccaagaactttggggccaagtacgatctcgggaaggaggtcgggaggggccactttggccacacctgctccgccgtcgtcaagaagggcgagcacaagggccatactgtcgctgtcaagatcatctccaaagctaagatgacaacggccatttccattgaagatgttcgtagggaggtcaagattttgaaagccctatcagggcacgataatctcgtcagattctatgatgcatgtgaggacgccctcaatgtctacattgtcatggaattatgtgaaggtggagagttgctagacagaattttagcaagaggtgggagatatacagaagaagatgccaaagcgatcattgtacagattttgagcgtagtggccttctgtcatcttcagggagtagtgcatcgtgatttgaagccagagaattttctcttcacaacaagagatgaaagcgctcctatgaagttgattgactttggtctgtcagattttattagaccagatgaaaggctcaatgatattgttggaagtgcttattatgttgctccagaggttctacacagatcatacagtatggaagcagacatttggagtataggtgttataacatacattctgctctgtggcagtcggccattctgggcaaggacagaatctgggatcttccggtccgtattgagggctgatcccaattttgacgattcaccatggccttcagtatcggctgaggctaaggattttgtgaagagatttctgaacaaagattaccgcaaaagaatgactgctgtccaagcactgactcacccttggttacgagatgaacaaaggcaaattccattggacatactcattttcagattagttaagcagtatctccgtgctactcctcttaaacgtttggcattaaaggcactatctaaggctttaagcgaggatgaacttttgtatcttaggttgcagtttaagctgcttgaacccagagatgggttcgtgtcactcgacaactttcgggcggctctgacaagatactcaactgacgccatgagagaatcaagggttcttgagtttcagcatgcgttggaaccacttgcgtacagaaagatggactttgaagaattctgtgctgcagcaatcagcccgtaccagctggaagctttggaaaggtgggaagaaattgctggaacagcttttcagcactttgaacaagagggcaaccgagttatatcagttgaggagttagcacaggaactaaatctcgcgccgacacattactccattgtgcaagactggatcagaaaatcggatggcaagcttaactttcttgggttcaccaaatttttgcacggtgtcacgatacggggttcaaatacaagacgacactaaacagatgcaaactgtattcgcttctaatttgaagcctctcatcgattatatggccctgattgctgttacctcctgcctgccctgcccgagtctggtcaatgaccatccttgtttgtgatgcccctcccgctgttgccgtcgtagcttttgtagagtacatgtaaagatccttgtaatggcgaaatcatatggtttgctcaagaaatatatagtgtcatttgttcttttttttttggctcgctaattttggatctttatccgtgggcagtcttttgttgacgttggcgctgaagttgataccgtcgcaggaacctgtaaggatgtaactttgtatgcacatacttgtatattattggcgtaaatttagttgt

SEQ ID NO: 21352 - DNA, 2261 bp, Zea mays
  Clone ID: LIB3332-008-A3_FLI
ggaaaggacgacggccgtcggcgtaaggggagcgagcgagcgagcggccatgaagtacgtgctggtgaccggaggggtggtgagcgggctcggcaagggcgtgacggccagcagcatcggcgtcgtgctcaaggcctgcggcctccgcgtcaccaccatcaagatcgatccatacctcaacaccgatgctggaaccatgtcgccgttcgagcacggggaggttttcgttttggacgatggcggagaggtggacttggaccttggaaactacgaacgttttctggacatcaaattgacccgcgacaacaatataaccacgggaaagatcttccaggctgtcattaacaaggagaggagaggcgactacctagggaagaccgtccaggtagtgccgcacatcacggatgagatacaggactggatcgaacgcgtcgcggtggtcccagtggacggcaaggaagggcctcctgacgtctgcgtcatcgagctcgggggcactataggggatatcgagtcaatgcctttcattgaagcgttaggtcaattctcgtaccgtgttggacctggaaacttctgtctcgttcatgtcagtcttgttccggttctaaatgtagtcggtgaacagaaaactaagcctacacagcacagtgttcgagggcttagagggcttgggttagcgccggatgttttagcatgtcgcagtactgagccattggaggaacatgtgaaggccaagctttcacagttttgccatgtcccggtctcaaatatagtgaacctccatgacgtgacaaacatctggcacatccccttgctgctaagggaccagaaggcccatgaagcgattctgaaggttttagacctccagtatgatggaaaggtgcctcgggaacctgagctaacaaagtggactaaaagagccaccaagtttgacaagttgaagactccggtcaagattgccatggttggaaaatacactggcctgtcggattcctacctgtctgtcataaaggctcttttgcatgcatcggttgctatggaaagaaaacttgtagtcgagtgggttccttcctgcgacctggaagattcttcagctaaagagacccctgaagcccataaaaaagcatggaaattgctgaagggcgcagatggcgtactcgtccctggagggtttggggacaggggagtccagggcaaaatcctcgccgcgaaatacgcacgcgagaacaacgttccttatcttggcatctgcctgggaatgcaaatcgcggtgatcgagtttgcccgctcggtgatgaagctacgaggcgccaatagcacggagttcgatccagctacgacgtcaccctgtgtcatcttcatgccagagggctcaaaaacccaaatgggagccacgatgaggcttgggtcgaggaggacctatttccatgtcagtggctgcaaatctgcgaagctgtacggcaacgccagctctgtagatgaaagacatcgccacagatacgaggtgaaccctgacatggtcccagactttgagaaggccgggcttcagttcgtgggcaaagatgagagtgggaaacgcatggggatcgttgagcttccctctcacaagttcttcatcggtgcacagttccatcctgaattcaagtcgagaccagggaagccatctccgcttttcttagggctgatagccgcggcgtctgggcagctagaaccattgcttcagcgcagcaacccgacaacgaaagcatgttcgatcagtaaagtcccgaaactgaaactgtaccccactgggcctgtgaataatccactgaacagcttggtgaacgggtactacccaaatggcactgggatccacacctagaagcgtagcgcttagcgatggtttggttggtatttgctgctatggtttttttgcttgtacccctcctttttcatgtgttcctttttttcagtttgttatttgtctctgatcaactgagagaagagaaggctaagattcagcaagcccccagctccagcgacacatggttccgacatttttaacgaggaacgccttccagtccgttgaagcgagctagccatagggtggtgaggtctagtgtgatgttgttgttgtttttttctctttccttttttttttggcctggaactaaggcgcgaagtgttttgagtagcgctagtagagcctggaagaagttatctaaactatttgtacattatggaagaacttatctaaggactgaatacacaaatgcttggcc

SEQ ID NO: 21353 - DNA, 1301 bp, Zea mays
  Clone ID: LIB3332-008-D5_FLI
aactgatataagcagaggaagcggggaggaagctgcgagttggagggggccgggagaggcgtctctggttattgcttgtccctgcttcccggtgagctgctgggagtggacgggccgggaaggagacgagaagataagggcgccgcgcgcggccatggctggaagtgcgccggcgacggcgatggacaagaccagctttgccaccacgtgcagcctgctgagccagtacgtcaaggagaagaagggcggcctgctgcagggccttggtgccctcgccatggcgccggcagctggagaaggagctttccggccgccgaccaccatgaacttgctgtcagctctcgacgacgcgccggccgaggagcgcagcgagaaggccaccgccggggagccaaaacaccaggacaaatgcaccggcggaaatccaagggaggaggcagccggagaggaggaggaggaggcgcagcagctgaccatcttctacggcggcagagtggtcgtcttcgacatgttcccctccgccaaggtcgaggacctgctgcagatcatgagccctggcggcgacggcgtggacagggcaggcggtgccactgtccctacgcggagcctgcataggccttcacacgacagcctctctgatctgccgattgcgaggaggaattcgctccacaggtttcttgagaagagaaaggacaggataactgcaaaggcgccataccaacaagtcaacagctctgttgttggcgtcgaggcgtccaagcaggcggctggagctggggtggaaaaaccttggctggggctgggccaagaagcgacaacagcgaagctggagatgtgatgaatgttgcccgacaagaaggtgcagtgcacgagattcacggatggtgcaggtcgtagcttcaggttaaggtgaaggataacttaccgtcgggtactctactcactttactgctctactactactactgctggtgacgaagttagcaagaaacgttcttctgctaccggtgggtcggtcggtcagccgttcgttggcgagattgtttgctgctggagacggacgtgctcgcagcagtttcgctggtccgtgaccgcgccatatgttgccacgaatggttggttgttcggtacgttgaggaacgatgtgtatgtagtgtgcacgtttccggtgcatcttgttctcctcaagcctgtcctgtatgtttacccccctgcaccccctcctccctctttgtagagagagggtctgtatgttcagtggaagatggttgttctatttgatttttattttatggacatgt

SEQ ID NO: 21354 - DNA, 1715 bp, Zea mays
  Clone ID: LIB3332-008-F12_FLI
tcaccgcgcgcgagggtggagtagacgcaatcccacgcgaatcccatcggatcgagtccatcagcacgccgaagaataaaccgtcgtcgaggaggaagtagggggccgcgaggtggacttcaggatgcaggcgcagaggtccccggcgatggcgggaggtggcggcgccgccacggcggtggcggctggggcggcggttgggatgccgtcccaggccacgctgccggtgcggcggcggtgcgagggcacggccatgggagccatcacgcttgacctccgccccgggctcggcgtcggccccttcaccctcggcatgccgatatcggatgcgtttacacagatagagcggcagccgaatatctacgacgttgtccacgtgaaatacttcgacgaggagcctctcaagctggactttgtcattagctttccggaccatggatttcacctacgctttgatccttggtcccagaggctccgtctcgtagagatttatgatgttaagagattgcaattgcgatatgcgacatctttaattggtggcccgtcaacattagccacttttgcggctgtgtatgcactctttggaccaactttccctggcatatatgacaaagagaggggaatttatacgctgttctacccaggtttatccttcgcattccctattcccagccagtatacaaatctattcactaatggagaagtggcagatttgccactggaattcccagatggtacaacccctgttacttgtcgggtttgtatatatgatagctcgacagatagcaaggttggggttggatctttgatggacaaagcaatggtacctgcactgcctgcaggcagcctgtatatggaggaggtgcacgcgaagcttggtgaagaactttggttcacaataggggggcaacatattccttttggtgcatcaccacaggatgtctggactgacttgggtcgtccttgtggtatccatcagaagcaggtggaccaaatggtcatacactccgcatcagaagccaggcctcggacgaccctttgtggagattacttttacaactacttctcacgtggaattgatatcttatttaatggacagacacataggataaagaagtttgttttgcatacaaacttccctggccactcagatttcaattcatataagaaatgcaactttgttatatacgacgctgaagctgaaggtacatgtcagcctaataatgcctcaaaaaattgcataacacctagtacaaaatgggaacaagtcaaggagatcctcggtgactgtggccgagctgcaatccagacacaaggctccatgaacaatccatttggatcaacttttgtatatggttatcagaatatcgctttcgaggtgatgaaaaacggatatattgcaactgtcaccctcttccaatcatgagtgtgccactacatgtgctgctgctctgagctctggctgcaacaatgatggttaacctgcagaaaggaagtatgccgtacttttgtgcttcagcagcagcaatttcgagtcgaagccaactctatggggcctggtgacggtgcttggtttatggaatgggatgcagctgcgcagtcgatatggatcagcaccgtgacttgtatttgtgctgtacatcccggccgttgtacatgaactaactgtaccctgtgacctcaccttgtgtacataaatggtctttatttattgg

SEQ ID NO: 21355 - DNA, 1016 bp, Zea mays
  Clone ID: LIB3332-008-F7_FLI
ctcgctagagcaaaaaccttgccacgaatcgccgacactccaacccggaagaggcaacgaggtgactccgcgcctcggtcatgggtgacagccaatactccttctcgcttaccactttcagcccgtcgggaaagcttgtgcagatagagcacgcgctcacggcgtcggatccgggcagacctccctagggatcaaagctgccaacggtgtagtgattgccactgagaagaaactgccttctattttggtggatgaaacatctgtgcaaaagattcaggcactaacaccaaatattggagttgtctatagtgggatgggtccagattttcgtgttctggtgagaaaaagtcgaaagcaggcacagcagtattatcggttgtacaaggagcatatacctgtaacacagcttgtgcgagagactgctgctgtgatgcaggagttcacacagtcaggtggtgtaagaccatttggagtatcgctgttgattgctgggtatgatgacaatggcccacagttgtatcaggttgatccctcaggatcatacttctcctggaaggcatcagccatgggaaaaaatgtgtcaaatgcaaagacatttcttgaaaagagatacacagaggatatggagcttgatgatgccatccacactgcaattttgactttgaaagaaggatatgaggggcaaatttcctccaacaacattgaaatcggaattattcgagctgaccgtgagttcaaagttctaagcccatcagagatcaaggatttcttggaagaggtggagtaagttgtctgttgatgatttactgtttcaaacaagaatagcagcatcacttatgagcagccagcctgaagcttgtcttggttttatcactctgtaaactgatttgctccagcgacatgtcttggttttatcactctgtaaactgatttgctccagcgacatgtggttcttacatttgaaaccctcctgagcgcatactgtagacaaatgagatacgtaagatggatgttgt

SEQ ID NO: 21356 - DNA, 1614 bp, Zea mays
  Clone ID: LIB3332-009-E10_FLI
atacctgttcatgtattatactccagaaacattgttaaatcatgtttttgaggaccttcggaagccgaaatcccccaacagttagtcttgttaaactgcttatcattataatatactagaatatgatctatggtcaattcataacttagattaaagttgaggtaattatttatagaataatctctcatataatttatattaaccgatttataatatagtttaatattttaatcacacatatcttctataaaatcataactccttaatcgtaactccgattttagtggttctcgatcccacgatctcgtagcacgcgtagatcattattatgtagtatgttcttatgtttggtgtgatgttaattttgtctataccatatctgtttgtattgctacgactagcgcgacgttacgaggatatgaagaatcatcctggtaactggaatctcaagtgccagacaagttatgcccttgatcaacttttggtacccaatatttttttttgttatcactattcatgcataggtttaattttgacgggacccaataggtcaccctagactatttatcttttaccttgtttacccctgaatcattgggtagttatgctattgctttacacggtttttgggttaatatttcattatatccatgttcctgtcattctgttatgttatttatgttcatgataagatcattatgttaatgggaacatggagaaccatccgggaaaacagtgctatcacaagggtagtatgcaatgcccttggctaactaattagaaaagctagtggaggactaccttacccgaaaggggcaagggcagtaggggagtggtcagtgtagggaggtccttgggttgattttgttgcgatggcggtcaggcgagggatccctgcattagagcttcctagaaactgtagcgagttttctgaagctagtggaactttgtaaaggcctcgtagtgttaccctgcctcgcttccttggtagaggtgtatgagattcatgaccccttggcagatgggtaacatgacttgtgggtaaagatgcgcaacatctgcagagtgtaaaactggtatactagccgtgctcacggtcatgagtggctcgaacactcacatgattaatttatgtaacttaaattcaatttttcatttgcattttcatgggattatttattaattttgttctattatttattatggttggtatttacttacacttagtaactgctaataaaatttgaccaacttattaaaagcaatgctcagctttaaccctactgttgatcagctttacacatcacatgaactcccacctttggtgagttcatgccacattattccccacaacttgttgagtgatgaacatgtgtgagctcactcttgctgtctcacacccccataggagaagaacaggtggttcaagtggagccacacatcgaggagttcgattcgatctagccatctaggtggcatctcccagttgactttctggcgccaaggatgaactttagttcgatctatatttatattttattttgtaagacttccgctatataataagtactctgattatattgtgacatttatctctatacactatgttatggt

SEQ ID NO: 21357 - DNA, 1246 bp, Zea mays
  Clone ID: LIB3332-009-H1_FLI
ggacaagttccctttttcttctcccaagtctgcgactaggaggcgacgggccgacgggccaagtttcctttctcttctcagtctgcgactggcggcggcgaccatcacgcacaagccttcgttgctacctgcgctccgccaattcggtgaattgcagtctaagcaaagggaaaaggaaggatcttttctccagacttggtaattttggacgacaagatgcacttccttgcatcatttcatgtccctacaggttttgtattatctgatttttcgggatggatgccaaaaggttcctgcatctggtcgaggagaagaaaagaagggtcctcgagaagaaagaagccccactaaagtgggagcagaagctagaaacagcagctaaggccaaggttgatgcagaagcaaaggtgaagaagctaaattcaagaaagcacaggaggagaggagatttgtcctcagactctgatagtgactatggcagcgatgttgatcgaaaacacttgaagaggaagaaccgcagaaggaacaagaagcatgagcattctgactctgatgatgccaggagacgcaatcgtagatctagaaggagcaccgactcaagtgatgagagcaacagtgaatacgagaccaggtctgaagaagaacgtccaaggaagaagcgctcgcacagaagaaggcatcaccggcactcttcaaagtcagactctgaaaactacagcagtgatgaggaacaacggagacctgccaaggaccattctcagagccgcaggcggcaccatcggtcatctgatgatgactcagacaaggacaaggtcaagtcaagacatgggaagggtctgagatctcgtgacgaggatgcaagagcagatttcaacagcaataagcatctcaggagccaatccttggaggagtcatcagatgatagagatgctgatgaatctgagaagatgaggaatggcaaaaggtctcacaagaatggcggccaccgtcaccatcaccatcgacaccaccatgaatgacatagtaactctgcagaacctaatgacaggaggcaagtactgaaagatggccagagggcccttgaaggtgacagcgcatactgaagatatcccagcaaggtcgagttaattgtccttattaaggacatgaagatcatttttttttcgttcctgatgttctcagataattattgtattgctgacaacatttctttgatttgtgaatatactaaacatgttgcctatgc

SEQ ID NO: 21358 - DNA, 963 bp, Zea mays
  Clone ID: LIB3332-011-D10_FLI
ctttcgtcatctcttctccggcgaagaacccccagtcgcccaccagatcacttgttaaactttgttgaggggtgatggcggtttctttcgcaaacctcaactccgaggcagggcttaaaaagcttgatgagtaccttctcactcgcagctacatcactggctaccaagcttccaaggatgacttggctgtctacacttcgttttcggctgctccctcgtccaagtatatcaacgtagcaaggtggtttaaccacattgatgcgctcgtgaggctgagcggaattactgcagagggccaaggtgtgaaggttgaatcctcagcagttccttcagccccaactccagatgttgctgaagcacaggccccagttgctgaggaggacgacgacgatgatgttgacctttttggtgaggagaccgaagatgagaagaaggctgctgaagagcgtgctgcagctgccaaggcttctggcaagaagaaagaatctgggaagtcatcagttttacttgatgtgaagccatgggacgatgagactgacatggccaagctcgaggaagctgttaggagtgtccagatggaagggctgctctggggcgcatccaagcttgtcccagttggatatggtatcaagaagctgcaaatcatgatgaccatcgtcgacgaccttgtctctgtcgacactctcattgaggactatctgtgcgctgagccagtgaacgagtacgtgcagagctgcgacatagttgccttcaacaagatctaggcgtgacttccgatcagtccttcccctggggtgctggcgatggtggtggctgggcaatgcaccagcctaatttatccatagctatatgtctgctttgtgtggccagtgatattgccgtgagtatttttggatcctattcgagtcgaatgtaccagtaccagagttaatttgctttaattcgaaacaccgttccagttgg

SEQ ID NO: 21359 - DNA, 2078 bp, Zea mays
  Clone ID: LIB3332-011-F4_FLI
gtaaaaatttcgcttaaaattcgattccacgaagcagcaatcgcaagctcgaagctctaaaataatctcttcccgacgcctctggaaggtcatcatctgaacccaggtagcctccagcgctggagacgtgccgtactcaaaccctagccaccaatggcagccggcggcggggctccgtgggcggagcgcgcgcgggtggtggggacgcagatccgcaacaggttccgcgtggcgcccgtggaccaccggtcgctgtggctgcgggcggacggtcgtgtcgccactgaggcggtccggcggtggtcggatcgcgttcgggccctgctgcagaggggccggagcgcggatcggaactccacatcgacggatacatcacctgaggcggtggcaaagccttcgtccagcgttttgagattctacagaaagagagtgggcaaagaagttaatgggattgaagactctgttattttccgttcgcttcaagcattggctgttcctcttattggcaatgcatgctatgtttttatgcatggtcttaactcagttcaggtttatggtgtagagaagcttcatcaggcattacatgggagacctaaaggcaaggctcttctaacggtcagcaatcatgtggcagcgatggatgaccctttcgtaattgcttcccttctcccaccatctgttatgctggaagcacaaaagctgagatggacactgtgtgccactgatcggtgctttacaaatccagttttgtctacattcttcaggtctgttaaggtgttacctgtttctcgtggtgatggcatctaccaaaaggtatccatcttatgaaaacatcagtatggcctaaattttttaatgttgatgaaccgatttatccacgcgattcatattgtgaaagcatcatgaataatgggggcaatacataaggaaattgaacaccaggcttcacaatattttgaatagggaagttgcaaccggaggtgtgctattctttaagcaattagcagatgtggatttgagaattattcttatagaattgcttggtttaactttaacgtaagaaattagatgacaaacataacaaagtctctggtagttaaagcactatagtgagtcctaaggtatttatatattggtattccttgctgcatgggtttacagacttccttttgccctcttctcagatatacaattttaatgccttcatgccttgaatatcataagtcatcctttccaatctaaatcgtgaatatgatcgattacatttggactattgaatgaaatgcatcaccagatccactcttcacttgtacccttttttgttttctttgttcagggaatggacatggcactttcaaagcttaacagtggtggatgggttcatatattccctgaaggaagccgttcaagggatggagggaaaaccattgctcctgccaagagaggtgttggaagattggtaatggatgctgacagccttccagttgtaataccctttgtccatactgggatgcaggatataatgcctgttggaaaacgaatccccagagcaggaaaaagggtgattgtggtcgtgggtgacccaatcaactttgatgacctgctcatcgacaactgtggtgacacccaagatatccctagagggatcttgtacgacaaagtgacacagagaattgggcagcgattgcaggaactcaaggtcgaagtcgcggactgatggagtgagtgacgttcctctctgcctgcttgcaagagcacacgactaagaagaactactaagaagaattattttctccctctctctttctctctctcgcaaattattatttttgtccactcctttctcgatctaccttatatgacgaaggtggtaagaattggtccaggagaaaaaaaaaggtttggcgaacgatgagaatgttgtaaactgtaaatcttgggtaggggaatagctggcgatgtgattgccttggatcaaatcgctgctgttgttgtcatgatggtggtgcaaacaaagggagtttctgttattccaaaacaaaagcttggtgaaatttcatttcagcagtataaactgt

SEQ ID NO: 21360 - DNA, 677 bp, Zea mays
  Clone ID: LIB3332-012-B5_FLI
ccgacctgctggctgctgccctctaattccttttactccccgccgagcgaaacaaacggccttcttggtcgcctcccccatttcgccgctgggcgctggctcaccccactggctttctcaagtttcaagcccctgctgcatcttggccagttgaagatgagcagggcatcaatcaaaatcatcccagagtgctacaggtccatgcaccttttgctagattgtcctttcatagtattttacttcatcagatatgcattgataagttaaaatgtttagcatgatagattgtatctctctgcattgtggtggcttggttgggcagactagtgatggatcttgattctaatttcttcaagaggaaggatgctaggggtagcatgttgcttgcttactccatgtcaacagcaagcagatcgaagttgttcctgtggatgctacaagcaacacttttggatgcatgctactttgctttgcattttgtagcagaggataaagttgcaagtgaactaggttcctgaacccaaaacatgtggttgcaacagtagacatttgatctatgagagctttgacaagccaaacttgttgttgcctacttattacgatttgaaaggtgacaagtagactcattattgtgaccgattattggcgctaatggaaatatgacctacgctttggct

SEQ ID NO: 21361 - DNA, 1740 bp, Zea mays
  Clone ID: LIB3332-012-E6_FLI
gaacacttgattgattcagtgggtagctagctagctgaatcacaatggatcctaccaagttccgtccgtccagcagccacgacacgacggtgacgacgacgaacgcgggcgctcctgtgtggaacgacaacgaggcgctgactgtggggcctcgcggtcccatcctgctggaggactaccacctgatcgagaaggtggcgcacttcgcgcgcgagcgcatcccggagcgcgtggtgcacgcgcgcggggcctccgccaagggcttcttcgagtgcacccacgacgtgacgtcgctgacgtgcgccgacttcctgcgcgcgcccggcgtgcggacgcccgtgatcgtgcgcttctcgacggtgatccacgagcgggggtccccggagacgatccgcgacccgcgcgggttcgccgtgaagttctacacccgcgagggcaactgggacctgctgggcaacaacttccccgtcttcttcatccgcgacggcatcaagttccccgacgtgatccacgcgttcaagcccaacccgcggtcgcacgtgcaggagtactggcgggtgttcgacttcctgtcgcacctccccgagagcctgcacaccttcttcttcctcttcgacgacgtgggcgtgccgtccgactaccgccacatggaagggttcggcgtgaacacgtacacgttcgtgagcgcggcggggaaggcgcagtacgtcaagttccactggaagccgacgtgcggcgtgcggtgcatcctgacggacgaggaggcggcgctggtcgggggacggaaccacagccacgcgacgcaggacctgtacgactccatcgcggcggggagcttcccggagtggacgctgtacgtgcaggtgatggagccggacacggaggagcagtacgacttcgacccgctggacgacaccaagacgtggccggaggacctgctgccgctccgccccgtggggaggctggtgctggacaggaacgtggacaacttcttcaacgagaacgagcagctggcgttcggcccggggctggtggtgccagggatctactactcggacgacaagatgctgcagtgccgggtgttcgcctacgccgacacgcagcgctacaggctgggtcccaactacctgatgctgcccgtcaacgcgccgcgctgcgcgcaccacaacaaccactacgacggcgccatgaacttcatgcaccgggacgaggaggtggactactacccgtccaggcacgcgccgctgcggcaggcggcgccgcccacgccactgccgcccaggccggtcgcggggaggagggagaaggcaaccatacgcaagcccaacgacttcaagcagccaggggagaggtaccgctcctgggacgccgaccgacaggaccgattcgtgaggcgattcgccgactcgctcggacacccaaaggtcagccaggagctcaggtccatctggatagacctcctcgccaagtgcgacgcgtcgctggggatgaagattgccacccggctcaacatgaaggcaaacatgtgatgcttctgctgaatagaataataatgaagacgcatgcatgtcgtcgccaggaacaagagaaataatacaagaccaccacgcatgggcatactccatatatatatgtatagcccgtgcccgtgtccgcctttgtaccaatacaagccaagactagtggatgtattattattattattattgcgctatcacatacatgtacccctgctacctg

SEQ ID NO: 21362 - DNA, 1099 bp, Zea mays
  Clone ID: LIB3332-012-G10_FLI
cgaatctggtggatttggagggaacgttgggcatgacccgcatgtcctctacacgcttagcgccgtgcaggtcctctgccttttcgatcggctcgatgtccttgacgtcgacaaggttgctgattatgtcgccggactgcaaaacaaggatggatcattttctggcgatatttggggtgaagttgacactaggttctcgtatattgccttatgtaccttatcattactgcaccgtctgcataagattgatgtgcaaaaagctgtggatttcgttgttagctgtaagaacttggatggcggatttggagctatgccaggaggggagtctcatgctggacaaatattttgttgtgtcggcgcgctcgcaatcaccgggtccctgcatcacattgatagagacctcctcggatggtggctctgtgagcgccagtgtaaagacggaggacttaatgggcggcctgagaaactagctgatgtttgctactcgtggtgggtgctatcgagcctagtcatgattgacagagtgcattggattgacaaggaaaagctaacgaaattcatactgaactgtcaggacaaagagaacggcggcatttcagatagaccagataatgcagtcgatatctatcacacgtactttggaattgcagggctttcattaatggagtaccccggggtgaagcctttggatcctgcctatgcactgccattggacgttgtcaatcggattttcttgaaaaaatagaacattccattcgatctgcggcgcagagatatgctgagatggcgatgtcagatgtggacgctacttcacagaaccacacaagttagattcgacggagaaatagctgagggggatcatttttacatggaaacaggaacatgttgggataccataatcttggacttgtattctagcattggctgtggccgcttaggcgatgtttgtttagcatgtgtttcgctagttgatctgattttcctgtttaagtcgtaacattgtgtgtcctgatgacgacgacattagtcaggagctatctataaacagtatgtcacttttttttgtttgtttttttacaaatgataaacaaacttagcc

SEQ ID NO: 21363 - DNA, 1186 bp, Zea mays
  Clone ID: LIB3332-013-C8_FLI
gcacccaccagaggaaaagggcaaaagccaaaaggcatcaccgccgcgacgacgatggcagcctcgctccaagccgcggccaccctgatgcagccggccaagatcggcggccgggcgccctttgcctcgctgccgtcccgcccgtcgtcgcaactcgcctgcagggcgttcggcgtcgacgccggcgccgccaggatcacgtgctccctgcaggacgtcgccagcaggtgcgtcgacgccgcgaagctcgccggcttcgcgctcgccacctcggcgctcctcgtctcgggcgcgagcgcggagggcacgcccaagaggctgacctacgacgagatccagagcaaaacgtacatggaggtgaagggcacgggcacggcgaaccagtgcccgaccatcgacggcggcgtggagtcgttcccgttcaaggccggcaagtaccagatgaagaagctgtgcctggagccgacgtccttcaccgtcaaggcggagggcatcgccaagaacgccccgcccgagttccagaagaccaagctcatgacccgcctcacgtacacgctggacgagatcgagggcccgctcgaggtcggctccgacggcacgctcaagttcgaggagaaggacggcatcgactacgccgccgtcaccgtgcagctcccggggggcgagcgcgtgccgttcctcttcaccgtcaagcagctcgtcgccaccggcaagcccgagagcttcggcgggcccttcctcgtgcccagctaccgtggctcctccttcctcgaccccaagggccgcggcggctccaccggctacgacaacgccgtcgcgctccccgccgggggcagaggtgacgaggaggagctccagaaggagaacatcaagaacgccgcctcctccaccggcaacatcacgttgagcgtcaccaagagcaacccggagaccggcgaggtcatcggcgtcttcgagagcgtgcagccgtccgacaccgacctcggggccaaggcgcccaaggatgtcaagatccagggggtctggtacgctcagctcgagtgattcgagtgtctaactgctaggtgtccgaccgccgtcatggatcttgggaaggtgtatgtataccatggaaaactttggagagcagaggaggaatcgtgtatgtaatgtacttgttaatgcaaattcgggctgtcgctttttt

SEQ ID NO: 21364 - DNA, 2112 bp, Zea mays
  Clone ID: LIB3332-014-C7_FLI
tttcgtctcccgttcgcccccgcgtgctctcttgtcgccactgccgcggccgtcgctctaccgcctctacgccaggtgcctagtcctgtcctcgccggtcccttcgccgagttttcatcgggtccttcgccaggtctccatcggtccggtcgcctgcgacgagcatccaccagctactgggtgaacatgggcacaccaatgtcgccgtggaaggggcggctgcgctctcaccacgcgaccgttcaaagtttgtccaagaggaggctcccttctcggaccaagaacccggaggagaaagagaagctccgaacatcgacgaagaaggctgccccgaagaagacggcgagaggtcgccccgctggagctgctcaacagcagccgatggctcgcttaggactgtcgtcgcggcatgctggaagagactctgagcatccagttgtgatagacgatgatgtaaacggggaatgtaacggcagggctgatcaatcagcaactacgcctctccgcaggtccccacgactacacgtggaagataagagtttgggcaagtcaccattgccaccaaatcgccgggagacctctgctaacagaaagactaaaaatgctcataggaaatacaaaaatcaagagagcctgaaaaggaatagcgcaagtgctgcattatcacctaggaaagatatttcagatgtgtctaacaaaaagagtgacaaacatgagttaaagcccaaccgttgtgaagtgctaacaggaaagaggaagagaggaacagaaaggaggctgtcatcgaagaagcaacgttgccaggatcccaaactattgcctgcggtttgccaagagattgcaccttgcaatgaacccagaaaatctacacacagaaggattgaaaaggacccctctattgaggaatttgaggtgaagcttaaagttgctaatgagagattgacaaacattgatgaaaacatcaacaagctaagtgggaccgagagagaagaaatgggaaatttctgtggttctgattggacaaaagagcaggacatggcattgcgcaaagcttacttcagtgcccgaccatccccacatttctggaagagagtttcaaaaatggtgccagggagatctgctgaagactgcttcaacagaatttataatgacctctcaacaccgactccaattgcaccacgtcccagaacaagtaaaacaacattttctcctataggaaatctcacattatctgatccaaagcttccaaatatcttggaacctacagtcggaaggcaaaagaccgctaaccaaaagagtctagtagcacagaagacagttaggcatttgttgcagaagcattgccgcattgaccaagctcaagaggccgaccacttctcaatttttgaaagctcaccaagtgccttacaattgaacttatcttttgaagattctcctggtactcctgacagttatatgaattcagattctctaggcaagcacagtggaagttcttcagcacggaagaaaccattttcaaggttaagaactaagccatctgaaccgagcccagcagttctaaagcctataaagaatgctatcttacatgagaagtacattgatcaattggcacgtagagaaggcacaaaaaggcctcgcagaaggactccagcaggctctaaaactgctgattctgggaagtctctttctgagcagcaagctggtagtctgaaggctgctaaaaatgctctcatctcagaagcaacggacttcataagcagttttaaggcgctgcaagccaattcccttgcacatgttgtggagaatagcgaagacgagattgaatgtgatgccagtgattgtagctatgctgataaagaatgaggaggtgcttacagtcttgatgcccagcggcacttagcaatcatttcctttatgtcaactgactttagtcatcacttatcagtgcctgttgctgcaataaggctaggcagttgtcagggctgtctattctgcctgatgctgtatttagttttgaacctcttagtgccctcagagatgttagttagttgtgaaagtgctaccttcatcgtgccttatgaagactgaaatcactggagattacaatggtcg

SEQ ID NO: 21365 - DNA, 731 bp, Zea mays
  Clone ID: LIB3332-014-G4_FLI
gcgtagctgagaaagttgtttcagagctagttggaagtgaaaggctggggagcaacaacagtgcggaattgttggagagtatggaaaaggaggatgtccttgctgaaaatgttcgttttggcgggaatggagttgcgcaaggtggccttccagaagagttagagccaaacaataggattgaagcggtttcttgagctgatgcaggtatgaacaagtgtacattgtggaagtcgtcactgagggttagtggcatcaaccacacaagattggggaaaaaatggtgtagagatggataagttctacccccttgctggagggaatggtaagtagctcaactcacaagtttccttctggacacagattcgcaattacgggggtttctatgatgatggatgatgggagattatcggatatcatgtcttgcacaacggcatggcaaaaaaaaaaacgacgaagaagattttgtggaaggccatggtcgaatgtcatgtcttgctggtacactctagatgagcatgaaccttaagttttcgtttttttttaacttgttgagcagctgactcttgtgtatgaactgagctgcagcgggcttccctgagttgacttgtttgggtctgagatgcttctgccatgttctaggtctagaatagaactagatgcggtggtgtgttctctaccctaagtccccttttgtgccctttccttctgtaatataagatctttgactgttt

SEQ ID NO: 21366 - DNA, 2812 bp, Zea mays
  Clone ID: LIB3332-015-B12_FLI
cttggctctcacgaacctggaggaactgaaatggaatcagaacctcatactcctccatgtagccccaactgagaaacaatactctcttgcttgatactgccacagagccaccaaaatttttgacaaacagactgatgaattcaggatgaaaatcagaggacgcagtagtgacaagattgcattgaacaacacattctgtcatgatatcaagctcttcccacttagccgcagtaccagcagaaggtatatcaaccataacctcaagcaagccgatggcatcctcccaccgcttgtctcttaacagaccttttatcaccaaattgaacccatgcgtgcttgacagcaatccctgctctatcatctgacgacatagctcatatgccttatctgtcatcccctctgcatcacaaccttttatcagaaccgcatatgtcacattggttgctgtcacaccatccctgacagcctcgttaaataaatccagcgctttcccaacttcaccgagcaagcaatacccatgcatcaatgttgtcgcgagaaccacatccatctttccagcaaccagcaacatctgatccttcaactttagtgcctcctccatccttcctgccttcacgagcacagccaccacaaaactgtatgtcaatgtcaagttccatggcctgaagccggcctccatcatctccccgagcacctggaccgccctgtctgcatcgcgcagcctcatcacgtcagcgtggtaccccttgcctcgcatcttctcgaacagcgcaagcgcgtctgcgacgatgggctgctccagcggttgctcgtcctcgtccatgacaagcgcctccatgcctggccccgtacacctcttcagcggtggggtagtacttcttgtccgcagcgagcaccacggcctgctgcgacggatcgccatcctcgtcgtcatcgtagacgtcgtagacgggttcactattgaggtggaagatgtcgacgttgtcgaagaagggcacggagggcgtcgcggtggatccggggacccccacggcgcgtgctgccgccatggacgcggtcttcccctgggaaccgaagtcgatgggcatctcgtcgtcgaagacaggtccctcgtcaaagcctgatgccgtggtgttgcccgcagatcgaccgaactgaggcagaacgggcagatcctccgccgcttcctgtgccaccgctgctgctagatctgcctgaccccccaccagcgactccaccttctggaccagacaactcggcttcttcataaccaactcccagcgcgcttcatctcattgtgccgcctcagccatcgtcgcgagcaccaaggacgaaaccgaggaaaatgtcgagaatcgactacctctgataccaactgtcacgtccccgtggccgccgatagtgagccgggacgtgaggagctgatgacgcaccgatatgccgcctctccgtggaggaagacgagcgaaggggacgaaccctgtttccgatttctgatttgatttccatccctctcctgccgttgtggtcctgcctttaggctgctccgagttgggccatgggacatcgaggcccatcgcgtggtgagccggtgccgggtgttacaggcaagtaactagtttactgagcaaaacatagaattaattttctagtaagtttgctcttcagtatgacagaacatatgactaattttggatagttcgcttaggttgcaccataactcagccacatacctttatggtttcatatgaaacttgtcttgattttgatccaaatatcaaatagatatttctacaaacaataacctcctggccatattagggatctggatatagttggagttgtatgacacaatagatgaaaatttacttttctttttcagcgtttcttatatggtgccacatggaataatttctcaaaaaaaaaaaaaccgtctacttcaaattgtcagtgtttttccattggaaagctacaacaatatatagcccatgcaaaaacccaaactgatcacatcagattgatagatgttgaattaatagatgagaacattttcatgtcctaacttatgtgctgtgcttagtatagtataatttgcaacctttcttccaggtcaaaactgttgtttcaattcatctcggattgactattatttggagtatgaaccccatccgtcatcaacaaaaaatttgcggcatcttttccagatgatcaggaaaggcagcttcgcaaagtacgactatggatggtggggaaacctaaggcgctacggccagctgcgtcctccctcattcgatctaagcagcataccggaatcactgccgatatggatggggtatggaggccttgatgccctggctgacgtaacagacgttgagcgcaccatcaaagagctgagatccacgccagagctcttgtacattggtggttatggccacattgatttcatcatgagcgtcaaggcaaaggaagatgtttatgttgacttaatgaggtttctcagggcccagcagggaatgcacagtagctattaggacgcacgtcacgtacgccttcaaataaatgcttatgctatgatgacagtacgaccatgtaaatacggacacagcatagcatgtaaatacaaacagtctattgcattgcatgtaaagtggtgtgtggattgttctccatttgatgtactgctttctgagtacagtacacatgtacatcagtacatgtaacatgtgtatatgacaaaaatgtagcacatgcaacttggcttatttcgtgccgattgtgtgcttgcatttggggaggaaatcgagttgcaaat

SEQ ID NO: 21367 - DNA, 2582 bp, Zea mays
  Clone ID: LIB3332-015-B4_FLI
gagatttttagataacgagttgttctaagtgagatggcatgtgtggttgacatttgaaggatttctctatataaatcccggctactattaacatctcaacctcaccatcttctcttgatcgaggcagggatcaagcgaccgagacccgccatggaccttgcacggagcggcggtgccgctgccgcggacgacgggggggagatcgagaggcacgagccggcgcccgaggacatggagtccgaccccgcggcggcgcgcgagaaggagctggagctggagcgggtgcagccgtggcgggagcaggtgaccctgcgcggcgtggtggcggcgctgctgatcggcttcatgtacagcgtgatcgtgatgaagatcgcgctgaccacggggctggtgcccacgctgaacgtctccgcggcgctgatggcgttcctggcgctccgcgggtggacgcgcgtgctggagcgcctcggcgtggcgcaccgccccttcacgcgccaggagaactgcgtcatcgagacctgcgccgtcgcgtgctacaccatcgcgttcggtggtgggttcggctccacgctgctgggcctggacaagaagacgtacgagctggccggggcctcgccggccaacgtcccgggcaactacaaggaccctgggttcggctggatggccgggttcgtcgcggcgatcagcttcgccggcctcctaagcctgatccccctcagaaaggttctggtcattgactacaagctaacttacccaagcgggactgcgaccgctgttcttataaacgggttccacaccaagcaaggagacaagaacgcaaggatgcaagtccgagggttcctcaagtactttgggctcagcttcgtgtggagctttttccagtggttctacacaggcggtgaagtttgcggctttgttcagtttcctacgttcggtctgaaggcctggaagcagacgttcttctttgattttagcctcacgtacgttggtgcggggatgatctgttcgcacctcgtgaacatctccaccctccttggtgccatcctgtcgtgggggatactgtggccactcatcagcaagcagaaaggggagtggtaccctgcgaacatacctgagagtagcatgaaaagcttatacggttacaaggcattcctctgcatagctctgatcatgggagacggtacataccacttctttaaagtcttcggtgtcactgttaagagtctgcatcaacggctgagccgcaaacgtgctaccaacagagtggcaaacggtggagacgaaatggccgcgcttgacgacctacagcgtgacgagatcttcagcgacgggtctttccccgcctgggcagcttacgccgggtacgccgcgctgaccgtcgtctcagcggtcatcatcccgcacatgttccggcaggtcaagtggtactacgtgatcgtggcctacgtcctcgcccctctcctcggcttcgccaactcctacggcacggggctcaccgacatcaacatggcctacaactacggcaagatcgcgctcttcatcttcgcggcctgggccggcagggacaacggcgtcatcgcgggcctcgccggcggcaccctggtgaagcagctggtgatggcgtccgcggacctgatgcacgacttcaagacgggccacctgaccatgacgtcgcccaggtccctgctcgtggcgcagttcatcgggacggccatgggctgcgtcgtcgcgcccctcacgttcctgctcttctacaacgcgttcgacatcgggaaccccaccgggtactggaaggcgccgtacggcctcatctaccgcaacatggcgatcctcggcgtggagggcttctccgtgctgcccaggcactgcctcgcgctctccgctgggttcttcgcgttcgccttcgtcttcagcgtcgcccgggacgtcctgccgcggaagtacgccaggttcgtgcccctgcccatggccatggccgtgccgttcctcgtgggcgggagcttcgcgatcgatatgtgcgtcgggagcctggccgtctttgtctgggagaaggtgaacaggaaggaggccgtgttcatggtgcctgcggttgcgtccggtttgatctgtggagacggcatatggaccttcccgtcttccattctcgctctggccaagatcaagccaccgatttgcatgaagttcactcctggaagctagaaacagtattgacagttcacagaaatggagaatgcgagatacactgaaggcatcaactgtggttggttgaagtgttgaagagcaagtcctctggtcgtcgacatgaagcggagccatatgtcccctgtattatccttgttgtgcatgtgtgggttctccaagggctacagcactcgagattttctatagagttgatcatatgttttgttgtcatgttgggttcaacctatgtttatgttttgggtggaaaaaagatacaactgtacatttttaacagaaattaatgctcattttggttgtgtatttacattctttcaagtttgtggttactgccttgtatagtttgttgtcaacaatggagctgattggttactcgtgtaacc

SEQ ID NO: 21368 - DNA, 1200 bp, Zea mays
  Clone ID: LIB3332-015-F12_FLI
gcccaccgagctccctccatcttgctccccatggccgagcgccctcccgtcctccaactcgccagcgcttggcttcctgcttgccaagtccatctccctccctagcgctgtcccacctcctgctcctccacggcgctcagttccagctcgccggctgtgcaactcgcccatggcgcccatctctctggccgcgacctccctgctcctcctttccccagccgcggtcttccctgctctagcccagccgagctcgtccctgcgcgcgtgttctcctgcgtccagccgagcgcgcgaaacttctctgctcacggcactccctgtctgctcggccatggtgaaaccctccttaccatggatgccggagttcctctgctcgttctcatggccgccgtcgagcttccggcgcgcgcccatctcctctgctcccccgcgcgcgtcctgggactctccatcgcgccgatctgtgcccggccgtggccgtcgaactcgcccagctcggatttttgcttggtcgcccgccgtttaccagtaccgtggtctcgctcggacgcgtactgtcaagattgttcctgcacgcacgccctggtacccctgctcgctgttgggccgaccgtcagcagcttcgtcagcagcttcccggcctccgtcgtgctcagcagcgagtaatttatgtcggagcagttactgagacgccctcctttgcgtcgtgctcgccagatcaagcctcgcgtcgtcgatttgcgcagttcatgttcggcaatcggtttagtctccgtcgaacttctatttaccgtgacgccgagctccttcaacactgccccactccgttgtcgttattccgtcgcctcacttcgatgtcagttccttcatgacatctcctacttgtgttcgcgccgacaaaaggatcctaagagaatgtggaaaaacaagccccaagttgatgcctcaaatactcgacgaaaagcctgaactataaattatcgtggttcttgcagagttcgcgtcgaatttaattttggatgagctgatttgctactactattattttgttttaatgaatagattgatagatatgtaggttgcgatgattttttttatttagtataggtacgcttagtaattatggctagctccgttgttgtgtccgtgtgctgttacgtgacaatataattgtttttagaataatgaagtagttgagtc

SEQ ID NO: 21369 - DNA, 989 bp, Zea mays
  Clone ID: LIB3332-016-A7_FLI
gccaccaggtgcagagtctttcgtcatctcttctccggcgaagaacccccagtcgcccaccagatcacttgttaaactttgttgaggggtgatggcggtttctttcgcaaacctcaactccgaggcagggcttaaaaagcttgatgagtaccttctcactcgcagctacatcactggctaccaagcttccaaggatgacttggctgtctacacttcgttttcggctgctccctcgtccaagtatatcaacgtagcaaggtggtttaaccacattgatgcgctcgtgaggctgagcggaattactgcagagggccaaggtgtgaaggttgaatcctcagcagttccttcagccccaactccagatgttgctgaagcacaggccccagttgctgaggaggacgacgacgatgatgttgacctttttggtgaggagaccgaagatgagaagaaggctgctgaagagcgtgctgcagctgccaaggcttctggcaagaagaaagaatctgggaagtcatcagttttacttgatgtgaagccatgggacgatgagactgacatggccaagctcgaggaagctgttaggagtgtccagatggaagggctgctctggggcgcatccaagcttgtcccagttggatatggtatcaagaagctgcaaatcatgatgaccatcgtcgacgaccttgtctctgtcgacactctcattgaggactatctgtgcgctgagccagtgaacgagtacgtgcagagctgcgacatagttgccttcaacaagatctaggcgtgacttccgatcagtccttcccctggggtgctggcgatggtggtggctgggcaatgcaccagcctaatttatccatagctatatgtctgctttgtgtggccagtgatattgccgtgagtatttttggatcctattcgagtcgaatgtaccagtaccagagttaatttgctttaattcgaaacaccgttccagttggaattctgtt

SEQ ID NO: 21370 - DNA, 1897 bp, Zea mays
  Clone ID: LIB3332-017-B2_FLI
gggtcttcttcttgtcagtaggtgtggcctgcacagctagcgccactgcccactgtaccgccattattttgttagcatggccccgagtaacatcgtcgttcagagcagcagcactccgccggttgccggcggcgacgaggagttcgcgccgtctgtatggggagatttcttcgtcacctatgcccctcccgtctcacaggcatcagagcagcggatgagtgagagagcggagctgctcaaggcgcaagtatgtcaggcgttcgatgctgccagcatggatgttgcaggtctggtcacgtacgtcgacaccctcgaacgcctcggcttagacaaccacttccgcgacctcatcggagctgccctggaacgaatcggagctgaggagctgccggagcacggcggcggcctgcacatcgtcgcgcttcggtttcgcctgctccggcagcatgggatatgggtatctacagatgtgttcgacgcgttcagagaggacgcgggcggtttctgctcgagcctctgcagtgacgaccctaggggtctcctgagcttgtacaatgcggctcacatggcagtacccggcgaggtggtcctcgacgacgccatcgccttcgcgaggggccgcctcctggacatcatcagcaaaggcgaggtcaggtcaccggtgtcagagcagatcacacgagccctcgacatccccctcccacgatttacgaggcggctggaaaccatgcactatattgccgagtatgagcatgaagaggcacacgacggcctgctgcttgagctcgctaggctcaactttgtccttgtgagagcgcttcacctcagggagctgaaggacctgtcactatggtggagggagctctacaacactgtgaagctcccgtacgctcgggaccgtatggtggagatctacttttggacctgtggtatgcttcatgaggaggagtactccctggcacggatgttcttcgccaagacgttcgggatggtgtcactgatggacgacactttcgatgtccatgctactctagacgagtgtcacaagctcaaagaagctatgcagagatgggatgaaagtgaggtctccattctacccgagtatctacgcttgctgtatatcaaaacacttagcaacttcaaagagtttgaggagatcttggaaccgaacaagaagtaccgcatggcttacacaaaagaggcatacaagttgtgctccaaaaactacctaaaggaagccatctggtctaaccagaaataccagccaagcttcaaggagcatgaggagctatcaatcatgacctcaggcttgccgatgctcacgatcctaacactaatgggcttcggtgacgaggcaaccccggaggcgttcgaatgggtaagcagtgttcctgaaatggtccgcgctggttcgcaggtcactcgcttcctcaacgatttgtcttcttacaagttgggaaagaacaagaaagatatgcctggctctgtggagacctacatggtagagaatggcttaacaggagatgaggctgcagcggcaatcgcggcacttctagagaacaggtggagaatactaaaccaaacaaggatggagatagatcacacgctactgccagcggtgcaggtggtggtcaacatggcgagggcaaatgagatcatttacctccacggcagggacgcctacaccttcggtgctgacctcaaggaccttgtcaccacactcttcctcaagcaagtgctccctctctagacaatactctgatcacacaaccagattggctataacgattctcgtgttgtattacgctttgtgtttcattatgcacgctatatatatgatcaatgtacctgtttctatcatattgatggtaatataatactccctccgtttcttttt

SEQ ID NO: 21371 - DNA, 404 bp, Zea mays
  Clone ID: LIB3332-017-D5_FLI
tcttctgtcagtcctccccggccagcgccgccgcccgtgagttcgtgaagaagaactatggtgacatcaaggctcgcaacccctccctccccttccttgtccgcgagtgctccggtgtccagccccagctctgggcgcgctacgatatgggtgtggagagatgcgtgaacttggatggcctgacggaagcacagattgataaaaagctggaggagcttgccaaggccggcgagtctcttaaaaccaaatagttttggaactctatcctgccatgtttaacgttcccaaataaatgatgccatatgggtgagcaattgttactctatcgttatctgtagttgtgcctggaattaagtctttaattggcttaactttgtgaaataatcactactcttttacttgcc

SEQ ID NO: 21372 - DNA, 1015 bp, Zea mays
  Clone ID: LIB3332-019-B4_FLI
gcacgtacggtctcaggcgcatcggcctcgccgctgcacaacgccggagacgatacgacggcggctacgggatgacggtcttccacttcctcaactgcgccttcctcaccttcgggcctcacgtcgtctactactccgccacgcccctgtcagagtatgatacaatcggcacttctataaaagcagctgctgtttatcttggaactgcgcttgtaaagcttgtttgcttggcaacattgctcaaagtacctgagaatgatagctttgacccctatcaggagttaatgaaagtttttattggattcatagatgtagctggactgtattttgctttgacccagctgacccacagaaacatctctcagaatcataagttccaggctgttggtcttggttgggcttttgctgattcagttttgcaccgactggcacctctctggattggggcaagagggcttgaatttacatgggagtacatatttcaaggacttgaagcgaatgctaatcttgtgatgaccctctcccttgctgcattggggtccttgatgtggcttaggaagaacaagcctaggactttggttccaataatttatgcatgtgctctgctcttggcaacaatgccatctatcaccagctacttgaggaggtcattggagtggcagacaccaaaggtggttggcttcgagctcttctcctcccttgttatggctttcatcagctggcagctgttctcggcttgtcagagaccgatgtaacaagacatccataccactgccaattttacgtgcaatttgaagctcctgagtacgtcagaagaattaggaagatcctttgaactttgagctacaactcttcttcttggcgttcggttacagaacattttacttagaacatctgttgtaacttgtgagctgtagagcagaaacacatgcctgaaatgagttattctataacagatgctcatgtaggcgtttgatctgaaacatttgtttattattattgcggtgtgcatttc

SEQ ID NO: 21373 - DNA, 1470 bp, Zea mays
  Clone ID: LIB3332-019-D12_FLI
tggggacctgccattggatggcgctggatgcccttcactcccgtcccagattcatcgtcctgcagctcctcttccatctccgatctgctgccataccactaccacaccatggatagccaaactccactgcataacccgctgcgaagaaaccttctaaagtgactaagtgatcgatctccttgtcctgaaaggctgaaacctaaggcgagagaggccacgggagagcgccatggttctcctgctcctgggctgctctcctgcatcgtcgcgcccagactgctctccagcttccaggagaagatgcagcaccgccggacagaaaatggtcaggtgctctctgaatgaagaaacgcagctgaacaaacatggactagtatccaagcagttaatttcatgccttgctgcttcgcttgtgttcgtctctccacctagtcaggctattcctgcagaaacctttgcccgtccaggcttgtgccagattgcaacagtggcagccattgacagtgcttcagttcctctgaagtttgacaacccttcagatgatgtcagcacagggatgatgatgaggggtatgaccgccaaaaacttcgatccagttcgctactctggtagatggtttgaggtagcctcgttgaaacgtggatttgctggtcagggacaagaagactgtcactgtactcagggagtgtattcttttgatgagaaggcacgctcaatccaggtggatacattctgtgtccacggtggacctgatggatacatcaccggcattcggggcagggtgcaatgcctatctgaagaggacattgcaagtgctgagacagatcttgagaggcaggagatggtccgtgggaaatgctttctccggttccccacactgccattcatacccaaggaaccctatgatgtccttgcaacagactatgacaattatgcaattgtgtctggagctaaggatacaagctttattcagatatactcaagaacacccaaccccgggccagaattcattgacaagtacaagtcttatgttgccaacttcggctatgacccaagcaagatcaaggacactcctcaagactgcgagtacatgtcctcagaccagattgcgctgatgatgtcgatgcccgggatgaatgaggccttgacgaatcagttcccagacctcaagctaaaggcaccggtcgcacttaacccattcacaagcgtgtttgataccctgaagaagttgcttgaactgtacttcaagtaaaaaacagtgtagcattgtccagtagccaatagccaattgcccaacttctcgacttggatcttcaatggaatgaagttcagtttattctgacgtttgctagtcagttagttctttttaagtacattgtttttttgtctattatataagagtgggatatgtaagattaagatctgttcagctgttctcggttactgtttgtacaattgttctttttcctg

SEQ ID NO: 21374 - DNA, 1661 bp, Zea mays
  Clone ID: LIB3332-019-F4_FLI
tttcctcgcctccccctgaccccctctcgtccacgcctcctcccctaccattcgcagttttggacacttggttgtcgtttcgtcccgcagatccgcaagcaccgggccagtagagagagagagagagaggagggagggtcgcggcctcgcggggggtggaggagatgtctgtggcgaaggaggcggggccgagcagcagggcggtgcttgtgacgggcggggcgggatacatcggcagccacgccgtgctgcagctgctcaccgcgggcttccgggtcgtcgtcgtcgacagcctcgccaactcctccgagctcgtgatccgccgcctgcgctcgctcgcggtggaacacgccaaaaacctcgcgttccacaaggttgatatccgtgacaaagatggattggaaaaggtttttgcttcaacaagatttgatgctgttattcattttgctggactgaaagctgttggagaaagtgtacaaaagcctttgctttattatgaccataatgttgttggcacaataaatcttctggaagtaatggcagctcatggatgtaagaagttagtgttctcatcatcagctgcagtttatgggtcacctaagaactcaccctgcactgaagattttcctctcactccacataacccatatggcagaaccaaacttatggcagaggagatatgccgtgatatctaccattcagatcctgaatggaatatcattttgcttaggtactttaatccagttggggctcaccccagtggataccttggtgaagacccatgtggaactcctaacaaccttatgcccttcgttcagcaaattgcagttggcaggaggccatcgctaacaatatttggaaataactacgcaacaaaggatgggacaggggttcgtgattatattcatgtggttgaccttgctgaaggacatcttttcgcattaaagaagctttttgaaagctcatctaacataggatgtgaagcatacaaccttggaaccggaaaaggaacatcagtgttggagatagtcaatgcatttgagaaggcttctggaaagaaaatccctttgatcatgggccaacggcgtcctggtgatgctgagattctcttttcatcgccggcaaaagcagagagagagctccactggaaagcgaaatatggcatcacagaaatgtgcggagacctgtggaactgggctagcaagagcccttatggatacgcggcatctgagtctccgaagctgaatggtagttcacgctgagcaacgccgattggcccgtgtggactcacttgtacatgagactgtagtgccagccaaccaggataaatgtagatctagtcggtcggtcatacagagagaagttctataggcctaggaaagaaatgttatcctgttcctcagcataagctcccatagtggttcttccatatgcgtatagtctatgaaatttgttctaggaccattgctatagtcaaccagctaattcaattctatttcttgagttgcgttgcctaaaatagagcatgatatagatatcagcatcacaaaaagttgcagttcatacaaattttcttttgtaattgtattgtttctttgagacaatttctgtattattagtatttcttttgaaataaatatgtaatattggttagtgagacc

SEQ ID NO: 21375 - DNA, 2173 bp, Zea mays
  Clone ID: LIB3332-019-H2_FLI
ctactgcaacggaacaagaacagaaccaccatcactcctccgctcttcaccatcagctgccgcttcctctcttttctccccccagtagccagcagtctccgtcactctctcacacacacaaaagcagcgacttgctcacagtagtgctccacggacagaatgaccaaagacgacgagttcaagctggtcaagatccagaaccatgtgctcaaggtgaacatacactgcgacgggtgcaagcacaaggtcaagaagctccttcagaagatcgaaggtacttcttctttctttctttctttcttgacactcacttcactgcccatatcttagactggctgcccggccaccaaaaagcacaccgccctgctgtgtcttgctaacatgcgttgcgttgacacgacaaagagatcccggcttctcatgtaaaaagaaaacagaagataaaaagaaccggtaaaacttcgtttcatgatgcgaatttttaactgtgctatggtaaagagggcggcccagactttcaccccctagggtgaggtgaaatttcctgccgttctttcggatggatgggcacagcagagccccccactcactgcacaagcccccacatctcgtgcttgtgacatgcagtcgccagtagtacatggtaattactagttaccgtggctcacgagcagcctgtgatctcctctctctctctctctgctgctggctgctgctgcatctcatggatggcaggcgtgtactcggtggccattgatgtggacaaccacaaggtgtcggtgacaggcgacgtggactcggagaccttgatcaggaagctcaccaggggcggcaagcacgcggagctgtggtcgcagcacaagggcggcagtgcccagcagaagcagcaggcccagcagcaacagcagcagaagcaaggtggcaatccgagcaaggatgggcacagcaagagcagcaacaacaacggcggccagaaaaaggaccaggggaagcaaggaggaggaggaggggttggtgggggcctcgtgcagggcctcaaggcgttcaagaaccagcacggcggcaacaagcagcaccaccagctccctgagctcctcagctcggaggacgatgacggcatgttcgacgacgatgacggcgagttcgacgacgactacgaggaggagctccggttcctcggggacaagatgagccagctcgggctccacggcaacggcaacggcaacaaccagcaccaccatcagaacaagaacgggaacaacgtcgtcgctgtcaacagtaaccacagcaatggcaagaagggtaacggcggcgctgcagccaatcgccaccagagccagaaccagaagaacgtgaatgtggtcaacgtggcagcagcgaatggcaagatgggcggcggtggaggagtccagaaccacaagaacgctaacgcgatcaacatggcggcggcggcgaacgccaagatgggtaatggcgcccagaggaacgctggcgccatgggtggcattggcatgctgggcctaagccatggcctgggagcgggcggcgctgctgctgctgctcctcctcctggcttccagcaaggctacgcaggcttcaaccacccgccctatgccgctgctgccggctatggaggaggtctacagcagcagcagcagcatctccagcaccaccagcagcagcagagtaacagcctcatggcgagcatgcaggggtaccatcatcaccagtaccctgccgcgacggccgccgtggtgaacaacttgaggggcctgaacggcaacatggtgatgatgcatcagcaccagccgcagccgcagccgcaggcccagatgatgtaccactcgtctccccagatcagcagcccttacaccggctactacaacccttacaattactactaccaccaccacccccatcccggcagcgctgggtaccctgccaccgccagcaacggggatgtggagagcatgttcagcgacgagaacaccaagggctgtgttgtcatgtagggcgggacgagaacaccattcctgctacctttctttctctctttcgtttctttttcattattttactgctcttatggttttcgcctgtatcaagagtgaatcatggtgttgacttagatgtgttgttgaaagtaggggcaacttgagaggggtgaccaaac

SEQ ID NO: 21376 - DNA, 1211 bp, Zea mays
  Clone ID: LIB3332-020-B6_FLI
agaacaacactggtggctaacacatcaaacatgcctgtcgctgctcgtgaagcttccatttacactggaattacaattgctgagtatttccgtgatatgggctacaacgtcagtatgatggctgactccacctcccggtgggctgaggcattgcgtgagatctcagggcgtttggctgaaatgcctgctgatagtggttacccagcttacttggctgcacgtttggcatccttttatgaacgtgctggtaaggtaaaatgtctgggaagtccagacaggaatggcagtgtcacaattgttggagctgtctctcctcctggtggtgatttttcagaccctgttacctccgcaaccctcagtattgttcaggtcttctggggtttagataaaaagctcgctcaaaggaagcatttcccatctgtgaattggctcatttcctattcgaaatactccaaggcccttgagtctttttacgagaaatttgatccagatttcattgatattaggacaaaagcacgtgaggtgttgcagagggaggacgatctgaatgaaattgtgcagcttgttggtaaagatgcgctggcagaatctgacaagattacgctggagacagcaaagcttttgagagaagattatttggcacaaaatgcattcaccccatatgataagttctgcccattctacaaatccgtttggatgatgcgcaacattattcacttcaacacattggcaaatcaggctgtggagcgggcagctggtactgacggccataagataacatacagtgtcataaagcatcggttgggggatctattttatcgcctagtatcccaaaagttcgaggatcctgcagaaggcgaagaagctttggtcggcaagtttaagaaactgtacgacgaccttaccactgggttccgcaacctagaagatgaggcacggtgaactgctgtagattttgtgtaagacaataatggctgccaaatgttttataaggtacggaagttgtagattgagaccatgtatgagaattttccccaccgctactcatttctttgccaccactattttagtcatcagtgctggatgggcaccctgtttatttcgacgtaccctttattgctagcattgtaataagcgatgggcatgcttgtagttgaataagtacaatgtccatgtattcaaacatcagcgtcatgtttatttgtttgttg

SEQ ID NO: 21377 - DNA, 1374 bp, Zea mays
  Clone ID: LIB3332-020-B7_FLI
gctgctctctctcgcctctggttggcagagctctcttgaagcctcgagactcgtctcgccgctgctccctcagctctgccgctgcgtgcctccgttagctgttgcattgcagcgcagccccgcgagccttgagctgctagctcgcccttcaccacagtcctcagacatggagttcgaagaccgctgccacaaggtccaggagcccaagttcgactgcctgctcttcgacctcgacgacaccctgtatccgctgagcgccgggatcgcaggccatgtcaagaagaacattgaagattacatggttgagaagctgggtattgacgagaccaagatcgagaacctgggcaatctgctgtacaagaactacggcaccacgatggctggactcagggccatcggctacagcttcgattacgatgagtaccacgccttcgtccatggaaggctgccgtacgacaacatcaagcctgaccccattctcaagcacattctcaagaacctgcgcatccgcaaactcatattcaccaacggtgacatggtccacgccgtgagagccctcaagaggctgggcctggaggactgcttcgaggggatcatctgcttcgagaccctgaacccgccctgcccgccgcagggagaccaggagcccgagatcttcgacatcgccggccacttcgcccgctccggcaccgccgacgagctgcccaagacccccgtcctgtgcaagcctaacgtggacgccatggaggaggcgctcaggatcgccaacgtcaacccgcacaaggcgatcttcttcgacgacagcgtacgcaacatccaggccgggaagcagattggcctccacacggtgctggtgggcaaatcgcagcgggtgaaaggcgcggaccacgcgctggagagcatccacaacatcagggaagcgctgccggagctgtgggaggaggccgagaaggcggaggacgtgctctaccccgaacgcgttgcgatggagacctcggtcaccgcgtaaaacccctgaatgcctccggtgcaccgtcagccgaactttctcgacatctccaggaccgcatcaacgatcacatgtcactcgctccccgagccagggccggtgatgatctcgcgctggaactgaatccaccagcaatggccgggccgaggatcgatttccgacagcaggaagggtgcagcatgtaaagggggaacagatgagatcatgtttgtttgggttggtcccccgttgtatatgtagttatgtatcagccagtcctttgtttgtaaattaccagtatttagaagtaataagaaaatgggggtttacgtgtacgtttcctgtgctctgtcatctgaagcaataaaactggttagcaagaccgg

SEQ ID NO: 21378 - DNA, 277 bp, Zea mays
  Clone ID: LIB3332-020-F1_FLI
catcatcctgctggtctgcgtcgtcatggccctcttcaccagcttccggaccacgttcccgctctggacctgcctcgtcgcctacatgctctacccgctctcgctgatcatcgtctacatcctcgactatgtcttcggctggtcatagacctgattggctcaagtgaacacctggttttcagacagccgccggtgtttctgtttgacctccttgtaattttaactatatgtccagactttttctcatgtgatgctgtgatcatgttctactttctct

SEQ ID NO: 21379 - DNA, 1229 bp, Zea mays
  Clone ID: LIB3332-020-F9_FLI
agccaagccaaccagccagtcagaagaggaaccggggagcggcagctgcagcggccgagggcggagcacgcgaggcatggatagataccaaagggtagagaagcctcggaatgacacgccaatcagccagaatgagatcagaatcactactcaggggaggatgaggaactatatcagctatgggatgtcgctgcttgaggaaaatggacatgatgagattagtatcaaggccatgggacgggccataaataagacagttatggttgttgaattgatcaagagaagggttggaggtcttcatcagaacactgctactgaatctgttgatatcacagacacatgggaacctttggaagaaggccttctcccactagagacaactcgccatgtgtcgatgatcactgtgacactgtcaaagaaccctctggatacatcatctccaggataccagccacctatcccagctgaagaggtgaaacctgcttttgactatgatcatgaagaatcgtatcccactggtcgtggaagaggacgtggtggtggcagaagaggcaggggaagaggcatgagcaatggcccccctccacctgcttatggttacaacgaagagtgggaggaggaaggagattattataacagagggcgcgggagagggcggctacgtggacgaggtgggagagggcgtggtggctactacggaggtgggaggcgtggtggctacggttatgattatggctatgcccccagaggcgggtactatgaagagcaagacgaatactatgatgagcccgaggaatatgctcctccccctggccgcggacgtggcagagggagaaggggcggcatgccttggcgtgggcgtggaggccgcgggccaccgcgcggtggccgagggagctactactaggcgcgagaaatgcgacgtgccgaatgcgtgtgcttattagttatctgttagcgtttgctgcagtgctcttctatggagctccgaccccggactggaattatctcgtaggcccttccaggtgctactctacttcagctgctgtccctgtgcaactcgtccgggcaagttttgtggctcgctcgtggttttgtagctaggttaagcgagtgaagttacactcggtagcgcagtatttcctgcgagattgtttattcttctgttaatgtacctaccttactatttcgtttggattatggatactgggtgcatccgtttcatgttt

SEQ ID NO: 21380 - DNA, 945 bp, Zea mays
  Clone ID: LIB3332-021-D11_FLI
aggagcgcttccatcattgttgcttatcttatgagagcagaacagaaatctcttgaagaagcattagaagctctgaaggagatttctgagtcggcgtgtccaaacgatggttttcttgaccagctgaaattatttgaagaaatgggcttcaaagttgatacttcaagtcctttgtacaagagattccgcttgaaattattaggccaatcctacatatctggggagaaaataagcagctatatgtttgaagatgaccctggcctttctctagagtctggctcttgtcaagattcttcaaaggttgagcaacgtaaaacagcttaccgctgcaggaaatgcaggagagttattgctgtagagggcaatgttataagtcatgttcctggtgagggtgaatcttgctttgattggaaccgaagaaagagtggtcatccatacaacaacaaagaacatggttgctcatctttgtttgtcgaacctctgaaatggatgactccagtagaagacggcgctttggagggaaagctatcatgcatccactgtggagctcggttgggatacttcaactggtcaggaatacagtgcaactgtggtagctgggttactcctgccttccaaattgttaagagcaaagttgatatcagcaccatctagacctgtgagcaaacgactggcaagtttgagggacgaggagcgcgacagcagtgacgcctgacggtttaatgttttgtgtaccatatgaacgctacgtatacaggtgaagcaatagcgtattttatgtttttccattgccgatcagaagctgtgtgtggcaaataccgtataaaatttcgcatttgctgatgtaacaagtagccgtgatgtcggccatctgcccatctgtttagctggaacgggagcgaatgcagattgtgcagagaaatgaacacggttgtgtttctattc

SEQ ID NO: 21381 - DNA, 1385 bp, Zea mays
  Clone ID: LIB3332-021-G7_FLI
tcttcccaaacccccaacatccatgatccatctcatcgacaccccctccgctctccttatcccttccattcgcccaaacccccgccgccgtgacccctgccagcccgcggccttcccctcgttctaggcttcaactgccggcctcgtgtcttctgggcaagtgaagagagagatggcgtcgccaataccgcgcgagtgggtcgggctgcagcagtttcctccggccacccagaccgagctgcacgagctcctcggcaagctcaaggaggaggatgtgagcacattgacaattctggtgatggggaaaggcggagtggggaagtcatctactgttaactccatcgtcggggagaggatcgccactgtcagcgctttccagtctgagggtctgagaccgatgatgtggtcgcgcacaagggcagggttcaccttgaacattatcgacactcctgggcttattgaaggtggatacattaatgagcaggctgttgacatcattaagagatttcttctgggcaagactattgatgttctcctgtatgtggatcgtttggatgcgtacagaatggatacacttgatggacaggttataagagccatcaccaattcatttggaaaagatatttggcgaagatcattggttgtgttgacccatgctcaactctcaccacctgatggaatcgagtataatgatttctttacaagaaggtcagaggcacttttgcgatacatccactcgggagcaggaatcaagaaacgagaatatggggatttccctttgccaatagcattggtagagaacagtggaaggtgcaagactaacgagcatggggagaagatacttccggatggaactccgtgggttccaaaactgatgaaagaaattactgttgttatctcaaacgggagcaagcccattcatgttgatcagaagttaattgatggtccaaaccctaacaatcgctggaagatgttcataccaattatacttgctgtggagtacttcttggtagtaaaaggaatccggagggcgatccatgcagatatcgcaaatgggaaggtggatgactgggagcagcgttaccgggacttggttggaagcagggaccctgtggagcagaaaggttctaccacccggaaccgcaaagcctaagttggtgtagcagaaatgattttattcgtgttgtgacccactcgatctgcttgctgttccttttcctaattatgtgttgagggctttatagagttcgctggtttacttgaaaaataattgctcgtgttgtagttgataagaatatcttttccattttatgatgcttggccctcttcgcaattttgaatattgttatcaaacccctgctattatgtttagcaagttgttaaat

SEQ ID NO: 21382 - DNA, 897 bp, Zea mays
  Clone ID: LIB3332-022-A3_FLI
gagcggcggcgcgggcggacaaggagcaggcggaggaggagttgtgccaagccacaatgggtatctcgcgtgactcgatgcacaagcgccgagccaccggtggaaagcagaaggcctggaggaagaagcgaaagtatgagcttggtcgccagccagccaacaccaagttgtcaagcaataagacggtgaggagggtccgtgttcggggaggtaatgtgaaatggagggctcttcgccttgatactggtaactactcatggggaagtgaagctgttacccgcaagacccgtatcctcgacgtggtctacaatgcatcaaacaatgagcttgtgaggacacaaacccttgtgaagagtgccattgtgcaagttgatgctgccccattcaagcagtggtacctcactcactatggagttgacattggtaggaagaagaaaacccctgctgcaaagaaggataatgctgagggacaagaggttgaggcagcagctgaggaaacgaaaaagagcaaccatgtcacgaggaagcttgagaagcgcaaggagggacgtacccttgacccacacattgaggagcaatttggcagtggacggttgctggcatgcatttcttcccgtcctggacagtgtggccgagctgatgggtacatccttgagggtaaagagcttgaattctacatgaagaagctacagaggaagaagggcaagagcgctgtagcttagagcattctcatggattgtcttgcaccgaaatgtgtgtcctgatgagtacacttttttggttagtcgtctcaagttcagagcgttatgccatattttcagacctgatttgtacactgttttctaaaagcgattgagctctagtccaatttgagcagggtatgattatttgttgatg

SEQ ID NO: 21383 - DNA, 583 bp, Zea mays
  Clone ID: LIB3332-022-B3_FLI
gttcatatcctcactcgccgccgccgccgctcgtccctcgccccatcgcgatggcccggatcaaggtgcacgagctgcgggggaagagcaaggcggatctgcaagcgcagcttaaggagtttaagtcggagctctccctgctacgcgtagccaaggtcaccggcggggctcccaacaagctctccaagatcaaggttgtgcgcacctccatcgcgcgcgtgctgaccgtcatctcgcagaagcagaagtcggcgctgcgtgaggcgtacaagaagaagaagctgctcccgctcgacctccgccccaagaagacccgcgccatccgcaggcgcctcaccaagcaccagctctccttgaagaccgagagggaaaagaagcgtgagaagtatttccccatgaggaagtacgctatcaaggcctagatcagtgaaagaacatttatcctgtcaagttttgctcagaagttacttgaatttgagacaaatctatctccatccaagtactatgtagctgatcaactgcatgatgaaaaacgagtactttttgcttgtttaaacgtgctttacattttcagtttccactt

SEQ ID NO: 21384 - DNA, 920 bp, Zea mays
  Clone ID: LIB3332-022-C2_FLI
cttcaggctccccgatccgacgaccccagcggcggcgatgggcggcaaggacctgacagaggagcagatcgcctcgatgcgggaggccttcacgctgttcgacacggacggggacggccgcatcgctcccacggagctgggcgtcctcatgcgctccctcggcgggaacccaacccaggcgcagctccgggacatcgccgcgcaggagaagctcacggcgcccttcgacttcccacgcttcctcggcctcatgcgcgcccacctcaggcccgagcccttcgaccgcccgctccgcgacgccttccgcgtcctcgacaaggacggctccggcaccgtcgccgtcgccgacctccgccacgtcctcacgtccatcggagagaagctcgaggtgcacgagttcgacgagtggatccgcgaggtcgacgtcgcgcccgacggcaccatccgctacgacgacttcatccgccgcatcgtcgccaaatgatcccgtcccctccgagtctccattccgccgatccaccctcgcgcgctcttcgtctgtaataacttcgtctcccatccccgtgatttcattttgtttcccttctatggctggctcatttgaattcaatctggcctcctcttcgttccgagactgctcggataaaacggataatggttgctgtgtgattatcaaccaatcaacgattaattattagtagatctggctgatggtgcttttgcttagctacctgtaatgtaaagtgtgggtctgcctcctttgtcactgattttggcttgcctggtaacgaatctctgctatggtctgcactggcttatgtattcatgctgatctagtgctacttttgtttgggtcataggttgtattggaatctggaaatttcattgacctgctttaggatttctaatgtttgttgcct

SEQ ID NO: 21385 - DNA, 2400 bp, Zea mays
  Clone ID: LIB3332-023-D4_FLI
ctcaagatgccattatgtgttatcaacgtgcactgcaggcacgtcctgactatgctatggcttatggtaatcttgctactatttactatgagcaaggccagcttgatatggcaattcgttgttacaatcaagctatagtctacgacccacagtttattgaagcatacaacaacatgggcaacgcacttaaagatgctggaagagtagaagaagcaatcaactgctacagatcctgccttgcactgcaagcaaaccacccgcaagcccttactaatttaggaaacatatacatggagtggaacatgataagcgctgctacttcattttacaaagcagctatatctgtgacatctggattatcttccccacttaacaacttggctgtgatatacaagcaacagggaaactatgctgatgctatcacatgttacactgaagtactccgtatagatcctacagcagctgatgcactagttaatagagggaacacattcaaagagattggcagagttaatgaagcaattcaggattatgttcaggcagcaacaatcaggccaaacatgccagaagcccatgccaacttggcctcagcatacaaggacagtgggcatgtagaaacggctataattagctacaagcaggctctccggctgcgtcctgattttcctgaggcaacctgtaatctcctgcatactctacagtgtgtctgtgactgggaaaacagagatggcatgtttcgagatgttgaagaaattattagaaggcaaataaagatgtcagtacttccaagtgttcaacctttccatgccattgcttatcctattgatccattgcttgctttggaaataagccgtaaatatgcggcccactgttccttgattgcctctcgttttgggctgccgccttttgtgcatccacctcctgttcctgtaaaagcagagggtaaacactgccgactgaaagtaggatatgtgagtagtgattttggtaatcaccccctttcccatctcatgggatcagtatttggaatgcatgatcgtgccaatatcgaggtcttttgctatgcactcagtcaaaacgatggtactgagtggaggcagcgtattcagtctgaggcagaacattttgtcgatgtttctgccatgacttccgataatatcgccaagcttatcaatcaagacaaaatacaaattttgataaatcttaatggctacacaaagggtgccaggaacgaaatttttgcaatgcagccagcacctatccaagtttcgtacatggggttccctggaacaacgggtgctgcatacatagattacttggtcacagatgagtttgtttctccatctagctatgcacatatatattcagaaaagctcgtccatttgcctcattgctattttgtcaatgactacaagcagaaaaatcgagactgtctcactccagtatgtccacacaaaagatctgattatggattacctgaggataaatttatttttgcttgcttcaatcagctttacaaaatggaccctgagatatttgacacatggtgcaatattctcaaacgtgttcccaacagcgcattatggcttttaagattcccggcagctggtgaaactagagtgagagcatatgctgctgccagaggagtaagatcagatcaaattgtattcacagacgttgccatgaaaaatgagcatatacgacgcagtgccctggcagaccttttcctggacactcccctctgcaatgcacacacaacaggcactgacatactgtgggctggtctgccaatgatcacccttccactagagaaaatggcaaccagagtagctggttccctctgcgtagctactgggcttggggaggagatgattgttagcagcatgaagaagtatgaagatagagcagtagaactagcgctgaatccggtgaagcttcaagcgctgactaacaagctcaaggaagttcgtatgacctgcccgttgtttgatacagctcgatgggtgcgcaaccttgaaagggcatactacaagatgtggaacctttactgctccagtcgccacccggagccattcaaggtggtagaggatgacaatgagtccccatttgaccgctaacgagatctcatcagcagcccggctctgtaaataaggcgagagttgtagaatatttagcatcgtgaccgctgttgctccaggtgcttgtttgccgccccctttcctgccgtgcacatcacctctgtggaggctaacttcgtagtatgtatgtactacactgcaaaagaagtcctagggttagcctattgttatcactatttagtttgctatattgtatcgcggtcgtggtttctaaaataaactgcaacctttaggagtgttgatgtgaaatctcattcttaat

SEQ ID NO: 21386 - DNA, 567 bp, Zea mays
  Clone ID: LIB3332-023-E3_FLI
cccttcttccctgacaccctcgccgccgcgcacgcacgcacgcagggaaccagcgaagagagatgggcgtctacaccttcgtgtgccgcagcgccggcggcggcgagtggaccgccaagcagcactccggcgagatcgaggcgtccgccgccaccccctacgagctgcagcgccgcctcgtcgcctccgcctccgcggccgactccgcgtccggcgtccagtcgtccttctccatggtcacccccagctccgccgtcttccaggtgatcgtcggtggtggcgcgatgatggttagtggcggcggcggcggcggcgcgtccgccgccgcgtcgggtggtgctgcggccgaagctcccaaggaggagaagaaggaagaggagaaggaagagagcgacgacgacatgggattctccctgttcgactagagacagagttaagctgcgtgtgcatggttgctgttcggtcgtgtcgcgaaacgtgaagagctcaagcggcctttttgttccagtcccacatgtgagagcttgatacgttgtctggaatgaaaaattttctccaaaattcacg

SEQ ID NO: 21387 - DNA, 1229 bp, Zea mays
  Clone ID: LIB3332-023-H8_FLI
gtctgagctcgccgctttagcgagcgcaagcagagcctgccaaaaggctagagaaaaaaaaatccgccttctcctcccagtcgcaggccaggctcagcctccccccttccctccccggcgatctatctctctctctcagccatcgactcagcgtggcagctcctgatcgccaacttcaccgagttccagctcgccaccgtcgtcaccttcctgctccacgagaccgtcttcttcctctccggcctcccctccctcctcttcgagcgcttcggactcttcgccaagtacaagatccagaagaagagcaacacctctgcttaccaaaacagatgtgtcttgcgcctcattctctaccatgtatgtgtgaacctgcctgtcatgattttctcgtatcctgccttcaaattcatgggtctcaggagctctcttcctttgccacattggtcggttgttgtatctcaagttcttttctactttgtccttgaggattttatattctattgggggcacagggcattgcatacgaaatggctatacaaacacgttcacagcgtccaccacgagtacgccacaccctttggtttaacatcggaatatgcccacccagctgaaattttgttcctgggattcgccacagttgttggtcctgctcttactggccctcatctcttcaccctgtggctgtggatggtgttgagggttttggagacagttgaagctcacagcggctatcacttcccatggagcccatcaaatttcctgccgctgtatggcggctcggacttccatgactaccatcaccgtgtgctgtacacaaagtcagggaactatgcctcaacatttgtttacatggactggttgttcggcacggacaaggattatcgcaaggcaaaaaccattgaggagaaagaagggaaaaatctgtagattgtggaagctgctcagcaagattggcgatagagtttcactcatggaaggagatatggatgcaccctagaaacagtcagtttacctcctgaccatcgatactataggttgagatattgatttcctgtgtttgctatgatcaagaatgaggccctggtggccctggtctgtcatgaactgaatttgatgatttgtcatctcctcctgggggtttgctttgcgtttctttcgtgactcgacgggatgtatacatatggaatggcctggcagcagtaataaccatctatctgaattgaatcgtc

SEQ ID NO: 21388 - DNA, 1511 bp, Zea mays
  Clone ID: LIB3332-024-B6_FLI
ttcaaaagtttgtagatcggcagtctgagttagtccgagtttaaggatagaaaatgtattttgtcctctttgggttagaaccagcaagaggagtcgtgaatccgtgacaaccggcggcggcgagggaagaatcgaagatcgccgcagccgcaaggaaggaaaccgagaacaactcaatccgctggctatggcgttgctgatggagcccggcgctgagcccctgactgagagcgagcaggccgacctggccggcatcgccgccatcaaggagtcggcggcgcgcgaatacaaggagcaggggaaccagttcgtccggatgggccggaggcactacgccgcggcggtctcctgctacacgaaggccatcgctcagatggagcccctctcctccctcgacgcatcagccgctgctgacgcctccgttctcttcgccaaccgagcacatgtcaacatcctcctcggtaaccaccgacgggccctcgacgacgccgagcaggccatccgcctctctccctccagcgtcaaggcgtactaccgagcagtgaaggcggcgcttgcgctggacttgttaacggacgcggcgtccttctgcaggaaggggctcgaacaggacccccctaacgaggaattcaagaaactgttgtcggaagtggattcaaaactgagagagcaagatcgtcagagagcgaaggttgcacaagcaatcgccaaagccaaggatcttgctgctgctatgggaaagagaggggtgaaacttgggaaggcagcctatcaagagctgacaggggtaaagaagccagtgctggatgagcagggcgtgctccactggcctgttcttctgctctacccagaggtcatgtcgagtgacttcattgaggattttccagatacagatactttctcgccccaccttgatgtcatgttctcagaaacttctccaccattgccatgggatgataaccatgtttacacaagggactcaatcgaattatattatcagggtggttttggcaaacctttgtcccgaagtgaggtattaagatatcttctagaaggcaatgtagattcgaaggcgcttccagatagccttcttgacggggaagacgaagaacatgacagtaccaaatgtaccactgttacatcaactgatagctccagtaagtggatcaaggtaaaagaaggaaaaacacttcaggaggtgctgcaggataaaggctatattgttcctgcaattcctgtgttcttcgttgtttcaaggaagtccacattctataaagacttcaaggctggaaactggtctttgccatgaaacagaaccggacactaaggttcagcttaaatcgatctctgagacgggcagcggatatggcaagaaagcagaagatgccctcttgtgatcatggtcatttggtttaaaaggagtgtgcttttttcagtgtctgcagactgacagccttttgttaccgagatagacagaaaagacgaggcaatgtaatatgaatttttatgtg

SEQ ID NO: 21389 - DNA, 706 bp, Zea mays
  Clone ID: LIB3332-025-C10_FLI
caaaccctcttcttcccccttcccgtgctcgacccagatcgagggctcgatccgtcggccatggcgctggagtgggtggtgctgggctacgcggcgggcgcggaggcgatcatgctgctgctgctgacgctgccggggctggacggcctgcgccggggcatgatctccgtggtgcggagcgcgctgaagcccatgatgtcggtggtgcccttctgcctcttcctgctcatggacatctactggaagtacgagacgcgccccacctgcgacgacgagcacgcctgcaccccctccgagcacctccgccaccagaagtccatcatgaagtcgcagcggaacgcgctcctcatcgccgccgcgctgctcctctactggatcctcttctccgtcacccagctcgtcgtcaggctcgagcagatgcagcagcgcgtcgacaagctcaggaagcgcgacgactgatggatccgcatccatccggtgggctcgttcttcctctgcctgccttgtgttcctgctttatgttgtggtgctgatgttttagatctcggatcgtaatttgagacctgctggtagcatctgcttcctttgccttgccgtcttcagataaaaaagaacagcgctcttggaaacgatgataatgtttaggatgtttggacgaatggtatctgtcgtaattgatgtcttcatccatgaattggttggtgtc

SEQ ID NO: 21390 - DNA, 1766 bp, Zea mays
  Clone ID: LIB3332-025-E9_FLI
ggaagacgtgttctccgggcaggcggtgggccaatcccgcgttcccctgtccacggtgcacaggcgatccgacgaccgggtggagccaccgtcccggtggctgaacctgtgcggcggcgaggcccggccgtacgccgggcgggtgcacgtgcgcgtgtgcctggagggcgggtaccacgtgctggacgaggcggcgaacgtggccagcgacgtgcgcgcggcgtcgaagcagctgtcgaagccgccggtggggatgctggaggtgggcgtccgcggcgcggccaacctggtgccgatgaagatcgccaaggacggcgcgagcgggtcgacggacgcgtacgtggtgctcaagtacgggcccaagtgggcgcgcacgcgcaccatcctggaccagttcaaccctcggtggaacgagcagtacgcgtgggacgtgttcgacccctgcaccgtgctcaccatcgccgtcttcgacaacgtccggtacaaggccgccgcagccgacgatccggggaagctgcccagggactcccgcatcgggaagctccggatccggctgtcgacgctggacaccaaccgggtgtacgccaacaccttcgcgctgacggcggtgcacccggtgggcgtgcgcaagatgggcgagctggagctggcgatccggttcacctgcccgtcgtggctgacgctgatgcaggcgtacggcagcccgctgctgccgcggatgcactacgtgaagccgctgggcgcggcgcagcaggacgtgctgcggcacacggcgatgcgcacagtgtcggggcggctggcgcggtcggagccgccgctggggccggaggtggtgcagtacctgctggacacggacacgcagtcgtggagcatgcggcggagcaaggccaactggttccgcgtggtggggtgcctgtcccacgtggcgacggcggtgcggtgggcgcaccgggtccgcacctgggcgcacccgccgacgaccgtgctggtgcacctgctgctggtggccgtggtgctgtgcccggagatgatcctgcccaccgtgtgcctgtacctgttcctggtgctgctgtggcggtaccgcgcgcgggcgcggcagccggcgggcatggacccgcggctgtcccacgtggacagcgtgagccctgacgagctggacgaggagttcgacgggctcccatcggggcgccccgccgacgtggtccggatgcggtacgaccggctgcgcgccgtggccgcgcgcgcgcagacgctgctgggggacgtggcggcgcagggggagcgcgtggaggcgctgctgtcgtggcgggacccgcgcgcgacggcggtgttcgcggtggtgtgcctgctggcggcgctggtgctgtacgcggtgccgttcaaggtgctgctgctggggatggggttctactacctccgccaccccaggttccgcggcgacatgccctccgccggcttcaacttcttccgccgcctgccgtcgctctccgaccgggtcttctagactctctctctctctctctctctctctctctctctctctctctctcgcatgctcagatcgcggtctctgcctctgctactgatctctgatcagtctagttcgtttcttgatcgtttcatcttcacttctccgtgtaatctgcctttgtcaggttgccttgttttttttatcggttgcagtcagcagcaagcctcggttgatgaggcttgttggcaacatcaataacagcagcaataataatatctattgtattcgttcgttc

SEQ ID NO: 21391 - DNA, 2480 bp, Zea mays
  Clone ID: LIB3332-025-F7_FLI
gccagagtccaggctccaggactaccaccacttcgtctcgtcctcacacctcactccaccacctctgccttgcaaagccttccaccgatccgccgcctcgtccgcgcgctcgcaggcagcagtgtggactacccgccccatactccatcccctactcgaaggatacaccgtgagtaggcgtgatggtgcttgataccccgttttcgtgcagcttgttgctaattcgttttagtttgagggatcaagaaccaccttgttctttctttctttctttcttggaacaattatgatgaatcattgcaaatctcttgaatatatttttcactgtaaaatactgccttgcctttgagctccttggttcacgtgcaatgtttctttgccctccgattttgcaggacctcgagttaagttgggcgaggagaggtggttcattccagcagggatccttctcgtgagcccagtcgatctgaccgtccttggtatctgggggggttgttctgtactctctctttaattttagtgctgggatgtatcgcctttgggattttctgggtgatggccgtcttccccaccgtcccgttcatgcctgttgggcggacggctgggtccctccttggtgctatgctaatggtcctgttccgcgtcatctccccggaggacgcgtacgccgcgattgacctcccgatcatcggcctgctcttcgggacaatggtcgtcagcatcttccttgagagggctgacatgtttaagtacctcgggaacctgctctcgtggaagagcagaggcagcaaggacctgctcttccgagtctgcatcgtgtccgcgtttgccagcgcgcttttcaccaatgacacatgctgtgttgtcctcaccgagttcatcctcaaggttgctaggcaaaacaacctgccaccacagcctttccttctggcccttgccactagttcgaacatcggctctgctgccacgccgatcggcaaccctcagaaccttgtcatagctgtcgagagtgggatctcatttggccagttcttgctgggagttttcccagctatgatcgttggggttctcacaaacgctgctatcctccttttgtacttctggaaatacttgtcggtggagaaggatcaggagggtgggcagcccacaggaccagaggtggttgccgacgatgaggttacttcccatcggttcacaccggctagaatgtcacatgtttcttctctgaatccagatgacatggattgcgtaagcgaaccgatcatcaggagcaacagtgtcagtactactgggaatgagaacctgagaagcagaagcatcaattctgaggctgacattcagcttgcgatcaagtctctgcgggcatcaagcatgtcgcatgagatggtagaggtctcgacggttcctgatcggagagatgaaggtgcatcctcaaggaagttcacaaggactgctagccagcaaaggagcgtgataatagaggatttagcaccctccccagagattaatggggaaaaggagaaagaaactgaagttgcagagaagagatggaaagtacttgtgtggaagactgctgtttatcttatcactctcggtatgctcattgcacttctaatgggactgaacatgtcctggactgcaatcactgcagctcttgttcttctggcactcgattttacggacgcacaagcttgtcttgagaaggtgtcatattcactgctgatctttttctgcgggatgtttatcactgttgatggcttcaacaaaacgggcataccgaacacactatgggagttagtggaaccatattcacgaatcgatagtgcgaaaggtgttgcacttcttgccgtggtgattcttatcctttcaaacgtggcctctaatgttcctacagtcctattgctcggtacaagagtggctgcatcagcggcttcgatttctcatggttcagagaggaaagcctggctcatccttgcatgggtcagcaccgtggctgggaacctcaccctcctaggctctgcggcgaatctgattgtctgcgagcaggccaggcgggcccagttcttcggctacaacctcaccttctggagccacctccgattcggggtcccgtcgaccatcatcgtcacggcgattggtttgctcatcgtcatcagttactgaaacagctgaaggcagaagagcgtagtgtaagagaagcagaatggataaaaatccttccaataagaagtacatgtaaattaggcttgccctataactcaagtgtgtatcggtacgttatgtctccgtctgtgctcttgctcgtgagcaagcagcacatggctgaccgtgtagcttgcatttccattgcataataggcttatgaagaatgctttggtaatatgattttacagtctgacaaggattgtgaagcagaggcagtgtaccatcaagataatacttctggaagcatataaaaaaatttcgtatatttggatttc

SEQ ID NO: 21392 - DNA, 997 bp, Zea mays
  Clone ID: LIB3332-026-A7_FLI
gccgcgcgccgcacgccctgttgccttctctcgacttcgagagcaccgccgcacggcataacgctcgcacggccgagccccgacattctaccgcactccctccgctgcacccctttccattctaccgccggcgacgccaaagttcttgggcctcctcatcggcgacttttccgccggcgacaggaaacaacgaaccaaaccacttctctgtcgagaggcgtcgcgctcctctcttcgccctctgctgttgaagatgaggaagctcaagttccatgagcagaagctcctcaagaggcacaatttcttggagtacaagagggagggcggccaccgcgaggcgctcgtcacacagcgctaccgcctcgtggagagggacgactacaagaagtacaatgggatatgcttaatggtgcaaaagctcgttaacatcataaagcagatggacccaagagaccctttcagaatccagatgacagacttgattctcgataagctgtataatatgggtgtaatttcaacaaaagagagcttgttaaagtgtgagaaactttcagtgagcgccttctgcaggcggagacttgcaacagttatggtgaagctcaagtttgcagagcaccttaaggaggctgtgacgtacatcgaacaggggcacgtgcgtgtcggtccagatgcagtcacggacccagcctttcttgtgaccagaaacatggaggacttcatcacctgggtggattcctcaaagatcaagaggaaggtcatggagtacaatgatgcattagatgattatgatgccatgttctgagaaaataattctgcagaaatttatgtgcccgtcagtagtgtaatcttaagcctgccacatatgggtcttttctgaacaaatctgtgggagttgtcttctgcatggctacttgcatttgtattgcacctgcagatgtgatgcaattttgtggttggttgaaggcacattataaattcatatctgatgtagttgtgc

SEQ ID NO: 21393 - DNA, 1866 bp, Zea mays
  Clone ID: LIB3332-027-B10_FLI
cctccctccctccctctcgctcgtggccacgactgggcgactgcctccgccgcatttcgctaggcgccacacggcccttggccggcgacgagcacccacagaaaaaagtgttgctcctacgactagttctttttatgtgtaaccttcaatgaaggattctcaggatattcagagcacgacagagttgcagtcaccagtgcaaggtactaatgaagtgcaaagtcagcaaccaaactcaatggccgctgatgctcctgctggaaattcgggttccttgtctgtagctagtaatgacaataagaaggtgtctcgcgaagatattgaacttgtaagctttctagctatctagtggcatcccttctagggtagacccagtgcctgaggctcccacatgagtggtgtctggggaagggataaaccgaggcaggcttttcccttgcaaatgcggagaggctgcttcgaacccgcaacctggtaactcagtgagacaactcttgtcactgccccaggcctgcctttctactagcatcccctctacattgacagttctatgctttggccaactaaatgaactttacatcctcttgcaggttcagaatttgatagagcgttgtctacagctctacatgaacaaaggagaagttgttagaactctttctactcgtgctagaatagaacctggcttcactactttagtatggcagaaacttgaagaagaaaactccgagttctttagggcttactatatacggttgaagttgaaaaggcagatcatcttgttcaatcatttattgcaacaccagtacaatttgatgaaatatccagcacctccgaatattccattggctccaatacaaaatggaattcatcatatgccagttagcaatttaccaatggggtatccagtacttcagcagcctatcatgcctgctcccggccagcctcacatggatccaatggcctgcggtctgtccagtggtcatgtggttaatggaatacctgcaccaggtggttatcatcccatgcgcatgaactccggaaatgacatggttttggacaatggagcgcctgaagcaccacatgctggtgctaccggtagtgctatgtcatctgagatggctgtgagtccctcgtcggcggcttcaagcaaccatgctccttttacgccgtcagatataccaggcatgaccatggatgtatcggccctagactcggcatttgggtgtgatgtggggaatcctgaatctctgcaattgggaccagatgggtcgtcaagagactctattagatccttagggcagctctggaatttcagcctctctgatctaacagcggatttgacgagtttgggagcagatctggacgtgctggagaactacactggcacccctttcctgccatcggattcggacattttgcttgattccccagaccaagatgatatagtcgagtattttgctgacgccatcaacgggtctccgtcagacgaagagaaaccgtagtttttccggggttgcatggcatgcattcaggttcatcatcaggcagggctgtcatctcatctcatgtagtgtaaagcagccaatctaactgtgtattcggctcgcgcgcggtgatccggtaatcgggcctctgccactaaaaagaattttgtagcggttaattgaaatcctaattctttggaataagtagctgggactggaatgtccagagagtagcggtcgttgttggcttagggattgctgctggtggatgcaaacctcacagctagctggtgactctgaaaccacaggaactccttttctttttctttttacttgtatctgtatttgctgctacataagtaaacagaagtggggtgtacct

SEQ ID NO: 21394 - DNA, 1288 bp, Zea mays
  Clone ID: LIB3332-027-E10_FLI
cgcaaacccagacggccagacccagcggtcgcttactcgcatcgcagcgcactcgcgccacagtcggcatcacataccagatccctgcgggtgcggcggccatggccgagaacttccagctccagggccggcacggcaagtcccgcgtccgcgtctcccgcgtctggcgccgcccggccgcggcggggggcgacgtcatcgttgagtggaacgtcgccgtcagtatcgtctccgactgcctcccctcctacacctccagcgacaactccgccatcgtcgccacagattccatcaagaacaccgtgtatgtcaaggcgaaagagtgcacggaagtggtgtccatggaggaattcgccgtgattcttggaaggcatttcacctcgttgtaccctcaggtttcagaggccacggtgactatcgtggagcgtccatgggagcgtgtgactgtcgacggaaagcgtcattcacatgggttcaaagttggtgttgagaagcacagcacagaggtcattgtaaaaaaatctggaagcctgcgtataaattctggaattcaaggatactcgctgctaaagacaactcagtctgggtttgaagggtttgtgacggatcgctataggcttcttcctgatacaagggaaaggatagtagcaacagaagttactgcttggtggaggtatccctttgaacatgtttcgcagctcccatcgaagccattctgcttcacgcagagatatcaggatgtaaagaaagtccttgcagagacgttctttggtcctccggatgttggtgtgtatagtccatccgtacaaaatacgctatacctcatggccaaggaagtccttacaaggttcccagatatatcgtcagtccagcttagaatgccgaaccttcactttctgcctgtcaacttggggagcaaagaagctccgctggtgaagtttgctgatgatgtgtacctgccgacggatgaaccacacgggacgattgaagcaaccttaataagccgtcccatgtcaaagctgtaaaaaaaatgtagtcgtcaggctggtattagactcctgcttcgtctccccagcatccccaggcttaaaatggacagtaagctgtaagggaaagataaactgtcataaatcgtagcccctatgctttatgtgtggtggtggtaataagtgcacagacttgtattggatgttgtcagctgtagcctgtaggcgtccagcttgtgacgtttcgccactgtaatcgtgtacattgctcgtcttgtgtggaaaccagttaatatctttgg

SEQ ID NO: 21395 - DNA, 1927 bp, Zea mays
  Clone ID: LIB3332-027-F4_FLI
gttgaggtggctggtgaaggcaagactggcaatgaaacattgctttctgccgagggaggggagaggttgggaccatctttaaatggcaccagcgagggaattaaagggcgcctaaataatgatggttctgtgccccacacttcaaaagttgaaagagaagagggtgaattgtcgcctaacggagattttgaagaggaccattttgttcctttcgaagatggaacatctaaaggaaaggaagattctacaagcagaccattccatggtaggcctggggaagtggtaccctcttctgccgaggcagctggtgagaatgatgctgatgctgatgacgagggtgaggaaagtgctcagaggtctactgaggacagtgaaaatgcttcagaggcgggtgaagatgcatcgggtagtgaatctggtgatggtgaggaatgctctcgtgaagatcatgatgaggaagaagaggatatggatcacgatgatcaggatgcaaaagctgaaagtgagggtgaggcagaaggaacaactgaaacacatgatgtggaagggggaatatcactaccactttcagaacgctttctgtactcagttaaaccacttgccaagcatgtacctacagctttacatgatcgagagttctcacgtgtattttatggaaacgattcattttatgtgttgttcagactacatcagattttatatgagagactactttcagcaaaaactaattctttcactgctgaaaagaaatggaggaattctaaggatacaaaccctcctgatttatatgcaaagtttatgagcgcgctgtacaacttgcttgatggttcctctgacaacaccaaatttgaggatgactgccgagctattattgggactcaatcatatgtcctctttactttagataaactgatttataaagttgtgaagcagcttcaagctatagcaacagatgaaatggacaataagcttctgcaactatatttatatgaaaaatcaagatctcctgggaggttctttgacctagtttatcatgaaaatgcccgtgttctactccatgatgagagcatataccgatttgaatgttgctcgagtccgacaaggttgtctattcagctgatggaatatggtcacgaaaagccagaagtgactgcagtatcaattgaaccaaatttttcttcgtatctttttagcgagtacttgtgtagtacgccagacaagaaattatctgaaggcgtctaccttggaaggaataagcggaaatattcaaataatgatgaaccttcagattctttgaaggcaatggatggtatcaatgttgtgaatggtcttgaatgcaagatatcctgcaagacctcgaaagtttcatatgtccttgatactgaagatttcttgttccggcttcggaagagaaggaaaattttgcggggcgggaatgtgcccgaccgtttgcagatttcatcaatatctgctgcaaaagtgcagcgcttcaataggttcctatccaaaccataggatcatttggcatacaaatgtatcgaaacctgttgctggggtcccagctgcttggcttgaacaatgattccatcgacgtcgcggagtcccctttcggaataacagatgggaagacatagggtaaatacagcaaagcgaagcgagcatgtaggccacagtagtcagtctgttgttccgaaagatgtgtatatatgtattagcagcatgattgttctgattatctttttactgattttcgatggtaggtctattccatcaagtatttaactaatcatttgttgctgttggtataggtcttttgttcttttagccgtcgttttgcattgaagatatgtagccaaaattaaaaacctgtgtcgaacagttatgtagtcttggctccattaatcaaacggacaccgtaatttcttgg

SEQ ID NO: 21396 - DNA, 1512 bp, Zea mays
  Clone ID: LIB3332-028-C5_FLI
cccagggcatctctactccagcaagacaggtggtctaaggagatggtacaacccaccatggttttcagagacggtcccttcaaccccttacaatgctctcttcctccgggagatgtttgagaaggctgttattaagaggctgatgactgatgtgccatttggtgtgcttttatctggtggactcgactcttctttggttgcatctgttgcttcgcggcacttaaacgaaacaaaggttgacaggcagtggggaaataaattgcatactttctgtataggcttgaagggttctcctgatcttaaagctgctagagaagttgctgattacctcagcactgtacatcatgagttccacttcacagtgcaggagggcattgatgccttggaagaagtcatctaccatattgagacatatgatgttacaacaatcagagcaagtaccccaatgtttttgatgtcacgcaaaatcaaatctttgggtgtgaagatggttatttctggcgaaggttcagatgaaatttttggtggttacctttattttcacaaggcaccaaacaagaaagaattccatgaggaaacatgtcggaagataaaagcactacatctgtatgactgcttgagagctaacaaagcaacttctgcctggggtgttgaggctcgtgttccattccttgacaaaagtttcatcagtgtagcaatggacattgatcctgaatggaagatgataaaacgtgacctcggtcgaattgagaaatgggttatccgtaatgcatttgatgatgatgagaggccctatttacctaagcacattctctacaggcaaaaggaacagttcagtgatggtgttgggtatagttggatcgatggattgaaggaccatgccagccaacatgtctccgattccatgatgatgaatgctggctttgtttacccagagaacacacccacaacaaaagaagggtactactacagaatgatattcgagaaattctttcccaagcctgcagcaaggtcaactgttcctggaggtcctagtgtggcctgcagcactgccaaagctgttgaatgggacgcatcctggtccaagaaccttgatccttctggccgtgctgctttgggtgttcacgatgctgcgtatgaagacactgcagggaaaactcctgcctctgctgatcctgtctcagacaagggccttcgtccagctattggcgaaagcctagggacacccgttgcttcagccacagctgtctaaccttatgtttatcacccagcaatgcttgaaacagcaaaggttgtccattgcttgtttcagtttccttccgatcatgtttttagttccatcaatcaagcaatggagacatgcttgtgcttcatacttggcagcatcgtgtttgggttttcactgggcagtactgtttaatttttatggactgaaaagactcagttttgtaaatattcgtcactgtgaccaattcctgtggtggtttatgtgatttgcagattgcagtggtt

SEQ ID NO: 21397 - DNA, 698 bp, Zea mays
  Clone ID: LIB3332-028-F12_FLI
caagaaaacacaagtacagactacagagccatctttgatctttccagtccaagatgagcgtggagatcctcgacgggcggacggtgcagagcttcgtggaggacgagcgcgcgttcaactcgtccgtggacgcccgcttcgcggcgctggacgtggaccgcgacggccgcctctcgtacgccgagatggccggggagctcatggcgctgcgcgtgcgggaggcgcacttcggggccgacgcgccggcgcccgcggccgagctcgccgcgctgtacggggcgctcttcgcgcgcttcgaccgcgacggggacggcgccgtggaccgcgacgagttccgcgccgggatgagggaggtcatgctcgccgtcgccagcggcctcggcgtgctccccgtgcagatggtggtcgaggaaggcagcctcctcaagtgggccgtcgacagggagctggccactaccatgccagcttgaccagctcggctccatcagctagctgcctgacagtgtgcactagcgctagtgtactcaccgctagctgaatgagagctttatcacctatgtatgtatgtaaccgtacgccgagggtgtcggtctaatttgggctcgtttaacgttttcgtgtttgtagacctgacatgagtatgtaacgtacgcactgaaccttttttatcagtccgaaaactagcgttttacactttt

SEQ ID NO: 21398 - DNA, 2064 bp, Zea mays
  Clone ID: LIB3332-029-A7_FLI
attcctcctacctcactggctcactctcgtctcggtttacaaagcctccgccgccgcaagtccactccacccgttgtccaggttagttggttggtttcaatttcgagttcgccgagcgacagcttgcgcctgccatttctcggctccgcgtgccggagctcgttcatctccagcttctccggccgttactcgctctgaaccgacgacagtaccgataaagccccgactcgccatcctccggcgacgatgccttcccgatcggattccgactccctgctggtgcgcgccgagggcatgcgcgacgcggcgctggactaccacggccgccccgccgaccgcggcgccaccggcggctggaggtcggcgctcttcatcatagcggtggagatcgcggagcggttcacgttctacggcgtgtcggcgaacctgatcaactacctgactggcccgctcgggcagggcaccgcggcggcggcggcggccatcaacgcctggaacggggtggcgcagctgctgccgctgctgggcggggccctcgcggacaagtggctcggccgctaccgcaccatcgtcatcgcctcgctcctctacatcctcggtctgggtatgttggccttttctaccttcctctcctccggcagcggccaccagtgcaccgccgcagggggccagatctgtgcgccgtctggccttaaggtgaccttcttctacgtctccctctatatcgtggccgtggcgcagggcggccacaagccgtgcgtccaggcgttcggcgccgaccagttcgaccagaccgaccccaaggagactgtctccaggagctccttctttaactggtggtacttcggcatgtgcgccggcactgccgtcacgctcgtgctcctcagctacgtgcaggacaacatcggatggggcctcgggttcggcatcccgtgcgccgtcatggcagccgcgctcgccgtattccttcttggcactcggacgtaccggtactacgtcactgccgggcagggcctgttcgctcgtgccggcgaggctttcgctgagtggcggagcaggcgcaaggcgggccagcttgttcaggattcccaagaactcgatccgcccgcagcagatgcgccaaggttcagtgctggcgtcgatgtggaggagcaggctgcagtgagaaataatggaggcctcgtcaaggaggccaaggccatcatccgtttgttcccgatatgggcggcatgcctgctctacgcggtggcgtactcgcagtcgtcgacgttcttcacgaaacaggcggcgaccctggaccggcggatcgggcggcacgtccaggtgccacctgctgcgctgcagagcttcatcagcgtcacaatcgtggtcatcatccctatctacgaccgcgtcctcgtgccggtgtcgcgccggtactccggcaaaccatcagggatcaccatgctgcagcgcatcggcacggggatgttcctctcgctcttgtccatggtgatcgcggcgctcgtcgagaagcaccggctccgcgtcgcgggggacgctggactcgtggacaagccgaaggtcccagtaccgatgagcctgtggtggatggtgcctcagtacgtgctgttcggggccgccgacgtgttcaccatggtcgggctgcaggagttcttctacgaccaggtgcccgacaagctgcgcagcctcgggctggcgctctacctcagcatcttcggcgtcggcagcttcatcagcagcgcgctcgtgtcggtcatagacagggtgacgacggacagaggcgggagctggttctccaacaacctgaaccgtggccacgtggactacttctactggctgctcgcggcgctcagcgccgtcgagctcctcgcctatgtcttcttcgcggtgacatacaagtacaagaacagaggagccgtacatgcaactgttgatggttagcgggaggagtaagtacatagtataggttatggtgcatcgtacttgtaaatctctctttttttcctcaactaggatttgtgatccaaactttaccttcgataatgattcccgttttttatg

SEQ ID NO: 21399 - DNA, 2002 bp, Zea mays
  Clone ID: LIB3332-029-B1_FLI
gcccagcaccaggaaggaaatagcggcgagcaagagctggcggaaagaagaggaaagccaggcacgccgctcacccaccgcgccaccaaccgcagatcctaaatccgatctctctctccctccctccctccctcccgctcgaggttttcggtttcgatccggcaagcgggcgagatcttcatggcgacgtcgttcgaccgctgggagaaggaccccttcttcctcgccgccgaggaggtccaggaatccgccgatcggatggaatcggtttatcgggtatgggtgcaggagaggagcgggggcgattccgaggcggcaagcgtcactggaggccctacagctgcgcagcttcgccgcgagctgcacacggcgcttggtaccgccaagtggcagcttgatgaactggcgcgggcagtcagatcgaacgatctggttatgtcagcaggaaaagacacaagggctaggcatgatgattttgttacagcaatcggctatcgcatattagaggtcgagaactacttgaaagaatccaatcttgcggacgggagggggccattgagctgggttcacttggatgaggatgaaagggacgaccttgcagcttttctatctgccagtccttttcaacagaaagacaaagtggtcacaattccttcagcaggtgacattgaagtgggcagcaatgcagcaaggatgaaaaatgatatatcaactgacagctccaaggattcagctggttccacggatttgatttcaggcacagcaaagcaagatttgcatcgtgggcacagaagagcagctagtgccagtgctgatataggctcatggagcatgtcaatccctaatgaatgtgaaggaactacagaacagttatctgatggctcagacaaattgcctttgcataagatagtgaaaacatgtgctttgacaagtaccttgcaatctaagactagaacgaagtggaaaaatggagctgttaggtgggcaggcagtaaccaacaggatgttgaagaggctatccctctgaatacttctcagttgagtcagggcttagaggaatgctttgaaaggaacaagagttgcttaagtacatgtgatgagcatacatacaataagaaacttcatggttggctcggagcccttcgtagacaacttcaaaggtctcagtaccaaattcaatatgggcatcatattcaattgattgttttggcacttgctgcccttgtaatcattgtatgcatagtgaggacaatctggtgactatatttatttgctcatgattggatttctagcctcacaagatcagcagcttgtatggtaaattcactggcagttaagttactcttggtcaacttgatcctgaagcatgcatatgaggcaactatggtagaccattttggtagtcaaggttcaaaatcacgtataatgatctggttggggccacttatcttgccacatgttcagggcaggctgcctcgtccttggaagaacatctacaggacaatccttgcagcacggttgcttcgccacacttggatatgctcccgaatggtgccttgaacaattgatgcacctcgagaactcaatcctccgtggtgagttggtgactgggtggcacctatgcaatggcccagtataaattagtggtgcagtgggctggcgatcatgctgctagcaaccgaaattgcaagacttgtatcatacatcaacgctattgcttttaccgcctgacacggaagggtggtgatcatgcatcaatgctattgcttttactgcctgacacagaagggtgtcattttttttttgtaggagttgccatctgaactgtagagctccataggggataggttctgatcggaatgtgaatggcactagaaaattacttttactgtatctgcttgtgttgtcaagaaccgaatgaggtgcctggcagccttgtctgtaccctgtacactaaaattggagaatgttgaagccctcggcagtaatcggctggacttgt

SEQ ID NO: 21400 - DNA, 1285 bp, Zea mays
  Clone ID: LIB3332-029-D2_FLI
ttcccgttggctcggctcggcttggcaaggcccgccaccgccctccctccccccgcgaccgcgactctgcgagcacgacgagacccacggacccacctcgatccagatccagccaactgcgcgcgtcggcgttaccccttcctcctcgacgccactgccgtggagcggggatcatccgcctgaaccgggtcgaccgcttcgttccttggtggtgggtagctggttgggggagctcagaaccttacacttacaactatgttctccttgttctatggtctatggaagcacgtcttcagcaaggcagagttccatgtgcttatcctcggagttcataaggctggcaagacgaccttgctagaaaagttgaagtcgatctacttgaagggagaagggcttccgcatgatcgtattgttccaacagttggccttaatattgggcgtattgaagatgcaaatgtaaagcttgttttctgggatctgggaggccagcctggcctacgaacaatatgggagaaatattatgaggaagcccatgctgtaatatatgttatcgactctgcttctgcatcatcatttgaggatgctaaatctgctctcgagaaagttctccgccatgaagatctgcatggagcgccaatacttatatttgcaaacaagcaggattcaccagcagctgtcacggaggaagaattggctagacatctgcatcttaaggagttagacgagaggccatgcatgttccaggctggatctgccttcaatgggacggggatcaaacatggcgttgactggttggtggaagaaatggagaggagtaaacgcaccgaggcactaagggcgcgtacagaagcagctgggaagatttaacacctcaattcagggctatcacctgtgattttccaaatgcaaagcatctgaggaggatggcttctgttaactccatgaatagagacgcttgtccgggtggagccttgtcctttcagtcacgggatccccagaaaagatttcttggttgtgctgctcttgcagttttgtagtagggtgtccattgtagcaatggcaggggtgaccgttgcttgggtttgttgacctgcgtagcacttaagattgtgtatctaaagttgtagggattcatgttcatgcgattatgcttggatatacggagtgacatcgtggagcataaagatgatttgtacattcgtcatgttcatcgagagtcatgtgacttttatcaaaagaaacaaatacattgtgatatcaatcacgatatatgtttttcatatcc

SEQ ID NO: 21401 - DNA, 2261 bp, Zea mays
  Clone ID: LIB3332-030-C2_FLI
gtgagtggttcctccctacctctcccgtcgcacctcgccctctcccttgccctgccccagatctcggccttcagtcctcgctgccgccgcgacttgctcgccccgtctccctccggccccgcctcatcgcggccgtggtggccaaggaacacgagctcattggaaaacactcttaaataaagcttccaatgaacaagacaggagctcgacttcgcctagctccgaacaagcggtcgacgaggcggaggtctcgcgtcctgcggatggcaaccgatagtgaagcctcgaaggcagctgaggttgtggttgactggcataaacaggacaaaaagaggatgctccatgcagtttaccgtgttggggatctggaccgcacaatcaagtactacacagaatgctttgggatgaaactgctgaggaaaagggatgttcctgatgagaagtacaccaacgccttccttggctttgggccagagaacaccaactttgcagttgaattgaccaactttgcggaggtctcgcgtcctacgtgcgtcgcgccgttgcctggctccgtcctcgccgttcctctgtagaagctggccgctgaccctcgccgtcgcgccgttttttattagatgaagaatgaatcaacccttgtagaagctaaagatagaagataacactactctgtttttgaatgtctgaagtgtaattttgcagccttgcaactataaaacaaacaatgtatggcttaattattgcagttgcacagtgtgaagatttaaaattgaagtgctatgaagagatggataagaggaagaaactttataatattgttcaagagacaaaaggaaattatcagggtttttttgtcgatgccgacccttaagcaaaaatgaggtgtcatcaagcctgaatgcaaatggtggaacaactaaaaagacatttaagtttgatagagtattcacgccgaaggatgatcaaggtgtgggcgtctccggcggcccgactatacgaagcgagggcgtatcggggctaaggacacgaaaggccaagcgcacagggcgtacggcagtaagcccgcctgcaccgcaccagaccgtcacccgcgacgtgcccatgtcatgacgccacggtggcggcacgctgacccatcgacgtcaccctcttcctcgcttccgctcgacagcctccagtttcctggtcagtcttcgtgccgcctctctgccacacaccgtctctcagagatggaatcaccacccctcacagttgaagcgaccgcttttaccgagaaaaatgatggacatgactttggaggatataatcaagatgtgaaagaaaaagaatcctggaggcaagaaaccccctaggcggccggtaaactctaagtctgaaggtttagggttttcatgctctcgactctgatagctaactcaggtatgtacaacattatcttattttcctattattaaattatctataaagctgctaggaaattacgcaacatttatatttctatatagagtagcttcttatgtccttaattgtaattagttatttaatttgatgattaccatcttgtaatatttgtataagaacgaaccaatggtaacaattttcttcatttaatggtggattaaatgaaactatcttcggtctttggtacttgctcaacatatacaataagtaggtcagtggaacatatgtcctgtcaccgttagattgggcgatcgaaccatggtacatcagtcaccttctttaatgatttttttgttctacttactaatctgctgctttactcttccctggtttttgtactgacctttttaggaaatcttgcagaactgatattcaatgtaaaatattcagtgtgatagaaaaagaaggttagtcgagtatgatctttatttcaatctgccaatgctcttggtaattccagtttgcctaatagtcaacttgttttttttgtaatgttcgagcattcgctgaaattgctgatcgtattcaaaattgttgctaaattgacgattaacccttgtttccatggatagcgagaggtgtgacgtggtatgtttatagctattgtgcagtatacaccttgcttacaggttgccacaactccgctggttggatccactaaacttccaatgtgtcctgtttgcattagtgtgcttacagttttgtatttttgtttcttagggcccacgccaccatgatgtcacatttcaattcattttgtgacctctgatgaagagatttaaacacatctgttctatcct

SEQ ID NO: 21402 - DNA, 1911 bp, Zea mays
  Clone ID: LIB3332-031-D7_FLI
gctggccttgaacatctccccatccgcctcccgcggcctgccacgcgacatgattgcgtcgcgggctgctgcggagctcagctgcccccgcacgccgctggcgacgccttctgcttgcccgcctctgcccgcccgtcttccctgatccctcctcccctttgcttccgcacgaagatctgggcgtgtcttcttccgacaaagctgttcaggcaggggagagtgcctgtttcgatggggaagaagggcaagtggttcggcgccgtcaagaaggtcttcagccctgaatccaaggagaagaaagaggagaggctaaggaggaagtcagcagctagcaacccgacgccggtagatctgaccccgtctacctccttggaagtcaatctttcggtgccaccgcctccagctcctcccccagttcttcaccaggccgaggaggttggggtccctgaagccgagcaggagcagagcaagcatgtcgccgtggaggaggcccctgctgccgccccagcgcaggcgtcggtgctgccacctgctgtgccaacccaggagctcgccgcagtcaagatccagaccgccttccgaggttacctggcaaggagggcactacgagcactgcgaggccttgttcgattgaagtcattggttgagggtaattcagtaaagcgtcaatctgcaagcactctgcgctgcatgcaaactctatcacgggtgcagtcacagatatcttccaggagagcaaagatgtccgaggagaaccaggctctccaacgccagctcctacttaaacaggaactggagaatttcagaatgggtgagaactgggatgacagcacccaatccaaggagcaaatcgaggcaagcctgataagcaggcaagaggcggcgataagaagagaaagagcgcttgcatatgcattttcacaccagtggaagagtacatcgagatctgtcaacccaatgtttgtagacccaaacaacctgcagtggggctggagctggctggagcgctggatggcagcaaaaccatgggaaggccgcaatggggctgacaaggagagcaacattgaccggggatccgttaagagcatgagcttgaaccttggagagggtgagatcacaaaagctttcaaccgccgggactcaaagctagaaaagccatcgccgccaactccaagaccggcccgtccaacttccaggcattcccctttgacgccctctgctagagtggcaccgatacctgcgaggagaaaatttgtcacgcccaagaacgggctttcacaggtggacgatgacgcgaggagcgtgctcagtgtgcagtctgagcggccaagaaggcacagtatagccacctcgactgtgcgggacgacgagagcctcacgagctccccgtcgctcccaagctacatggttcccacagaatctgcaagggccaaatctcgcctccagggttcagcaacggccaatggcgcagagacacctgagaaaggaggctcgactggaccagccaagaagaggttatccttccagggtggaactgtgtctgcctcgccaatgcgacgacattctggtcctcccaaggtggagatcgcgccaccacaaccagaggccttggtagtcaatggtggaagcaagtgacacatatgtgatgagtaccaggatgagaaacggattatgaagatattagtttcattttcatccatgaatagaagttaaaagtggtatcatatctatgaatggtttcaattgtttttctgttacaaccacattatttgctatatacgattcacagtacctgccagttgattccattggttgtttctgtaaaacaaatatcaatttgtcactagaatctgtgatgtttgtatgtaaacaggtcctctatttatgtgagacatatatttcttttctttc

SEQ ID NO: 21403 - DNA, 888 bp, Zea mays
  Clone ID: LIB3332-031-E9_FLI
cttcctcgtttcgccgcctccgccgacaccgactgcctacctcagctgccgtcgccatgggcagaaggcctgctagatgctatcgccagatcaagaacaagccgtaccctaagtccaggtactgccgtggtgtccctgaccccaagatcaggatctacgatgtcgggatgaagaggaagggtgttgatgagttcccctactgtgtgcaccttgtctcttgggagaaggagaatgtctccagtgaggcgctcgaggctgcccgcattgcctgcaacaagtacatgaccaagtctgcaggaaaggatgccttccaccttagggtccgggttcacccgttccatgtcctccgtatcaacaagatgctttcctgtgccggggctgataggctccagactggaatgaggggtgcctttggcaagcctcagggcacctgtgctagggtggacattggtcaggtcctcctttccgtgcgatgcaaggacaacaatgctgcccatgccagcgaagctctgcgtcgcgctaagttcaagttccctggccgccaaaagatcattgagagcagaaagtggggcttcaccaagttcagccgcgctgactacctgaagtacaagagcgagggcagaattgttcctgatggtgtcaacgcaaagctgctcggcaaccacggcagacttgagaagcgtgctcctgggaaggctttcctcgatgccgttgcttaagtgcggatgcgaatcctgacgttttgctttagcgtatcttactttgcttcgtggaacatgaatttcaagtgttttgagggtattacagtgccttatgtgaacttgcctatcttgtgctgaacatcggaatgtatcctccgagtatgtttaatcgcattaattttattgg

SEQ ID NO: 21404 - DNA, 573 bp, Zea mays
  Clone ID: LIB3332-031-G7_FLI
gcaacaagctgcaggtgcagctatataaaaagcgagcagctcggacatacccgcaccaaaaggacccaacgaagtccagccagctgagctgagcctcgtgaaccagagcatttgctccttcctcgtcctcctcgatcgacctctctccttggtgccgctgccgccatatatgaactgctagcacgcgcagcagccagcagctgccgaccggcctataatcagaaggccagaaaggatcgatggagaccatcaagtgctgcatcgcgtgcatcctgccgtgcggggcgctggacgtggtgcggatcgtgcactccaacggacgcgtggaggagatcagcgggggccccgtgctggccggggagatcatgaaggcgtaccccaagcacgtcctccggaagccgccgtccacgtgcccggccgacggcggcatcgtcgtgcagaagcccgtcatcctgccgcacaatgccgagctgcagaagggcaagatctacttcctcatgccggtcatggccaccccggcgcccgagaagcccgccgcgaagccacagccgccgcccgccgccggccaatccg

SEQ ID NO: 21405 - DNA, 2249 bp, Zea mays
  Clone ID: LIB3332-032-D4_FLI
ctcttctctagggagttcgcgcacaggctccacctcatcggcccccgcgaagtcagagccacatccctggttcgagccccagagcagagcagcctccccgatctccacccctctgtgatagtccgcatgaagcagatggcgcgcaagtcgatgggcggcaaggcgccgcggaagcagctggcaacgaagggggcgcgcaagtcggagacgaggacgcgcggcgtgaagaaggcgcaccagctccgcccgggcaccgccgcgctgtgcgagatccgtcagtacaagaagagcacggggctgctaatccgcaagctcttgttccagcgcctcgtcggccacgacgccacatggttcctgctcgacatcgccttctacagccacaacaggttccaggaggactccaccagcatcagcgggatccccatgtccaacaccaggagcgcagaggagaaggaggttctcgccacctcgcccaacaggtgtttgacgaattgcttcaaactcatacaaagttgttttagctgggatgcagtgccatatcaacagccttggccaccacctcatatgcaggtggagtttgggtgtggcagtgctgatttatgtccaattccatggccgtttttcaccacaattggtaccaatgaggagataattgacatcacatctgatgatgacaaggttgataatgtggttgatcagctgattgatgaacagatcgcagcagtagtctttgtgccagcgtgtatggaagctacgcctaataatgtgataaatacaagcaaaaccgtggagacctttgctgctcatcagtctcctgagtatgatagtggattgaaagataaggatcagagaatatcatttgaagatgagatatctgagggtgggcaagctgaacaaagtactccacaacaggaattgtgggctatgccaccagatactagtgaccgtgaaactgttgagaggacaaccagaagtattgaggtggagcatttctctcaggttgagtcaaagcataaaatgaactctatgtccgtggaagcttctgagcatgtcactatcactcagattgagaagaagccggttcaacaagttgagataactcaggagttagattcactgccgatatgttctagggagcattctaatgaggcacttgaaggggagagaacagtgcaggctgggttggaacaagagtgtgaggtgctggggatattgtcaacgatcacctcagatatttttgcaatagggctcagtccaaatcaatatactgtgtatttttatcggaatttgatggcctgcatgatgttaatccgtcgcagattcttgctgtcatttggacgtagttgggatgcggtgacgtataagcaaccatggccaccaccggtgcatgttgtgatactaggagatggcttttccgtcaggcttacaccttggcaaccacttgatactgatatctacagctttcctgtgaacaaaccagaatcatctgcaggtgtcttttgtattgcaacagaatcaacgcagtgtgcctatgattcccaatgaaacagtgtctcgacaatcctcttgatgatgcacagatgcctttatgaacagatgcaatacaaatctgaagagggatgtactcgggtagtgaaatgcctcccaccggctgacgcaagtttacttgtctgggctgttaatcagatgacagatccattgattgcattgatgtatgcggtccaagtgatgaattttctcaaggacaaagaggagtcacctcgagaggatgttttgctgctccagaaggacccatttgatggcaacaggcatcagaaacccaacgtgacacttgccatctccttgaggaaagatccaggagtcattgttgcgtgcactgccccaaccaacgaagtaccaacatatgtggaggactacactagtagctcacaatctgcaactgctggctagtggctatcaccgatgctcccggcatgacaactaaaatttcttaccatcagcggcttgggggcaagccgcatttcaagcggtggggaatgtcagcaacggtctaggggagacgctagacgaggcagccgtcgcggaagagcggcgatgtcccagcaaggagcagctcgcatatccgagccaaggagttatgtaaacgagtgggccatatgttgggccgcagggtgaagggtatttgagtctgtattccgtatgaactggttatgaaaagaaatagaatatcagaaaagccttcgtgctcc

SEQ ID NO: 21406 - DNA, 385 bp, Zea mays
  Clone ID: LIB3332-032-D6_FLI
ttggtctgcactggttgagcggcaccggttcctcctgacaacacttcttgtgcttgccttcctatgcagtatctatctgtactttgcagtgaccttgggggcatcagatgcgtgcagtggtttgacaggaggggcacagaagatcgagtgccaggcaagatcagtgctgcaacatggaaagttgaaattccgctgacttcggagtctcattgatgaagaccaaattattgagtttatttgcactctggtcacaggtcttattcttcataccatgaatctgtatattattggtggtggctggtttgtattcatgctgatgttattgggccacaacatttattgtactggtagagataaatctaatagtgatagcgttgagtttgtg

SEQ ID NO: 21407 - DNA, 2635 bp, Zea mays
  Clone ID: LIB3332-032-E10_FLI
caacgaccagacgcaacacgacggcgacggccatggcttcgccggacctcgccgccggcgacggcagctacgactttcaccttcgctctctctccgcggcctcacgggactccgctgcggcctccgaccccgcctctgaccccaacctcctccaatctgttaggagggtgtgcgagatgtgccgaacggcgaaggaagcgaaggacgagatggtggcgcgggcgttccccgtgatgggcaagctatttcagcgatgcgccgccgctcccacgcaggccgttgcctccaccggcgtgctgctcctcaccattttgcaattcttcttggattttggggaggctgttttgcatgatgctgatggtagcttgaaaaccttcttccgctcttgcttaaggagtttgcagatcctattgttgcagagcgcacagttgaattccttgtaacaaacaagacaaagatccttagctcctttcccaatttgattccacaggtgccaacacttgaaatatttacttacttggaattgacaattcccacatgtagctcctattattcatgctgttgcagatcattgctttgaaaaactgaaagatataaatccagcttccttctttgttttatagcatatttgtcaattttttatgtgaatggtgggggaggcccctacatgtatttcttcactaacagaagcaaagaaatatttacaatacaggaggctgtaggccaaaaaggtagagaaaaaacagaaaaaaccatatttgtatgataagctactcaaccaatcttttgtaagattctttatagaatatctctcttctcttcctattttccatattcgacttaatcttgttaacacatgccaatgcttgtgtatccttgtttatacacagttctatccattgttgttaaagcttattgcatcaaacggtgagaggtatgtgctcgtattgtcatgaacttcacatagctctatcatccatgttccctttaaatgactcagtacaggtaccataaatatccaatagcaatcccgttgaactacctaatttgttttctaacattctagactggagaataagttttcggaagtacttccattaatgatgtcagcaggatcttttcttcccctcttcctatcccttatggatttgccaatgttggtggtggcactggaaaaggtggaaagaagttctggaactcttattggtagtagtatagctacaatccagaagagcgctgctcctgagatgcttcttgcactgatggacgaggcatatactggttctgccgtagaagaacctagtggtaattcaggttctgatgatagtggtcccctagaccttactgacccaatgttcttagaccttctaaaagatgagaatgatggcattgccgcaaaacattggatatcccctacgatatcttcaacgttacaagcagcatttaacagcccacagtcggacagattgaaacagtcactggaaatggcacctcgctttcttactttatattttgcaacagcattgcgagacgttaatgactgtagcactgctgtgtgctcttattccagtagttatgtcaagatatgctgcaatgttcccagacaaagttttctctttcaaggtgagggaaaggctttcagacttcattttggctgcattccagcggtctcccaacatcattgcagtactgaagaaacctattactgacagacttggtgaggctcatgataatcttgccaagacagagttagcattgcacttgtgctgggccattggtgagcatggagctggaggggtgggtcacaaggatgtagctcgtgaactatttgaaaatttggagttattattgtatgaaaacctggcaactagccgtttgggattaagccaagagccaggatctgattccatgggtgcatcatctagaaagtcatcccaagccaggcttctctgctttgtggtgactgctattgcaaaattagcaacatgccacagtgagttgcttccgagggcacgcgtgtcattgggtaaggtcgctcgttcccgaacctcagacaggagggtctggcaacgggcctgtgactatttagggctcatgaatgaaccagccatctgtttatctgtactgggaccgtccaccgcccaaggaaatggtcctggtattgtgaattggagtgaaggaggaacaaagatggtagctcatgttcctttttaccttttagcccagcaaaaaggtccaccgtctcataatttttcatttgccgacctcctcccaacagaatgaagaaaatatctgcatgagtgcattggtgcaggcatgatttctctagcagaaggccatataacgattttgttttgaagatccaagttcctttttaaaaaaggggctggtctgaacattcaggcttatttctctagcataatactcataaagagtcctgtacttttaggtcttgttcggttattcctataatacatggattgatggaattaaaaaaaatttagaagaactttgacttgcttaggaattcaacacatctaatcccactcaatccatatggattgagagctaatcgaacaagtcttacatggttgactatgcactcgagttatggaatgtatggtattacatttct

SEQ ID NO: 21408 - DNA, 1758 bp, Zea mays
  Clone ID: LIB3332-032-G12_FLI
ctccctctccaaagcggcagcctcacgcagtcacgcgctccaccacgccacctccctccacccctcactatatactcactcctgctgttttccgtccatccgcccaccggttcgcagcccgcgcctcaaaaccctagccccgggcggatcgcggggcgcctccgcggtgccagcgacgcggctcgtttgatccgattgttggtcgagccccgccctcgctgccgcgcttcgctccggctgtgcaggtgcagcggcgtgagcaccgagcacactcgcgaatggggaactgctggggtgcgcggatcaaggatgggagccctcaccctggcgcctcaggaatgttctcaaagagtagtggtaaggatgggagtaggcttagcggctgtagtagtcgagcctcttcagcttctatgccaccaagtgcgaagactgaatgtgaaatcctgcgatccgccaatgttaagatcttcaccttcaataatctcaaggcagccacaaggaatttccgtcctgatagtgttctaggtgaaggagggtttggatctgtctataaaggatggatcgatgagaacacattatcaccttgcaggcctggcactgggattgctgttgctgtgaaaagactcaaccatgagggtttgcaagggcaccgagagtggttggcggaagttaattacctaggtcagttctgtcatcccaaccttgtcaagctgattggatactgcttagaggatgagcaccgactgctagtatacgagttcatgccccgtgggaacatggaaaaccatctgtttaggagaggctcatacttccaacctctgtcatggaaccttagaatgaaggttgcactgggagcagcaaaaggactagcttaccttcatagtgcagaggcaaaagttatttaccgagattttaagacttcgaacatcctccttgacacagattattctgcgaagctttctgattttggattggctaaggatggtcctgtcggtgagaagagccatgtgtccacaagagttatgggaacatatggttatgcagctcctgagtatctttcaacaggtcacctaactgcaaagagcgacatctatagctttggggtagtgcttctggagatgctgtcaggccgccgcgccatcgacaagaaccgcccccagggtgagcacaatctcgtggagtgggctcggccttacctcacacataagcgcaagatattccggatcctggatacgaggctggaaggtcaatacaatctgaacggtgcacaaacaattgctgcccttgctctcgaatgcctatcctacgaagctaagatgaggccgactatggacgctgtggttgctattctagaagagctccagggctctggtgaagccgagaagaagcttcaagaacccaaggccggaaccaaacaggcacctgctgctgtgagtgctagcatgagcagcagccgcaagcctcgccggaaaagtctgggagacacaaaggagactgttggtgttccagatcccaaaccattggcccattctcgttagcaaggaaaagcattgcctggtcaagtcgttagctagactgtagctcgcttgtgaatatgctatggtctgtgtatgtatgttcagagggtaatcgggcttttggcaacagtcttttcgtctttatcatgagctgctcggttcagcctgactggaacctgtatgccgaaacccatggcatcagagagagggggagagagctcatgttccgagtctttaactt

SEQ ID NO: 21409 - DNA, 752 bp, Zea mays
  Clone ID: LIB3332-032-H5_FLI
ctgatcattgttggaggtggtcatgcagcaaccatagctgttcgtgcagctggtaaagaccttataaaaccatctgctgttgctgctgttgcacctacttgggctggaccccttcccatcgtatttggccgcggttctgatatggaaactaggtatgggcttctacgaggaaccctcagggctccagccctgggctggatgatgtacaatgttctggtgagcaatgaaaagtcgatccagtctcagtacaagtcccacgtctacgccaaccctgacaacgtgacgccagctatcatcgagagccgatacgagttaaccaaaagaaaaggcgcacggttcgtccccgcggccttcctgacaggcctccttgatcctgtccaatcgagggaggagtttctgcagttgttcgccaagttagacggagacgtaccagttctggtagtgtcaacggtcaatgctcccaagagatccaaggccgagatggaggctctaaggggctctaaaggggtgacgaagtttgtggaggtcgcaggcgctcttctaccgcaggaagaataccccttggcagtcgcggaggaactctacagcttcctgcaggaatcattcgcagcaagaaggtgaatgtgcgtgcgtgcgtgcgcacaactgtgccagaagacaggttctcaagtcccacacatcgtgagtaaattcgttagcctgctacagtgtactggaggtttttagcaacaataaagcggcatcactcgttc

SEQ ID NO: 21410 - DNA, 1346 bp, Zea mays
  Clone ID: LIB3332-032-H9_FLI
cctaattctgctggaggtggtcaaggacaatatggatcactgagaaagcatggagtaagcgtcaatgccattgtacaacaaaaccaggaattcagcattcagaatgaagattttccagctttaccaggaaataaaggtagttcctcagattatcctatggatattcatcacaaggaccaccttcaagagaatataaatattatgcaagcacaacattatcctatggctagaccatctggctttagcttgggaagcagttatccaccccgtcaacatcagcagagtgctaattcagttcaaaatgctgggctggaaactattggactaagaccggcaaattctccaagtctgtcaactaattcaggggtttatgagcaattcatgcagaagtaccatcaaccacagactcaaaattcacttaggttgcaggcagcttctgatccttgtactgttgaggacctgagccaaaaatccgttcagggaacacaggctgtgccggatccatatagcttacttggactgttgagtttaataagaatgaaagagcctggaccaacaactcttgctttagggattgatttgacctcgttggggttgaatttgaactcccaagataatctttacaagacatttggctctccgtggtcaagcgagccagctgtaggagaacctgattatcagatcccagcttgtttctctgcagagccaccaccagcactgcaaccatttcattttcagaagtttcaccctttgacactattctacatcttttacagcatgcctaaagatgccgctcagttatatgctgctaatgaactatacaataaagggtggttttaccacaaagactaccgtgtttggctaacaagagctcctaattccgcacctcttgtgaaaactccacttcatgaacgagggtcctacatttgttttgatccaagcatctgggatactgttcataaggacaactttgttctccattacgaagcagtggagaagagacctgtccttccttctgctggccaaaatattaggcgagaactataaggttctcctgcatttgaagttaatttggtttgatcagtagctgttgtcatggatgggctgagttcatacaaaatgattctataagaacttatgacccccaggtggcagttgtagaaatgtagctgagatttagattttcttcataatttgttggcattatttagtagggccattgttgtaccaatgttgtgacttgatttgttgttgttgttgttgtgacgcagtcaccgtgatgataataaatgttttgaccgttatgagtcagcatgaaaatataatgagacttttgatttgagatg

SEQ ID NO: 21411 - DNA, 1009 bp, Zea mays
  Clone ID: LIB3332-033-F5_FLI
ccgaattccctgcgattcctctcccctcgcctcctcgtctccccctaggggatcgtcggagaggaatcgcaaagagggccgtctcatccgagttaaggaagccatggagcacaaggaggctgggtgccaggcccccgagggacccatcctctgcatcaataactgtggcttcttcggcagcgcggcgaccatgaacatgtgctccaagtgccacaaggagatgataacgaagcaggatcaggccaagctggctgcctcctctatcgacagcatcgtgaacggcagcgacgccgtcatggagccggttgttgctggcagcaacacggtagtagctgttgcccaagttgagttgcaaacaatgaacgtgcagcagcccgctgatgttgccggacccagcgagggggtggcggcgatctccaaaggggggaaggtagggccgaaccggtgcagcgcctgcaggaagagggttggacttacgggattcaactgccggtgtgggaacttgtactgcgcactccaccgctactccgacaagcacgactgcaagttcgactaccggactgctgccagggacgccattgccaaggctaatccggtggtgaaggcagacaagctcgacaagatctagggggggttccctacggttgggtatcaggaagattgtaaaccgcggtaactcgtcatgcggaactgctgccttgccccccgcgcctttctcttccatgtttgctgctacaatcttgttgttgggcattgcagtgcacggtgcacacttgtgtagcccgcctcgagaattcctgcctctgcatctggtcagttctaaaatgatttgcatgttggctatgttgtgtaagctctatttatggtggtctcgctgagacgggtatttggcttcgcagttatctagctatgtgatgtactgttgtcttgtccctgggtattatatggtacactgcagccagtaatagtaatctgcaactgtgcgttaaatggtccgtcgttttcctat

SEQ ID NO: 21412 - DNA, 805 bp, Zea mays
  Clone ID: LIB3332-034-B3_FLI
aaaacccaagcccctgcgaccccgagataccaaagccagcagaagaagggatgcagcagccgatgcacatgcagccacaggcgccggcgataaccccagctgccggaatcagcacggagcagatccaaaagtatctggatgagaataagcagcttattttggctattttggaaaatcagaacctaggaaaattggcagaatgtgctcagtatcaatcacaacttcagaagaacctcttgtatctcgctgcaatcgcagatgctcaaccgcagactgctgtaagccgccctcagatggcgccgcctggtggatctcctggagtagggcagtacatgtcacaggtgcctatgttcccaccgaggacacctcttacaccccagcagatgcaggagcagcagcttcagcagcagcaggctcagttgctaaacttcagtggccaaatggttgctagaccaggcatggtcaacggcatggctcagtccatgcaagctcagctaccaccgggtgtgaacaaacaggatgctggcggggtcgcctctgagccctcgggcactgagagccacaggagcactggtggtgacgatggtggaagcgactaggccaagaagtcctgataattttacgagctagccttttaggtcgcgaaatatgcatgtatactaccgacgacgaagagaggatcattcctgtgccctttaatggtgagtggccgtgatcttcgcatggatgatgatcattccacctttgttgtcagtcctgtagaacagacgtgggttgttgtgacttttatttgtgtgtttttttc

SEQ ID NO: 21413 - DNA, 1849 bp, Zea mays
  Clone ID: LIB3332-034-F10_FLI
ccacacacacacaaccagatctcccccaaatccacccgtcggcacctccgcttcaagatgcagatctttgtgaaaaccctgactggcaagactatcaccctcgaggtggagtcgtctgacaccattgacaacgttaaggccaagatccaggacaaggagggcatccccccagaccagcagcggctcatctttgctggcaaacagcttgaggacgggcgcacgcttgctgactacaacatccagaaggagagcaccctccaccttgtgctccgtctcaggggaggcatgcagatctttgtgaaaaccctgaccggcaagactatcaccctcgaggtggagtcctctgacaccattgacaacgtcaaggccaagatccaggacaaggagggcatccctccagaccagcagcggctcatctttgctgggaagcagcttgaggacgggcgcacgcttgccgactacaacatccagaaggagagcaccctccacttggtgctgcgcctcaggggaggcatgcagatcttcgtgaagaccctgaccggcaagactatcaccctcgaggtggagtcttcagacaccatcgacaacgtcaaggccaagatccaggacaaggagggcattcccccagaccagcagcggctcatctttgctggaaagcagcttgaggacgggcgcacgcttgccgactacaacatccagaaggagagcaccctccacttggtgctgcgcctcaggggaggcatgcagatcttcgtgaagaccctgaccggcaagactatcaccctcgaggtggagtcttcagacaccatcgacaatgtcaaggccaagatccaggacaaggagggcatcccaccggaccagcagcgtttgatcttcgctggcaagcagctggaggatggccgcacccttgcggattacaacatccagaaggagagcaccctccacctggtgctccgtctcaggggtggtatgcagatctttgtgaagacactcactggcaagacaatcacccttgaggtggagtcttcggataccattgacaatgtcaaggccaagatccaggacaaggagggcatcccacccgaccagcagcgcctcatcttcgccggcaagcagctggaggatggccgcaccctggcggattacaacatccagaaggagagcactctccacctggtgctccgcctcaggggtggcatgcagatttttgtgaagacattgactggcaagaccatcaccttggaggtggagagctctgacaccattgacaatgtgaaggccaagatccaggacaaggagggcattcccccagaccagcagcgtctgatctttgcgggcaagcagctggaggatggccgcactctcgcggactacaacatccagaaggagagcacccttcaccttgttctccgcctcagaggtggtatgcagatctttgtaaagaccctgactggaaaaaccataaccctggaggttgagagctcggacaccatcgacaatgtgaaggcgaagatccaggacaaggagggcatccccccggaccagcagcgtctgatcttcgccggcaaacagctggaggatggccgcaccctagcagactacaacatccaaaaggagagcaccctccaccttgtgctccgtctccgtggtggtcagtaagtcatgggtcgtttaagctgccgatgtgcctgcgtcgtctggtgccctctctccatatggaggttgtcaaagtatctgctgttcgtgtcatgagtcgtgtcagtgttggtttaataatggaccggttgtgttgtgtgtgcgtactacccagaactatgacaaatcatgaataagtttgatgtttgaaatt

SEQ ID NO: 21414 - DNA, 1729 bp, Zea mays
  Clone ID: LIB3332-034-G4_FLI
gcgggacaggagaaaaggggagagagaggtgaggcgcggtgtccgcccgatctgctctgccccgacgcagctgttacgacctcctcagtctcagtcaggagcaagatgggtgccggcggcaggatgaccgagaaggagcgggagaagcaggagcagctcgcccgagctaccggtggcgccgcgatgcagcggtcgccggtggagaagcctccgttcactctgggtcagatcaagaaggccatcccgccacactgcttcgagcgctcggtgctcaagtccttctcgtacgtggtccacgacctggtgatcgccgcggcgctcctctacttcgcgctggccatcataccggcgctcccaagcccgctccgctacgccgcctggccgctgtactggatcgcgcaggggtgcgtgtgcaccggcgtgtgggtcatcgcgcacgagtgcggccaccacgccttctcggactactcgctcctggacgacgtggtcggcctggtgctgcactcgtcgctcatggtgccctacttctcgtggaagtacagccaccggcgccaccactccaacacggggtccctggagcgcgacgaggtgttcgtgcccaagaagaaggaggcgctgccgtggtacaccccgtacgtgtacaacaacccggtcggccgggtggtgcacatcgtggtgcagctcaccctcgggtggccgctgtacctggcgaccaacgcgtcggggcggccgtacccgcgcttcgcctgccacttcgacccctacggccccatctacaacgaccgggagcgcgcccagatcttcgtctcggacgccggcgtcgtggccgtggcgttcgggctgtacaagctggcggcggcgttcggggtctggtgggtggtgcgcgtgtacgccgtgccgctgctgatcgtgaacgcgtggctggtgctcatcacctacctgcagcacacccacccgtcgctcccccactacgactcgagcgagtgggactggctgcgcggcgcgctggccaccatggaccgcgactacggcatcctcaaccgcgtgttccacaacatcacggacacgcacgtcgcgcaccacctcttctccaccatgccgcactaccacgccatggaggccaccaaggcgatcaggcccatcctcggggactactaccacttcgacccgacccctgttgccaaggcgacctggcgcgaggccagggagtgcatctacgtcgagcccgaggaccgcaagggcgtcttctggtacaacaagaagttctagccgccgccgctcgcagagctgagaggacgctaccataggaatgggagcaggaaccaggaggaggagacggtactcgccccaaagtctccgtcaacctatctaatcgttagtcgtcagtcttttagacgggaagagagatcatttgggcacagagacgaaggcttactgcagtgccatcgctagagctgccatcaagtacaagtaggcaaattcgtcaacttagtgtgtcccatgttgtttttcttagtcgtccgctgctgtaggctttccggcggcggtcgtttgtgtggttggcatccgtggccatgcctgtgcgtgcgtggccgcgcttgtcgtgtgcgtctgtcgtcgcgttggcgtcgtctcttcgtgccccccgtgtgttgttgtaaaacaagaagatgttttctggtgtctttgggggaataacagatcgtccgaacgacaacctttttttggg

SEQ ID NO: 21415 - DNA, 1597 bp, Zea mays
  Clone ID: LIB3332-035-A1_FLI
caaccacttactctcgtgcgctctccgtgggagcgaggactcgcggccggcggcagcggcaggttctcctagatctccggcatcatcagtaacaaatggctgacggtgaggacattcagccccttgtttgtgacaatggaactggcatggtcaaggctggttttgctggtgacgatgcgccaagggctgttttcccaagcattgtcggacgcccccgtcacactggtgtgatggttggcatggggcagaaggatgcgtatgttggtgacgaggcccagtccaagaggggtatcctgactttgaagtaccccatcgaacatggtattgttagcaattgggatgacatggagaagatctggcaccacaccttctataatgaactccgtgtggcgcctgaagagcaccctgtgctgctgacggaagccccactcaaccccaaagctaacagggagaagatgacccaaatcatgtttgagaccttcaatgttcctgccatgtatgtcgccatccaggctgtgctttccctgtacgccagtgggcgtacaactggtattgtgttggactctggtgatggtgtcagccacaccgtgccaatctacgaaggttatgcccttcctcatgccatcctgcgtcttgaccttgctgggcgtgacctgactgacagcctgatgaagatcctcaccgagagaggttactccttcaccaccacggccgaacgggaaatcgtacgggacatcaaggaaaagcttgcatacgtggctcttgactatgatcaggagctggagaacgccaagagcagctcatctgtggagaagagctacgagctgcctgatggccaggtgatcaccattggggcggagaggttccgatgccccgaggtcctcttccagccttccttcattggtatggaagctcctggcatccatgagaccacctacaactccatcatgaaatgcgacgtggatatcaggaaggacttgtatggtaacattgttctcagtggtggcacaaccatgttccctggcatcgctgaccgtatgagcaaggagatcaccgcccttgccccgagcagcatgaaaatcaaggtggtggctccacccgagaggaaatacagtgtctggataggagggtccatccttgcctccctgagcaccttccaacagatgtggatctcaaaggctgagtacgatgagtcaggaccagcgattgttcaccggaagtgcttctaagctcaagggcccccttcgtccccattctatgtattcctttccttgagtgcttttcttataagctactatgtttgagattgccggcctttgagcaggcaatgttgttggatctgtatcttgtggatcactacaatgcatgcgttgctccatcttcttttcatgccaagtttgctgtcatacttgctagtggggaaaacaacaatgacaacagtggtgagaacagcaaccacaaaaaaagagaggatggaaattattgaagttcctaggatcgtattgtaactgtacttgtgcgagtaacattattggttctctttgtatatccatctctgagacatgcaattctttttgattggtttgctacttctgtg

SEQ ID NO: 21416 - DNA, 762 bp, Zea mays
  Clone ID: LIB3332-035-F1_FLI
cacactcccgtttacgtgcacacctccaaaccctcatcacgatccggctccaaggtctcgagatgaagtcgagggcgaggtccggcggtggcgactccaggctctcggtgaggaagaccaaggttgagaaggacccaaacaagcccaagaggcctccgaccgcgttcttcgtcttcatggaggagttcaggaaggactacaaggagaagcaccccaatgtgaaacaagtctcagtgattggcaaggctggtggtgacatgtggaagtccttgtctgatgccgagaaggctccctacgtatctaaggccgagaagctgaaggttgagtacacaaagaagatggacgcctataacaacaagcagtctggaggaggacccacattgtctggtgattctgacaagtccaagtccgaggtcaacgacggggacgaggagggtgatgagtgatggatgacgggtgaaactctgggctgcccaagtgcttgcagtcagcagggaaatctcatcgtcgttgggcctaaccgggctttgctgctccgtagcgtctggaagctgtctgtcttttgagatgctgtagactagtagtgcctgctctgagttagtaattgaaagtgttgtccctgaagtgatgctgtttagttggtagtgtgttcgcttcttcggcacttatacttacccccaagcatcaacgctgcctgttttaaatctcaataggtgctgttttaaatctcagatctcaatatatgactactgatcgctgaat

SEQ ID NO: 21417 - DNA, 1115 bp, Zea mays
  Clone ID: LIB3332-035-G4_FLI
aacaacgtgttcatcgacggcgcggacgacgtgcgcgggcaaatcccgtcggcggtgggcgggctgacggagctcatgtcgctgaccctgttccggctggcggggctgacgggccccatcccggcctgcctggccgcgctgtccaacctgcagttcctgaccgtctcccacaccaacgtgtccggcgccatcccggagtccctggcgcggctgcgcggcctcgactcggtggacctctccagcaaccagctgacgggcggcatcccggcgtcgttcgccgacctgcccagcctccggtcgctggacctcgggcacaaccagctgacgggcagcatcccggcggggctggtgcaggggcagttccggtcgctggtcctgtcgtacaaccagctgacgggcccgatcccgcgcgacgacgcgcgcgacgagatcaacaccgtggacctctcccacaacaagctgacgggcgacccctcccacctgttcgccgccggccggcccatcggcaaggtggacctgtcgtggaactacctcgacttcgacctgagccagctggtgttcccgccggagatgacgtacctggacctgtcccacaacctcatccggggcaccgtgccgctgtcgctggagcggctgtccacgctgcagaagctggacctgagctacaaccgcctgtgcggcccgctccccaagggacacggcgtcatcaagcacgggtgcaagccgtacgcgcacaaccagtgccgcaaagggaccccgctcgcgggctgccaggacctggagtggagtgagtgagccggccggtatggttttctatactctgctctgctctccctcgccggcgtgcttcccgatcgtggtgtgtgtaaggaactaaggacgacggtgcctggtttaggcgtttagctatagacgaaagcacgtacggccgcgtgcctggtctagctacgcggccggttgatcttgagcagttaagcgtgtacgaaacgacagcgctgtgtacgtgtactgtctgctgaagtgtgagatgtactgtctgtgtgtatttggtatggatccgatcggcctgatgtatgaaaaggatgtttacgtactatataaagatggaaaatcgt

SEQ ID NO: 21418 - DNA, 1622 bp, Zea mays
  Clone ID: LIB3332-035-G8_FLI
cgtgctccgccgccgccgctcccaccgcgggcgccgtcgaggcaggcggtctctcggtcgggtcggggatgacgacgacgacgagggaggccgggagccggtgctgctagtgtccgggatgggcggctccgtgctgcacgcgcgccgccggtccaactccaagttcgacctccgggtctgggtgcgcatcctcttcgccaacctcgacttcaagaagtacctctggtcgctctacaacgccgataccgggtatgtggagccgctggacgacgatgtggagattgtcgtgccggaggacgaccacggcctgtttgccatcgacattcttgatccttcctggtttgtagaacttctccatctgtctatggtgtatcacttccatggtatgattgatatgctcataaactgtggatatgagaaagggaccacactatttggatatggttatgattttcgccaaagcaacaggatagacaaagcgatggctggtttgagagcaaaacttgagacagcttataagacctctggagggaaaaaagttaatttaatctcacattctatgggtggattgctagtacgctgcttcatgtctatgaatcatgatgtattcactaagtatgtcaacaaatggatttgcattgcttgtccattccaaggtgcccccggatgcatcaatgattctctacttactggattgcaatttgtttatggttttgagagcttctttttcgtatctagatgggcaatgcaccaattgcttgtcgaatgcccatcaatctatgaaatgttaccgaatccagaattcaagtggaaggaaaaaccaattattcaggtttggcgtaagaaccctgaaaaggatggaactgtggagcttgttcaatatgaagcaactgattgtgtgtccttgttcgaagaagctttaaggaataatgagctcacgtataacggaaagaaagtagcactaccattcaatatgtcagtcttcaaatgggccaccaagactcgccaaatcctagacaatgctgaattaccagatactgtgagcttttacaatatatacgggacatcttatgaaactccatacgatgtatgctatggctcagaaagctctccgattggagatttgtcagaagtgtgtcacacagtgccgtcatacacttatgtggatggagattgcacggttcccatagaatcggcacgggctgatgggttctctgcgaaagaaagagttggcgtcaaggccgaccaccgtggcctgctgtccgatgagaacgtattcaagcttctcaagaaatggctcggtgtgagcgagaagaagtcagagtggcgttgcgtgtctaaatcctactccaaagtgggtaattgggttgccctgtagttcttcaggaagactgttattttggcctttcctcctgaagagaagatgaaacaaaattctggtgattgtattgtatgtctgcacgatgtaaatccctgcgagctgcacggaacaagggattagtgccccttgtacgatgtatcattgccagacatttcttttgaagcctagggtcatatattcattgccccttccaactttggagcatagtaaatgaataatatgaaatcgatcataatttcag

SEQ ID NO: 21419 - DNA, 2195 bp, Zea mays
  Clone ID: LIB3332-036-E3_FLI
cagccgggagcagctatcggtacagtacgtgagcgagcggcggcggcaatgacaaggtgcggacgatgccgccagtgtgaatgcgccggcgcctccaccaccacctcccacggcgacgcgcgcaaccgcgacaacgatgcccccgacgcggtcctcgagggcctcgccatggcaggcctcgtcgacatcctccgccagctcggagacctcgcagagcttgccgcggaggtgttcgacgacatgcaagaccaagtgatggccgcgtccgcgcgagggcgacgactggccgcgagagccaggaagctgctggcggccgacctcgacctcgtcctcgacctcgacctgccgccgccgtccacccaagaacaccgctgcctcagctctgccgccgctgctactgctctcgccacctccggtggtgcaggccgtctgggctgccgctcctatctcggaggcgcgccgccgatgccgcgtgtcgtcgtccaacgtatcgagcgctgccgcgggcctcccaggctgtcactccttgacaagtttgatgctgctggcgatggagcgtgcctcaagaggtacaccgacccctccttcttcttcagggcccactctgccaagattgatgagcaaggcacgctgaagcagcatcgtcggcaggcagaagcagcagcagcagcaggtgccgccgggtctatgttcctgctgatgcagcaaacagctgctcacagggtcgaacagcccaacatggaacagaagctgcaagaaggtagtacagcgcagcccagcccaagtgagctcgagagaacgagctctttcgaggcatggctctctccacaagctcgccgctttcctaccgctactgctgctactactcatcaccatcttcaggaaccacctgatgatgatgatggtggtggtggtggtggtgctactacctgtagtggatccatcagtagtcaggttgataccacatcgaatgctgcggctgttagcagcagttccacggtgaaggcggtcaggctgaactcagcatcattggtgaaaggtggtgagagtaatacgacgaggtcgaggtacaaaggcaagatcgcctcaagagtcagcagcttgccgaggaagctcttcatgaacaccaccaagcatcacaacgaccactcgcgctcttttcgtgcaggtagtagcagcctccgggtgacccaagccacagacatcggggattgcagccctgaacttgaagccatcgccgtcgccatccccaccccagatcgatgcagtaacagtaacagcagcactcctgaaacatgtacagcagctgactccaagaacctgctgctgctgctgccaggaagtggtcctgttctggagccacctgacaattcttctgctgctgctgctgaagacgccaaagtacatacgccacttgcgcctattccaccgatgcagtggctgtcagagaaagggactccacctgcatctcctaaacacagaacaccatgtttccagcaacaatttggtagcagtgggcaatctgatgagaagccaagccaagagcacgaggcttcagaccacagcagcaatctgctgcaggagagcgtgttcttctctgcggcacaagagctagcgaagatgtcccctcctcctccttgggtgccaaggcccaaatatccactgcttgatgttaaggcactacggaatggtccaagcccgatccatccttcaagaaacattttggacagcaggagtgcacagataaaagacattgcaatttcttccaagctgaaaccagcttctagagcgagctctcatgtgactgggactgggagtcctaccaacgccaccattctgaacagagcagatggcattcggcaggtgcacgatgatgaaactgatcaaatctggagcgatgacactcaatgaataatgatcatgtactaactgatggaagtagagtcattcaagttgagatggccgagttggtctaaggcgccagattaaggttctggtccgaaagggcgtgggttcaaatcccactctcaacaaatatttttttatttttcctgttactcttgtaattgtttgtagagaattcattagcttttttttttcaaatccaactctcaacaaacatgtttttcattgtattgtttttctttttcctgtttcaaactactcttctaattgtaattgtttgtagagaattc

SEQ ID NO: 21420 - DNA, 1236 bp, Zea mays
  Clone ID: LIB3332-036-F6_FLI
ctctccgcgggccgaacaaccccagactgggccggccggccggccgtcgcattttccttccttttgggaaaatccttccgcacgaccccgcgttccgccttcgtttctctgcctctcgcctagtgtcgcggtccgacgaccggtgtcgccgccgtcgccgccgccgccgctctaacgccaggtgctgaggccttcgccagcctctttgccggcgacgaaaacccaccagatcttacagtcctttcaggatgaccaagtatacgaggaacaaaaaaagttcatcttctcacagtagttccagattcaaaagagtttccagaaaggagatgtcatttgcagtggagaaatacgcatggacaaatgcaacttgtccagtatgcatggaattcccacacagcgctgttcttctactctgttcgtcacatggcaatggctgccgtccatatatttgtgcgtccagctaccagcactcaaattgtcttgatcagcttgtaatgtcatgcagaaaagaagcctctgaggacccagatgcaatagagcttatgtgtcccctatgccgtggcgaggtcaagggatataccttggttgagcctgctcggaagcagctgaatcgcaagaggaggagctgcatggaagacggctgttcgtacatgggcacatacagagagctctgcaagcatgtccaaaagaagcaccctactgcaaacccacgagctgtggaccccttgcatgcttacagatggaagcggcttctatttcgaagttcattgcatgatatgatttgttcaactacttcagaggctatgcgaaggttttgttctcacatgctgcagattgaagaggttgtggctgctttgcgagagggtggtgatcatcgtggcgctaccaatgacgatcaactgatccatgatctcttgacctctcgctgaaatgtgagaacctgtgttgatcctgcaggcaatctttgcatgaatccccaacttggcacccctgccgattcacattttctgacccgacaaagcaaactagtcttcatctgtcctcaatgaaacagactgttaaagctttgatggatttattcattcacagtgataatggctggttgaatggcacggggctttttttcgtactcatctagcctctagtgtgtcatgcgatgcactgttcctgtgcaccctcccactgtatgactatgacataactgtttcttatggaacgcaatgtgttcctgttcat

SEQ ID NO: 21421 - DNA, 851 bp, Zea mays
  Clone ID: LIB3332-036-H10_FLI
cggcctcccgctctacgtcttcctgcgcgaaggctccgacggcgacggcaagaaggtggatccccgctgccccaacgcgcccaacccgttccacgtctgcaccgaccactgcctcgccaagatatccgaggccggccgctcgtcggagggagccaagtcgccgatctcgctcttctcccgccactcccgccgctcctcctcgtcctccgaagatggcagcgtgaagtccgcggggagcaagaaggtggatccaaggtgcccgaacgctggcaatctgttccatgaatgcggtgagcattgcgccgccaagatgcagcggtcggagcagcagcacaagggggtcaatctcaagtcaccgcgcaggaaagtggggaagaacgctacagcgatcccaaactggaaggttgatccgaggtgccctaacgcgtccaatccgttccacatgtgcgcccagtactgcttcgaccatctgagtgaaacagcgcagacaagtgcagcaaagtcagacaagagacgaggcaagggcgtttctgaagacgagggaagaggagaaaccaaaaccaaccctggttgcgccaacgcgtccaacccctaccacaagtgcggtgaccaatgcaagagaaagggtggtggtgataggtagaccgtagacgaggaaggcaggccggcaagacaggatctgtccggacggacgatcgacggcgggcgatgaagggaagaaagaaaaaacaaagctagttcccatcgaccgtccctgcgggctccgttctgtatgtagagtggtgtgcttccccgttttccattgtaatgcactatgtttctctgacgatgaaggttgcctgtacgagcag

SEQ ID NO: 21422 - DNA, 871 bp, Zea mays
  Clone ID: LIB3332-036-H12_FLI
cgcctcgggtcaaaccctaagcagggagttgatttatccgctgcagccatgagtaagttgcagtctgagtctgtcaaggatgccatctcccagattgttggggatgccaaggagaagaataggaagttcactgagactgtggaacttcagattggtctgaagaattatgatccacagaaggacaagcgtttcagtggctctgttaagttgccccatatccctcgtcccaagatgaaggtgtgcatgcttggtgatgcccagcatgttgaggaggccgagaagatgggacttgactacatggatgttgaggctctcaagaaaatgaacaagaacaagaagcttgttaagaggcttgccaagaagtaccatgctttcttggcatcagaggccatcatcaagcagattccccgtctccttggtcctggtctcaacaaggcaggcaagttcccgaccctggttactcaccaggaatccctcgagtccaaggtgaacgagactaaggcaacagtcaagttccagctcaagaaggtcctttgcatgggtgtcgccgtcggcaacttggcgatggaggagaagcagatccagcagaacatccagatgagcgtcaacttccttgtttcccttctgaagaagaactggcagaatgtgagatgcctgtacgtcaagagcaccatggggaagccatacagggtgttctaagtctgctcttttgtgaagtctgctaggttctggcaccgaggttttattgaattaaactcttgttaagagtatgtttttggacgatcctatatttcgtcctggcgctactatgtttcagaatggtggtactactataagtattgcttgaaaggatcaatataatttgcgtgtc

SEQ ID NO: 21423 - DNA, 431 bp, Zea mays
  Clone ID: LIB3332-038-A4_FLI
gtttcaatgatgcctatgaaaccagatgttgtaatttggggcagcatcctttcagcatcaagggcacaaggaaatgtcgcattaggtgaaagagccgctgaagaattggcaaagcttgatcaaacccatggtgcatccaaaatagccttgtctaacatctatgctgatgctggtcactggatcaatgtttcagttgtgaggaaggaactccaggatgcaaatcttgagaggctaactggaagaagtggcattgtacagtaataggatagatcttttctcagttagctataatgggcaagtgatgatgagaagcccttcctttctttctgtattctattttctgaagatgccgtgaccattgttttctcttcaaacaaaagcaggcgcgaacatgatgtgatggcggaaatataatttcttttgtggtcctc

SEQ ID NO: 21424 - DNA, 1745 bp, Zea mays
  Clone ID: LIB3332-038-E5_FLI
cgcagagataggcgtcttcgtactcgcctacctccgcggctcaaacctttcccccttctcccaattccttccgccggccgccgctccacccgtacgacgacaccatgagggagtgcatttcgatccacatcggccaggccggtatccaggtcggaaacgcgtgctgggagctgtactgccttgagcatggcattcaggctgacggtcagatgcccggtgacaagaccattgggggaggtgatgatgctttcaacaccttcttcagtgagactggtgctgggaagcacgtgccccgtgctgtttttgttgaccttgaacccactgtcatcgatgaggtgagaactggcacctaccgccagctcttccaccctgagcagctcatcagtgggaaggaggatgcagccaacaactttgcccgtggtcactacaccattggcaaggagattgttgacctgtgccttgatcgcatcaggaagcttgccgacaactgcactggtctccagggcttcctcgtcttcaacgctgttggtggaggaacgggctctggccttggttccctcctcctagagcgcctgtctgttgactacggcaagaaatccaagcttgggttcactgtgtacccttccccccaagtttctacttcggtagttgagccatacaacagtgtactgtccacccactccctcctcgagcacactgatgtggctatactgctggacaatgaggccatctacgacatctgccgccgatcccttgacattgagcgcccaacctacaccaacctcaacaggcttgtgtcccaggtcatctcatcccttactgcctccctgaggttcgatggtgctctgaacgtggatgttaacgagttccagaccaacctggtaccctacccgaggatccacttcatgctttcttcgtacgctccagtcatctctgctgagaaggcctaccacgagcagctctctgtggctgagatcaccaacagtgccttcgagccatcttccatgatggccaagtgcgacccacgccatggcaagtacatggcctgctgcctcatgtaccgtggtgatgtggtccccaaggatgtgaatgctgctgtggccaccatcaagaccaaacgcaccatccagttcgtggattggtgcccgactggcttcaagtgcggcatcaactaccagcctcctagcgttgtgcctggtggcgacctggccaaggtgcagcgtgccgtgtgcatgatctccaactccaccagtgttgtggaggtgttctcccgcatcgaccacaagttcgacctcatgtacgccaagcgtgccttcgtgcactggtacgtcggtgagggtatggaggaaggtgagttctctgaggcccgtgaggacctggcggcgctcgagaaggactacgaggaggtcggtgctgagttcgatgagggcgaggatggcgacgagggtgacgagtactagagaagtttgctgatgacgcagcatcaggccagtgtgctgcccttatcccgtgatctgccgagagttgctcctgctatcgtgttatgtgtgtctgttctgaagtattgtgtggtttacaacacctgatgttgtaagagttgttaattcccctgcattgctaccgggttattgagaataattatggctgtttacgttgttgcttcatctcggagatgctttacatttaccaccttgttcatcttttgtcatcagtaaaatcgagtcggcggatgattttcttgcgtc

SEQ ID NO: 21425 - DNA, 1595 bp, Zea mays
  Clone ID: LIB3332-038-E6_FLI
tcccgtcgcatcccatcccactaccacccatctcgtcgtccgccgattcgatccggttcttccaacccaggggcagtgatggcgacgaagaggagcgtgggcaccctcggcgaggcggatctgaaggggaagaaggtgttcgtgcgcgccgacctcaacgtcccgctcgacgatgcccagaagatcaccgacgacacccgcatccgcgcctccgtccccaccatcaagttcctcctcgagaagggcgccaaggtcatcctcgccagccacctgggtcgtccaaaaggtgtcaccccaaagtacagcttgaagcctcttgttccacgcttgtctgagctccttggagttgaagtcgtgatggccaatgattgcattggtgaggaagtcgagaagttggctgccgctttgccagaaggtggagttctgctcctagagaatgttagattctacaaggaggaagagaagaacgaacctgagtttgctaagaagcttgcatctgttgctgacctttatgtcaatgatgcttttggcacggcacacagagctcatgcttcaaccgaaggagttaccaagtatttgaagcctgctgttgctggcttcctcatgcagaaggaacttgactaccttgttggagctgttgccaacccaaagaagccatttgccgccattgttggtggatccaaggtctcaactaagattggtgtcattgagtcgttgctggcgaaggtcgatatcctcatccttggtggtggtatgatctacacattttacaaggcacagggatattctgttggaaaatctctcgtggaagaggataaactcgagctcgcaacttctcttattgagaaggcgaaggcaaagggggtttctcttttgcttcccactgatattgtagtagcggacaagtttgcagccgatgctgagagcaagattgtccctgccactgctatccctgatgactggatgggtcttgatgttggccctgatgccaccaaaacattcgacgaagcattggacaccaccaagactgttatttggaacggccccatgggagtgtttgagttccagaagtttgcagctggcaccgaggcgattgccaagaagctagctgagcttacaaccacgaagggtgtcactaccatcatcggcggtggcgactctgtcgctgctgtcgagaaggctgggctggccgacaagatgagccacatttcgaccggcggcggtgcgagcttggaactcttggaaggcaagactctacctggtgtccttgccctcgatgacgcctagatccgctgctgctgctgctactcaggttctgccagctttgcgtgtcatcttgtttcggaccttggtgtagcactgcaaggctaaggtttactcctccacatggactttcgaggataggcttgccaccgtgttttgctagatgagtcgtgaaataagcttttacttcctcgctgctgtgggtgaagtgactggaattcggaaatttggaactaacaaaaccccccgtggatttgtatgatacgttttgttcgacagtttgcgtcccatctttcactgtggtatctggtatggtatgttcttattttttg

SEQ ID NO: 21426 - DNA, 1679 bp, Zea mays
  Clone ID: LIB3332-038-F3_FLI
gataggcgtcttcgtactcgcctacctccgcggctcaaacctttcccccttctcccaattccttccgccggccgccgctccacccgtacgacgacaccatgagggagtgcatttcgatccacatcggccaggccggtatccaggtcggaaacgcgtgctgggagctgtactgccttgagcatggcattcaggctgacggtcagatgcccggtgacaagaccattgggggaggtgatgatgctttcaacaccttcttcagtgagactggtgctgggaagcacgtgccccgtgctgtttttgttgaccttgaacccactgtcatcgatgaggtgagaactggcacctaccgccagctcttccaccctgagcagctcatcagtgggaaggaggatgcagccaacaactttgcccgtggtcactacaccattggcaaggagattgttgacctgtgccttgatcgcatcaggaagcttgccgacaactgcactggtctccagggcttcctcgtcttcaacgctgttggtggaggaacgggctctggccttggttccctcctcctagagcgcctgtctgttgactacggcaagaaatccaagcttgggttcactgtgtacccttccccccaagtttctacttcggtagttgagccatacaacagtgtactgtccacccactccctcctcgagcacactgatgtggctatactgctggacaatgaggccatctacgacatctgccgccgatcccttgacattgagcgcccaacctacaccaacctcaacaggcttgtgtcccaggtcatctcatcccttactgcctccctgaggttcgatggtgctctgaacgtggatgttaacgagttccagaccaacctggtaccctacccgaggatccacttcatgctttcttcgtacgctccagtcatctctgctgagaaggcctaccacgagcagctctctgtggctgagatcaccaacagtgccttcgagccatcttccatgatggccaagtgcgacccacgccatggcaagtacatggcctgctgcctcatgtaccgtggtgatgtggtccccaaggatgtgaatgctgctgtggccaccatcaagaccaaacgcaccatccagttcgtggattggtgcccgactggcttcaagtgcggcatcaactaccagcctcctagcgttgtgcctggtggcgacctggccaaggtgcagcgtgccgtgtgcatgatctccaactccaccagtgttgtggaggtgttctcccgcatcgaccacaagttcgacctcatgtacgccaagcgtgccttcgtgcactggtacgtcggtgagggtatggaggaaggtgagttctctgaggcccgtgaggacctggcggcgctcgagaaggactacgaggaggtcggtgctgagttcgatgagggcgaggatggcgacgagggtgacgagtactagagaagtttgctgatgacgcagcatcaggccagtgtgctgcccttatcccgtgatctgccgagagttgctcctgctatcgtgttatgtgtgtctgttctgaagtattgtgtggtttacaacacctgatgttgtaagagttgttaattcccctgcattgctaccgggttattgagaataattatggctgtttacgttgttgcttcatctcggagatgctttacattt

SEQ ID NO: 21427 - DNA, 1289 bp, Zea mays
  Clone ID: LIB3332-038-F8_FLI
ccaagggtgactacgacggcgcccttgagcacctcgtgcttgcctccatgaccatggttgccaatggccgtgacattgaggttgccaccattgacgtcgccataggcaacacgtacctcgccctcgcccgcttcgacgaggccgtcttctcctaccagaaggcactgactgttctcaaatcggcccgtggcgacgaccatccgacggttgcgtcggtctacgtccgccttgctgacctttaccaccggacaggcaggctccgtgagtctaaatcctactgcgagaacgccctgcgtgtctatgccaagcccgcgccaggtgctgcccctgatgagatcgctggaggcttaatggagattgctgccatctatgaggcgcttggcgatctcgatgaggccctgaagcttcttcagagggcactcaggttgctcgagggctcaccggggcagtggagcactgttgccggtattgaggcacagatgggtgttctgtactacatggttgggaggtatgcagattcgaggaactcgttcgagagtgcggttgcaaagttgagggccattggtgagaggaagtcggcatttttcggcgttctgttgaaccagatggggctagcttgcgtgcagctgttcaagatagacgaggctgcacagttgtttgaagaggcaagggcggttctggagcaggagtgtggcgcttctcatcctgatactcttggtgtgtacagcaaccttgctgcaatctatgatgctatgggaagagtggaggatgcaatcgagatcctggagcatgtgctgaaggtgagggaagagaagcttggcacggcgaacccagacgtggatgacgagaagaagcggctggcggagctcctgaaagaggcggggcggtctcggaaccggaagcagaagtcgctgcagaacctgttcgggaccaactcgcagcgggcgaagaaggaagccgggaggaggtggtccaactttgggttcagaagctgaggaagctgcactgttggtcgtcgtcgtcgtcgggcggttgtggcctttgtaacataaaggagggatgggaaaggaaaaaaaagcacgtgtaaagatgttgctgtaggttattattattaggaatgtgatggtggtgttggtttgctgtttgtgtatgtgtggcactgcattactgtgttacttgtcttgggttatattttcagtagcgattattgttaactgggtgctgttataccttgagaagagaacattggttttgtcgtggaggaatggtgttgactggtgggtgatgag

SEQ ID NO: 21428 - DNA, 2044 bp, Zea mays
  Clone ID: LIB3332-038-G1_FLI
actgacaccgcacacacgccaaccggcctaccgccttcttctcttgtctcgtcctcctcgcgactatggccgccgccgccgaggtagaccccagccccaacccgccgccaactacagcctccggcctctccaagaccaagacgcgggaggccgaccgccgccgacgccgccgcagcaaggccaagaagaacaagtccgtcactgaggctgatgcccaggacgctgacgggggagcttccagctccgacgccaaggagaacgccgatcccaaccccgagccacaggttgaggtggagatagagtacgtgccggagaaggccgagcttgacgaccctctcctggatgatttcaaggccatcttcgagaagttcaccttcaaggacgctgctgcagcggcggccgaggatgataagaaagacgagggtgccgctgatgccacaaagaaggggtcactggatgatgatgacgacgacgaagatgatgagcaggaggcaaacaagaagaaggacggaggcctatccaataagaagaagaagctggaacgcaggatgaagattgcagacctcaaacagatatgcaacagacctgacgtcgtggaggtctgggatgcaactgctgcagatccaaaattgcttgtatatctcaaggcgtaccgaaatacagtacctgtccctaggcactggtctcagaagcgcaagttcttgcaggggaagagaggtattgagaaacagcctttccagcttcctgacttcattgctgcaactggaatagaaaagataagacaggcttatattgagaaagaggatagcaagaagttgaaacagaaacagcgtgagcgtatgcagcccaagatgggcaaaatggatatagattatcaggttttgcatgacgcgttcttcaaatatcagacaaaacccaagctgtctagtcatggtgatctgtattatgaaggcaaagaatttgaggttaaactgagggaaatgaagccaggcatgctgtctcgtgagcttaaagatgctcttggtatgcctgatggcgcccctcccccatggcttataaacatgcagcgctatggtccacctccatcttatccccaactgaagatcccaggtctaaatgccccaatcccccctggtgccagttttggttatagaccaggggagtggggaaagccaccagttgatgagcatggacgtccactctatggagacgtttttggtgttctgcagcaggacgaacctaactacgatgatgaacctgttgatcgcagcaaacactggggagatttggaggaagaggaggaggaagaagaggaagaggaggaagaggaagaaccaatggaagacgaggaaatggaagacggaattcagtctgtcgataccatctcaagtactccaactggtgttgaaacacctgatgttatcgaccttcggaagctgcagaggaaggagactgacaagcaggcagaacggccgctgtaccaggttcttgaacaaaaggaagaaaggatcgcccctgggactctatatgggtcaagccatacgtatgtgttgggaacacaagataaatcatcagctccgaaaagggtggatctgcttaagaatcaaaagtcagacaaggtggacgtcaccatccaacccgaggaactggaagccatggatgatgttctggcagccaagtatgaagaagctcgagaggaagagaagcttcggaaccaaaaggaggacttcagtgacatggtggcagagaatgctcacaagaggaagaggaagcaagagaaggaaggcaagtcgaagaagaaggaattcaagttttaagggcaggcgggcgatgtaggtcatgaggcaccgttgtagctgttccaaatatgactggctgtatggtttagttgctgcgatcagacagttccgttccgtgttccaagttccaaccgagaggtcgggctcattcgcttggttaacacaaatgtcgctttggattttcactggaatatgcttaattactctgtaagaaatcgttgcgctgttgaaatatcacgtgctgg

SEQ ID NO: 21429 - DNA, 185 bp, Zea mays
  Clone ID: LIB3332-039-B2_FLI
aaccacagcagtgctgtgatattttgtttggattcatggctccccagattgatttgtcatggctaagacctctactactgtaatttccctcattttttgtctcttcaaactctctgtattctttttttttgcttttttatgaccgcaataaagttcagtaggggtatacccctcatgtttgcttc

SEQ ID NO: 21430 - DNA, 876 bp, Zea mays
  Clone ID: LIB3332-039-B7_FLI
ccgatggcctcgcgccgccgcaccctgctcaaggtcatcatcctcggcgacagcggggttgggaagacgtctttgatgaaccaatatgtgaacaagaagttcagcaaccagtacaaggctacgattggggcggatttcctcaccaaggaggtgcagttcgaggacaggctcttcactctgcaaatatgggacactgctggtcaggaaaggtttcagagtcttggcgttgcattctaccggggagcagattgttgtgtcctagtctatgatgttaattctatgaaatcgtttgataatcttcacaactggcgtgaagagtttctaattcaggcgagcccatcagatcctgacaatttcccttttgttctgttgggtaacaaagttgatgtagatggtgggaacagccgtgtggtgtcggagaaaaaggcaaaggcatggtgcgcctctaaagggaacatcccgtactttgagacgtctgctaaggatggaacgaacgtggaagatgccttccagtgtattgtaaagaatgctctgaagaatgaaccggaggaagaattgtatgtgccagataccgtggatgtggtaggtggcaaccgggctcagagatcatctggctgctgttaagacatgaggcatccacgaggcgtggtgatcatcatcggctatgcagtgaccaaacaatacctcaacattgctgggcctccatggttatctacgtgtccgtattccatttgttacctttccagtctcctgctatgtacccaagggcgcatttcccatgctgtcagtcaatccgtagacttcatttgtgcagttccatcagtagcgtcataccttgtgaatacagttggacaaaataagagcaagcctgaactg

SEQ ID NO: 21431 - DNA, 1377 bp, Zea mays
  Clone ID: LIB3332-039-C7_FLI
cgcccaagcaaaaaagcaaagcctgcaatggcatctgcagccaccgccgtggcgctcgtggttgttgccgccctggcctcgctgacgcagctggccgcgtcggagtgctcggcggcggaccgcgacgcgctgctttcgatccgcgcggcgctgtcggaggaggagcggcagctgggcgtgttctcgacgtgggcggcgggcacggactgctgcgccgggtggtacggcgtggcctgcgacccgaccacggggcgcgtcgcggacctgtccctccgcggggaggccgacgacgcggtgatggcgcccgcggggcggcccgcgtcgggggtcatgtccgggtacgtctccgacgctgtgtgccgcctggaccgcctctcgacgctggtgctggcggactggaagcggatctcggggcccatcccggcctgcgtcgccacgtcgctcccgtacctccgcgtcctggagctcccggggaaccgcctcacgggcgccgtcccgccgctgggcggcgggcagtcgcgcctcgccgtgctcaacctcgccggcaaccagctgtccggcgccatcccggcgtcgctcacgtcgctcaccgagctcaagcacctcgacctcgccggcaaccggctcagcgggcgcgtgccgccggacctcggccggctccggatgctcagccgcgcgctgctggcgcgcaaccggctgtcgggccccatcccggcgtcggtggcgtcgctgccccggctcgccgacctcgacctctccgagaaccagctgacgggcgcgatccccgagggtctgggtgccggccccgggaatagcggcgtgctcacgacgctgtacctcggcgggaaccggctgtcgggcggcgtcccggcgagcctgcttcggagcggcgggctcgggatgctcaacctcagccggaacgcgctgggcggcggcgtccccgacgcgttcacgccgcgctcctacttcatgctgctggacctatcgcggaaccggctcacgggcggcgtgccgcggtcgctggcctcggcggcgtacgtgggccacctggacctcagccacaaccggctgtgcggcaccatccccgccggcccgccgttcgaccgcctcggcgccgagtcgttcgtcggcaacagctgcctctgcggtggcccgctcggcaagtgcacgtgacacccctagcccgcccatacgcgggaagcatgtagacatattcgtgcggcttggttaacatgacatgcatcatgatgatttcgcggtgctgcatgtgcctgtctttttctttctttctttttatttatcttcttttgtttactttttaaaaatgcttgtggtttgtccatgtgtctgaacgaatggaagcaaaaattaagctcg

SEQ ID NO: 21432 - DNA, 2300 bp, Zea mays
  Clone ID: LIB3332-039-E5_FLI
gagaggagacccacacactgtacccggccacagaagcagctactacagcaggagagggagaggaggccggcccccaagatctccgtccgagaagaagcgagcggcgacggcgagacgaggcagagagtttggtgactgcagaaggattcggtgaggaatctcgtcatgcagacttcaaaaccaaggagtgggtcttcagatgccccgcagaggacttctccaaggacaccgcgggcatctcgtgtggccaaaaccggagggaatgaaaccgattctacaggagttaccccgacaagaacgcctacggagaggagccctaaggttactgagaggcggtctccacggagcccaattactgagaagaagcgcccaagcaggctatcggaactggagtccaaggtcagccagctgcaagatgaactgaagaaggccaaggagcaacttagctcgtcagaggcacggaggcgccatgcgcagcaggaagccgaggaagcaaagacgcaagagcaggctgcagccgcctcgaagctggaggagttgcagcgccagcttgacgagttctcagctgcggaggaatcccgtctccaggaactgcgcaagatctcgcaggaacgtgaccgtgcctgggagtcggaactcgaggcagtgcagaggcagaaatcagcggacgcagccgcgctcggctcggccatgtccgagatccagcggctgaagcagcagctggaagcttcagcagagtctgacgcggcccgcgcgaagcagtgcgagtacgtggaagctgagatcgagggcttgaagcaggagatggagatccgcctagcgaccattgagggcctgaaggtgaatgtcagcgagagtgacagggctgcggctgaggcaaatgccacggtaaatgagaccaagcagcagctggagacagcgaaggccaccattgactcacttgtagctgagggcgtccgcatgcaggaatgcctgaggtcgaaggacatggagctcaatgagtccaaggctctcgtggcatcgctccaggaagatatgaagaagtcacatgacacggacaatgccaaggccaaggccaatactgatgtccgctctgagactgaggctctgcagaaggtgctggtgaccacaagtgccgccgacgccaatgggagctgtggaagctatgacccagagatcgaacagttgcggactgctcttgaggtcgctgagatcaggtaccaggagcagcaaactcggatgactatcgagactggaggcttgtacgagacattggagagtgtgagggccgagtgcgcccgcgaactgtgcgagctcaggctggagctgaagaacaagaacgatgcactcatggaggcaatggcaggagccgccgcagatcctcacaggccagacgcgatgcagcagccggagctggaggcgaagctgatgaggtccatcaccgacgcggcggagctgaaggcatgcctgatggacaaggagaacgcgctgcagagcctggcggaggagaacgaggcgctgaaggcgggggcgggcagggcggaggcggagctgcggcgcaagtacgaggcggcggtggcggagctggagctggccaaggccgcggagcaggacgtgcggatgcggctggggctggtgacggacgaggcggacaggagcagccggcgcgctgcgcgggcgtcggagcagctggacgcggcccaggcggcctggcggagatggaggcggagctgcggcgcctgcgcgtgcagtccgaccagtggcgcaaggccgcggaggcggctgcagccgcgctcggtgggggtggggggaaggacggcaacggcggcacggtggagaggaccgggtcgctggggcccgagtacggcagctccatcggcgggaagctgatgagctcgccattctcggacgacgtggacgaggagtcacccaagcggcgcaacggcggcggcggcggcggcggcggcgtgctgcgcaggatgagcgggctctggaagaagagccccaagtgagtgagactgagatggggtggacggggtccgggatagccgtaggtgcgaggtgatgcaatagcagcagtatgagtaggagggatactggtgaatgctgcagggaagacgacgacgctctttctggacaagacacggagacacagctctagtctaggtggtaggaagcatgatcgtctctgtctgataacatttggctggtacttgagtgaacctcgtgtcgaggagcagctgcttttggctgcctgttctgtaccttactatgcttcattcagtcaaaaaaattcccac

SEQ ID NO: 21433 - DNA, 2128 bp, Zea mays
  Clone ID: LIB3332-039-F3_FLI
ctccggaatcgtaacctcagaaagccaaatctcattctccggcgctcaggcccacccaagcgtcgactctcccgatccaatcggtacctcctagttcctcgccggcggtagcggcgtcgggcgaacagcggtgacttggcgagggcgcttggccggcgacaatcatccactaggatggaaggtgaggcagagaccgtggttggttcttgttctaaaccatgtgggcctctggaggactactacattccagattacattctgaagccaggtgcccaacaagtacttgttgatcatgcggcaccctgccccgttgtagtgttcatcaactcaagatctggaggccaacttggaagtagtttaatcaaaacatatcgtgagcttctcaatgaagcacaggtttttgatctctcaaaagaggctccagataaggtattgcatcgtttatatgccaaccttgaaaggctgaagatggaaggagacattcttgcagttcaaatttggaggacactgaggctaattgttgcaggcggtgatggtacagctagctggctgcttggggtagtcagtgaccttaagctttcccacccacctccagtggcaactgttcctctgggaaccggaaataacctccccttttcatttggatggggaaagaagaatccttctactgaccaagaggctgtaaaatcattcctcgggctagtaaagcatgcaaaagaaattaagattgataggaaggttaccacacattccgtggaggattttggaattactttagtatgggtaaggcttcaatgttgttctcatctttattgttacacaaatgcggcaagaccattatgtacctatactatccagttgtttatttatattttttatcttgatatgtgatcctgggtagtagttcatgctacaaaggctagtgtttcgccaacccactaaggaaagtagtgcaagtctagtgagattattgttatggcatcattctctttttaattaaatctatatctggtgagttcttaagcagataacaaattaaagaattcaggcactagagtcaaacatgatgatcatgacttgacatgttgcagggatggatgcagaagtgtcttatgcatttcattctgaaaggaagaagaatccagagaagttcaagaatcagctgacaaatcagggtacatacgctaagcttggacttaaacaaggatggttttgtgcttctcttagtcagccatcatcaaggaaccttgctcaaattgcaaaagtaaagatcatgaaaagagctggtagcctctgggaggaacttcacattcatcacagcattcggtccatcgtgtgtctgaatttgcctagtttttctggaggtttgaatccttggggcacacctggcacgaggagagcagaagatagggagttcactgcaccttttgtcgacgatggacttcttgaggttgttggcttccgtgacgcctggcacgggctggtcctgctggcccctaatggacacggcactcgcattgcccaggcccataggatccgctttgaattccacaaaggcgcagcagagcacacgttcatgagggttgacggagagccctggaagcagccccttcccaaggacgatgacacggttgtggtggaaatctctcaccttgggcaggtcaccatgctagcaaatgagccgtgcaggtccaagagcgtcaacgaccagtcgtcactgtcgccggcgcacgacagtcatggtgattacaatgatatcgctgaggaggacgaagacgagtgggaggacggcaggaggaagtttggggcggcagatacatttaagattcctgacgagattgacattgctcatttcagttgagctttgactagtgcatcgtcgtgtgcgttctgatcatacgagtatggtttggtttataaccatctcctttcttttgatttcatatatttgcgatatgattgttgcagccatgtgtaagtgaatcctaggtaaccaagtgctgcgttgctatatatgaccaatgtatgtatagattcagtggaacggtaaaaacacgcgaactctacggttttctccttttgttgttaccagttcaattgaacaatatagcgggtgtttggtttgggt

SEQ ID NO: 21434 - DNA, 2639 bp, Zea mays
  Clone ID: LIB3332-041-F11_FLI
aaacatttcaaaccactcttcgcccccttcctctcctctcatccccttcccccctccactctctcgtgtgtggtctcgcccctgaggttcctgatcgcaccatctccctccggcgacagtccgccgccccgccccgcgcgctcgacgaggccgctccgggtggtgaagagggtgctgctgcagtgtctcccctctcgctatgagtagtgctgtgaaggaccagctacagcagatgtcgacgacgtgcgattctctcctgttggagctcaacgtgatttgggatgaggtcggtgagcccgacatggcgagggaccggatgctgctggagctcgagcaggagtgcctcgacgtctacaagagaaaggtcgaccaggccaatcgatgcagggcccagttgcggcaggccattgcggaggcagaggccgagctcgctggcatatgctcggccatgggcgagccaccgatacatgttagacagtcaaatcagaagttacaaggtttaagggaagtattgaatgcgattgtcccatacttggaggagatgagaaagaagaaagttgaaagatgggaccaatttgttgatgtgatcgagcaaattaagaaggttgcatctgaaatcaggcctgcagattttgtaccctttagaattcctgtggatcagtctgatctgtcattaagaaagctggaggagctaacgaaagagctgcaatcccttcagaaggagaagagtgatcggctgaagcaagtcatggaacatcttaacactttgcattcgttatgcgaggtgcttggtgtagacttcaaacaaacagtaaatgaggtgcaccctagcctgggtgaggctgatggatcaaagaacctaagcaactgtacaattgaaagccttgcatcagctgcaagcagactgcgtgaattgaaagtccagaggatgcaaaagcttcaagatttggcctctagcatgcttgaactttggaatctcatggatacaccacttgaagaacagcagatgttccagaatgtaacgtgcaatattgctgcttctgaacatgaaataactgagcctaacacgctctctattgacttcctcagctacgtggaatctgaagttttaagactcgagcaacttaaagcgagcaagatgaaagaccttgttctaaaaaagaagacagaactggaagagcataggagacgtgctcatttgattggcgaggaaggctatgcagctgaatttagcgatgaggctattgaggcaggagctgttgatccttcgctggtgctggaacaaattgaggctcacattgccacagtgaaagaggaagcctttagcaggaaggatattctcgagaaggttgaaagatggttgaatgcatgtgaggaggaagcttggctggaagattacaacaaagatgacaatcgttataatgccgggaggggggcccacttgacactcaaaagggctgagaaagctcgtattttggttaacaagatcccaggactggtagatgttttaaccacaaaaattgtagcctgggaggcagaaagaggaaaggaattcacatacgacggtgtccgccttatgtcaatgcttgaagagtacatgatcgttcgccaggagaaagagctacagaagaagaggcaaagggatcagaagaaaatccaggatcaactcaaagctgagcaggaagcgctctatggatcaaaaccaagtccttctaagcctcaaagcacgaagaaggcgcctaggcactccatgggtggtgcgaaccgaagactgtctcttggtggagccactatgcaagcccccaaaacagatatactgcactccaagacagctcgtgccgccaagaaggctgaagatttgggcgctttatctcctagtagtagaggcttggacattgccggtcttcccatcaagaagttatctttcaacgcaagcactttgcgagaggcagaaacaccgcgcaagccttttgcccagatcatgccaggaaacaacgtctcaccgatgcctacgcggcccatctccagcgccacagaggaagagaacaaaacccccaggacatttgtaggagggctcaatgcgaaaacgccggcgacagtgacggctcctatgcagatggcgatgacaccagccgtggctaacaaggtcatagccactcctgcaacccttttccaggagaaggcagattcgccagcactgccagcggacatcgagtactcgttcgaagagaggcggctcgctgtttacctggccaggcaagtggcttaaactcggtcattcacgtagttgaaagctgaactgactgcgatttctcgtcagaggccaatgttacctgttggtcgatactcgatagtagtcggcctcgttcgtaccttgcagtactattctgattcatagccatatttgctacagctagtaaggatttatttgggtactctaatattgatctcaatccacatgtgttgaaatgaattggagtgtaaattaatttaagttacacttcaatctatctcaatacatgtggatttgggagttttagacccgtatcgtaagttgtatagcttcacctggttgcatcgtggatgacctgttattgtttattactgttatccaaatatcttgccgcatgttatgtttc

SEQ ID NO: 21435 - DNA, 935 bp, Zea mays
  Clone ID: LIB3332-042-C11_FLI
gccgcctcgccgacttcgcggcctcgctcggcctcccgttcgagttccgacccatcgaggggaagatcgggcacgtcgccgacgccgcggcgctcctcggctcgcgccagcggcggcgggatgacgaggccaccgtggtgcactggatgcaccactgcctctatgacgtgacggggtcggacgtgggcacggtgcggctgctccggagcctgcgcccgaagctgatcaccatcgtggaacaggacctgggccacagcggcgatttcctgggccggttcgtggaggcgctgcactactactcggcgctgttcgacgcgctgggagacggcgccggcgcggccgaggaggagtccgccgagcggtacgcggttgagcgacagctcctgggcgcggagatacgcaacatcgtggccgtaggggggcccaagcggacaggggaggtgcgcgtggagcggtggagccacgagctgcggcacgccgggttccggccagtgtccctggccgggagccctgccgcgcaggccaggctgctcctcggcatgtatccgtggaaggggtacacgctggtggaggaggacgcgtgccttaagctgggctggaaggacctctccctgctcaccgcgtcggcgtgggagccggcggacgacgctgccgcttctgcgcccaccggttaacgagtacaagacaagatttttgcagcaggtagattatgattttggaattcaatttcatgcctgctgccagcctcgcagccatccttggtggactggtcgtcttctcttcttgctgccgccctgctcgtgtaggcgtcttgtgagtttgtttttgtgatataatcgtataggcttcggcattcctttcgttctcctacctccagtatcaattaccaaatcaactttggattttgaatatttagtatactgcagctttgagtc

SEQ ID NO: 21436 - DNA, 1587 bp, Zea mays
  Clone ID: LIB3332-042-D11_FLI
gtcggcatctcaagcgcagcagcgatggtggacatcgaccaccggatggccgggctggccccgtcggtggcgcacaccgcggcgctgcgccgcctctcgacgcgcgccgccgcggggccgtcatcggcgtccgcgtcgccgcgccacggcctccactccttccacgccgtggctgcaggcgtgctctcccacctccgcgagtccggggtggccgtcctcccgggcctctcggacgcggagctggtccgcgcggaggccgagttcgggttcacgttcccgcccgacctccgcgcggtgctcgccctgggcgtgccgtcggggcccgggttcccggactggcgcggccgggccggcctccgcgccgcgttcgacctccccgcggcggcggcgtcgctccaggtcgcgaggggcgcgctgtggccgcggtgctggggccggcggccggccgacccgggccgcgcgctgcggctcgcgcgctccgccgtacgccgcgcgccgccgctcgtgccgctcttcgaccgctgctacctgccctgccgcccctgcctcgcggggaacccggtgttcttcgtcgccgacgaccgcgtcctctgctgcggcctcgacctgctctacttcttcacgcgcgactcctccttccagccggcggaccgcgccgtcgtctcctcctcgtccccgctctccgccggcgcgagcaggccgtcgtgcacgcgccggagcctcgacgccgtccaggccccgcgctggatcgagttctggagcgacgccgcgtcggaccgccgccgccgcgactcctcgtcctccgaagcatccaccgcctcctcgtcctcctcctcgtcgtcgtcctcaggatgcccatcgccaccccggcggccaaccccgcggtgggtcgacagctacctcgacgagctggggtcaatgctgaagaaagggggctggagggaccgagaagtggacgagatggtcgaggtcaccgcctccgggttcttggacgacggcgaggaggccccaacacccgactccgaggctatcctcgacgcgctggtcctcaagaccgaccggtgctcggactcgctccggcgcgccgggtggaccgccgaggacgtgtcggacgcgctggggctcgacttccggcgcggcgaggagcgctcccggtcggccgtgcggatcccgccggagatcgccgccaaggtccaacgcctcgcgcaagcgctggcgcgcccgtgacgtgacgtcgatcgatctcccccgttcccgccgccggaggcttcccattctttgtttatctccagtccgaatcgaactgcactagtataaaagtgagaaagtaaactaggccatgttcgcgcgagtgaattatgccgtgctcatgtgcgcgaagcaccgtgcgttgtaaggatacaggatcccagaagagaaatgagagctaaattagccgagaagacacatttgcagttaaaaacgctccatactctgcaacggactggtgaatcttttaaatgtttattttgagtgtgtaccgttattggataccccccgttcgttagtacgtccaagcttgaacaaccacggtgggtcggtgttcct

SEQ ID NO: 21437 - DNA, 817 bp, Zea mays
  Clone ID: LIB3332-042-H3_FLI
cgctggtgtacaccttggccaccgacggctcgccgttccgccttgagctgtttacgccgtggatggtggcaacactggctgatttttatgttaatgttattgcaatctcggcttgggttatctacaaggaagcaaactgggttagttctgctgtgtgggtggttctgttgttttgctttggcagatcctcttgaccttctatttatcaggcaaggtaatctatcccaaagaaagtgctcttatgttgtaattggaagggttattttcagcattttggggatattcatggctgcggttgtcacatatactgtcatcactgatggactaccttttaggaaggaattgttgacaccgtggatggcggcaaccttaattgatttctacataaatgtctttgcgatatcggtctgggttgctcacaaggaatcatcatggatatcaactaccatttggattgtcttgctgatatgctttggaagcatcacaacatgcggctacattgtcatccaacttttcaaagtatcatatcaagatccaatctaccacgtgctattgaactcccacagcaagaagatttgaaaatttattgaagttttatgtgcagcttggctggtaatattaaaatgttccttctatctatatgtaaggtaccacaattaaggggacaggaggatagcaattagacaagttgttttactttgaataaaataactcatgtgctgagttatctgctaaatgaactgtaacgtgaaatcctttattgtatttctgattgaaattgcttgaacaataatctcctttgttatggtttcattgc

SEQ ID NO: 21438 - DNA, 2617 bp, Zea mays
  Clone ID: LIB3332-043-D2_FLI
cccgtcccctcgtccccgtctcggtctcaaaagcctcgcacaccagtgcaccaccaccacgggccacggcaccatctccagactcccgaggggaccatcaccgccgcctgcccttccttctcccacctgcaccgccgcctccaattcccgcccgccccactgccattgtgcgcccccggaatggcgtcacgcggaggagatccggtaaaccaactctagctgaagtgacgagtggcagcattgttcaaccgtgcggcttctgcttggctggaattgtgatggatccagaaaaacaaaatgaaatgagcttgatggacaagagacaactagtatacgaagttgcaagatggccgcaaggtgccgtggagattcttaagtgctggactcgaagggaacttcttgagcttatctgtgttgagttgggcaaagagaggaagtataccaatgtcccaaaagctaagatgatcgcttatctcttgaaattagtttcacgaaagagtggaaagaatgggcaactcaaggatgataatgcaaatgttatgttattagagcaggataacaaagatgaaacacaaatgaaggaatctgaggaacaagaacaatcacgaccactcaaaactgcaaactctgactcatcaatacgtagagaggctcatgcctgttgttcagtggtgtgcagcaatgttgcatgccaagccacacggaatgcaggagataattattgcaaacgttgctcttgctgcatttgcaataaatatgatgataacaaagaccctagcttgtggttggtttgcagctctgataatccatacagtggttgttcatgtggtgtctcttgtcacctaaactgtgctctaaagaataaaaaggctggcattgtcaataatggctgcaacaagttagactgtagtttctactgtgttagctgtgggaaaatcaactggctaatgaggagtttgcagaaacaacttgcaattgctagggaggcaagaagagttgatgtgctttgtgagaggctgtcattgagccataaaatggtaaaaggatctgaacgttataaggaaataacgagcataatcagctcagctgcgaaaacacttgaaaaagaagttggtggtgcattagatcaggtttctgcgatcacggggcgtggcattgttaaccggcttacttgtggtgctgaagttcagaagctttgttcaagtgcattagaaattgtagactctacagtggatagcatcttggagttcgagtcaaataatagtccaaaactcttaggtccccagccccaaatcctttttgatgaaatcactccattttctgtggtaattgtgttgaactatcaggatagcatcggtaaggagcaggttgatggttccaaagtttggcaccgaagtgccaaggtttgcaactattcatcggagcccacatgccacatattgaggccaaatactaggagcctggtttctggtctgagcccttcaactgaatacttcttcaaggttttgccttttagcagcgtacaggggtttactgagtgggaggcaaaatgcagtacacgcagcctggaccatggcagcagccagtgctcaactcagaactctgagagcatgtgcctcaaagtggatccaatgcagcatcagaaaaaggatttgaatgtgcagaatcatcagagaactattcaatatgattcacctaaggggtctacaaattcaagtgagaacaatttattgtgtgaccggtattccaagcgggctaaggttgcaaggctagatggtgcaagtgacaatgatgaaagccagttgccgccaacttctgaagttttaccgtttgcaagctccaactactctccttccgaagctccaagtaaacctgacttgcttattggcaccccagattcggcatccaagaactatgtggagcagcagtacgagtactgtgtgaaggtggtcagatggttggagcatgaagggcacatggacaatgacttccgtgtgaagttcctcacttggttcagtctgaaggcaacagcgcaggacaggcgaatcgttggcgccttagtagatgttcttatcggtgatcctgcaagcttggttgcccaactggttgatgcattcaaggatatcatctacaccaaggagaagccctttcaaacacaacagaaggatgcacgctgcaagatttggcactagaaaccttcataactgctctgtgtcgctgtgtgacatcatttttctggtaattttctggcgactgaatgatgaactactgaagttatatcacctagcagattgcgtgcggattctgttgagatggatattgtgcactctcttaaaggttataagatgctgtagatgcttcatttggcattcaggtccatcagatctctcatttgttcattcaaattcagtcggtaggcagactattaatccatgaagacaatcatggtggaaccatgtgctggtaatcatgaatcggttctgagtttaggtttcgactagtaagtagttgaagcttgttagcagacaagcaactgtattcatatgtggaatgctatggtggatctgcaagctaactattgtgaattcatatcatgacttaagagatgtttattatt

SEQ ID NO: 21439 - DNA, 2878 bp, Zea mays
  Clone ID: LIB3332-043-D7_FLI
atttcaaatccgcgtcagagctcaggtctgggtctcctccttcgccgccagttgcctcctccagtcgagatccgccgtcggggagaccactgaccatggaggccatggaggagctatcggagctcgccgagtcgatgcgccaggcggcgtcactcctcgccgacgacgacccctccgacgacgcgggcgccgatagtggttgacctgcagagggagccggggctcagcagcaagtccatcgtgctgcagatcgacagcaagtcgcagcaggtttccgcaagtgctctccggcattcactgcaggacagactcagcaggggagcatctggtggatcagggaggggccgtgttgatgagatttacctcaaactgcggaccagtacagctccctcattaaagctgattgatttacctgggatagaccagcgagctgttgatgattccatgatcaatgagtatgctgggcacaatgatgcaatactgctcattgtcatacccgcaatgcaagctgctgatgttgcatcatctcgagctctgaggttggccaaggatatcgatgcagatgggacaagaacagttggtgttataagcaaagttgatcaagcaaatggagatgcaaaaactatagcctgtgttcaggccctactgtcaaacaagggcccaaaaaaccttcctgacattgagtgggttgctctaattggacaatctgttgcaattgcgtcagcacaatcagttgggtctgaaaactcactagaaacagcctggagagctgaagctgaaagcctgaaaaacatcttaactggatctcctcagaataagcttggtagaattgctttggttgacacaattgctaagcaaatccgtaaaagaatgaaagtgcgggttcctaacctattgagtggacttcagggtaagtctcaaatggtgcaagatgaactggcaaggctgggagaatctatggtacaaagtgccgaaggaacccgagcagttgctttggagctgtgccgagaatttgaggacaagtttcttgctcacataacatctggtgagggatctggttggaaaattgttgcaagttttgaaggcaagtttccagacagaattaaacagctaccgttggaccgacatttcgatctcaacaacgtcaaaaggattgtcttggaagcagatggttatcaaccatatttgatatctccagagaaagggttgagatccttaataaaaatagtactggaaatggcaaaggagccatcacgactatgtgttgaagaggttcatcgtgtattgttagacatagtcaatgcttccgcaaatgccacaccaggacttgggagatatcctccattcaagcgtgaggttgttgcaatagcatcaaatgcattggagaccttcaaaaacgacgccaaaaagatggtcgttgcgcttgttgatatggaacgtgcttttgttcctccccaacatttcatccgcttagtacaaagaagaatggaaagacagcgtcgggaggatgagttgagaaatcgatcttctaagaaaacacaagaagctgaacagccaacatctaagagggcctcaagtccccaaacagatgctgagcaaggtggtggcagcttaaaatcaatgaaagacaaatctggccagcaagataaagacacaaaagagggatcaaatttgcaagttgctggtcctgctggtgaaattactgcaggttaccttttaaagaaaagcacaaaaactaatgggtggagcaaaagatggtttgttcttaatgagaagagtggaaagcttgggtacacaaagaaacaagaggagagacattttcgtggtgtcatcactcttgaggagtgcaaccttgaggaggtagaggaggaagagccttctaaaagttcaaaggactcaaaaaaggcaaatggatcagaaaaaatctcaagtcttgtatttaagattactaatagggttgcatacaaaacggtcctcaaagctcacagtgctgttgtgttaaaggctgaaagcatggccgacaaggttgagtgggtaaataagatcaaagctgttattcagagcaaagggggttctttcaagggtccaagtactgagggtagttcaatgaggcaaagcaattcggatggcgctttagatactatggcacgtagacctgctgatcctgaagaagaacttagatggatgtctcaagaagttcgtggttatgtcgaggctgttttgaatagtctggcagcaaatgttccaaaggctattgtgctttgtcaagtggagaaagcaaaggaagacatgcttaaccagctatacagctcgataagcgggcaaagcaatgctaagattgaagagctgcttcaagaggaccataatgctaagcgcagaagggagaagtaccaaaaacaatcatctctcctgtcaaaacttactcgtcaactcagtatccatgataacagggcatctgtttcctcttattctaatgacaccactgaagccgagagccctcgaacaccaagccgctcaggtgaggactggaggtcagcttttgattccgcttcaaatggtcctgttgctggaagcacaaacagtcaatcaaggtccaaaagtgctgacggtcgcagtcggcgctatgagaacggggacgtgagctcaggtgccaattctggcagccggcgcacaccaaaccggttgccaccagcaccgccaaaatactaatcgtgctgattggtattcatgaacatttatgtattcttgcctggcacatgcgcccagatcggctgctagagattgtggtgtagtggatggagtatcgggtgattgcgtgaacattgtgttcgcaggtcgctgcgtctcagatgagctgtttatagaaaaatatacaggt

SEQ ID NO: 21440 - DNA, 1495 bp, Zea mays
  Clone ID: LIB3332-043-E6_FLI
ctccctccgagtccagggggcaggggcaccattaccgagtagtttaattagtgctagttgtattaccattgttagtgacttaattaccctcacgcgaagcaccctacctttgctagtcctcctacgtctcctcttcgcttaatcttggtgatttgattcttcacttcttgcgcgcattgcagagggtgctcggtctgcagctatcttaggttaaccagtcgtgtgtggtctatcggtttcgatatagtattactactgctctgttataatcagcggggaggaggaagatgacggtgacgccacggatcacggtgagcgacgggcggctgacggtgcgcggccgtacggtgctcaccggcgtgccggacaacgtgtcggcggcgcacgcggccggggcggggctcgtcgacggggccttcgtcggcgcccacgccggcgaggccaagagccaccacgtcttcaccttcggcacgctccgggactgccggttcctgtgcctgttccggttcaagctgtggtggatgacgcagcggatgggcgtctccggccgcgacgtccctctggagacccagttcatgctcgtcgaggtccctgccagtgacggcgacggcgacggcgacgacgcccccgcgtacgtggtgatgcttccgctgctggaggggcagtttcgggcggcgctgcaggggaacgaccgcgacgagctgcagatctgcatcgagagcggggacaaggaggtgcagacggaccaggccgcgcacatggtgtacctccacgccggcgacaaccccttcgacaccgtcaccgccgccgtcaaggcggtggagaagcacctgcagacgttccaccaccgcgacaagaagaagctgccgtcgttcctcgactggttcggctggtgcacctgggacgccttctacaccgacgtcaccgccgacggcgtcaagcacggccttcagagcctgtccaagggcggcgcgccgccgcggttcctcatcatcgacgacggctggcagcagatcgcctccgagaacaagcccgaccccaacgtcgccgtccaggagggcgcgcaattcgccagccggctgaccgggatcaaggagaacaccaagttccagaccaagcccgacggcgacggcgacggagagcaggcggcgggcgggctgaagcgactggtggccgagaccaaggacgcgcacggcgtgaagcaggtgtacgtgtggcacgccatggccgggtactggggcggcgtgacgccgacggcggggacggcgatggagcgctacgagccggcgctggcgtaccccgtgcagtccccgggcgtgacgggcaaccagccggacatcgtcatggactcgctatccgtcctggggctgggcctggtgcacccgcgccgggtgcgagacttctacggcgagctccacgcgtacctcgcctcctgcggcgtcgacggcgtcaaggtggacgtgcagaacatcatcgagacgctgggcgccggcca

SEQ ID NO: 21441 - DNA, 1245 bp, Zea mays
  Clone ID: LIB3332-043-G5_FLI
atcttcttcttcctccttcagtcacccggcctgtcgtgtcgatctcactctcagggtccggtccggtgcatcatatatacccttggtcgatcgatcgaccagatagatacactagatagctaggattgcattgtgttccaccaaaagccagccacaacacatcgacatgatgcaggacttgttctcggtcccttcgtgtttctcggcgggcgagaagcttccggacgtcccggcgtccgctgcggccaccaccaggtccgggcagagcgcggcgacgctggtctaccgcgcgggaatcgccggccacgaccgcctggtgacggtgacgtggtgcaggaacctgctcacccacgggctgaccgtgtcgatcgaagggtcggcgggcggcggcaaggacaagagcggcggcggcagggagtggggcgacgccgacggtggcgcggcctcgtcctccaacaagggctgcagcaccgcctgcaaggtggagatgcagccgtggcacttttggcgcaagtacggcgccaagcagttccacgtcgacggcagggccgtggacgtggtctgggacctcaggagcgcgaggtactccgacgagcccgagccgctgtccgactactacgtcgccgtggtgtcggacgaggaggtggtcctcctcctcggcaacctcaagaaggaggcgttccggcgcaccgggtcccggccgtcgctgcgggacgccgcactggtgtgcaagaaggagcacgtctttagcaagaagcggttcctcaccaaggccaggttccacgacaggggcaagctgcacgacatcagcatcgagtgcagcagcagcaacctcggcggcggcggcgtcgacgtcgacatggtcatcaagatcgacggctacgtcaacgtcctcgtcaggcacctgcagtggaagttcaggggcaacgagtgcatctccatcaaccagctcaaggtgcaggtgtactgggacgcgcacgactggatctttggcacgggggtgaggaacgcgctgttcatcttcaagcccgagccgctgccgtccgccaccaatgagtactctgatttctgcctgtttctgtacgcatggaagcttgagtgagctaggattcctgttcctgcattatactggacacctcaccatatatgttatgaaccaataattcatacgtatcatgtaactgatggattattgggcgatggaagtgtatgcgaaatgaatgattggggccgttttccctttcc

SEQ ID NO: 21442 - DNA, 691 bp, Zea mays
  Clone ID: LIB3332-045-B3_FLI
ctcttgagcagggaaaacgagagatccttggagtcagcaatggagtctaccgcgctaatgaccgcgagactaccactgctgacctctggctcccgttccaaacccctcccctttgcttccttcaccagggcggcttgccgtctcgcctccgcccccttctccggcagcggcagcgtcgtcctgctgtcgcgccggagccgcgactatgctggcgttggttccttggtctccgagtccatcctgctcagcgtccaggggatgatgtgcgacgggtgcgccgcgagcgtgaagcggatcctggagagccaacccgaggttacttctgctaccgttgattttaaggaagcaagcgcagtcgtgtggacaacagatgaggccaaggggacacaaggttggcagaagcagtatggagagaagcttgctaagcaccttggcacttgcggatttgagtctcgcctacaagatgatcaacgaacgatcacgtgaagttacatgctagaagccaaagctatgtgcaaacgatgatacagttattaaagttgactataaagtggaaactgccatgagaaaacgtctagctccggatccagatgttttttttttcacgagaagagataaagatgtgtgtgtttttttgctggatttggtttagtgtacaagatggatctaaatggaatcagcatttggtcat

SEQ ID NO: 21443 - DNA, 1495 bp, Zea mays
  Clone ID: LIB3332-045-E2_FLI
cattttgttagatagcacctcattttgtcgacctgcgcacgttcttctgtaaaaaaagtgacattaactccctcactccagtttattatcccatgatagaataactgtgaaaaatctgtcaaacccactgaacgctattatacataagctggcaaacaaatctcttaattgcactgcacccttttgtatattcagggaattgatacatagttaattcaggtggcacgtgacgcaagtcgaagtacatgtctgctggcagatgtctattcttattgtcttcagggtagctgatatataattttgttttgaaaagtagagaaaatccatgcgctacaaagaataactgctttggttccttcataacacatgtctggttcttaaatcggctggttcttaaatcaatggacccctgcatgtttttttttttccccagatgcactttacacaaaacattgatacaagtaataattaccaaaggtctacaacatcaaaaagaacaaaaaatacagggcctacaggaacaaataattccttttcctttgttgttgcggtctgataagctaacttcagaacaattgctgctgtttgcatgacattcgggctgtagaaccaagtcctgccaaatctgtctgttctcagctttttgcggcccttgtgtccatattgtgtccagacatcaatttattgttcacttcagatctctgccttgtcattatttttaaattatcagtgaggtcaatcgcattgcttctgtcaaatgcatcaggattggtggtccttgctgtatgttctgtcaaatgcttctgtcattatagcgggcagtcgttcccagtccacggcttaaattacgcgcacgattggtggtccttgccgtatcccgctgcaacgtggtggccgtggataggataggctcagatttacgatcattgggatttaaagaaaaaacacagtggaatgcatcgtaaattttgaaataaaggcataaatgttgggggccttcgtcctccgaaggtcctcaaaaacatgatttgacaatattttccaagtgaaatgtatgaacaggtatcttcggactcagattatgaacatgaagtacgatcaggacgaagcttaagctagacgaaggaggattgagatgaaggacgggctgatcaccaagctgtacgaaggatggtgcatagccgaagctatgcgcaggggagcttcggcatggtggcagaaaggggaaccgacttaaagatgaaaagactacttaggccttgacagatccccataagtcattagcaaatgtagtggacatgaatgtaattttacatgggctgcgtcccacgtctataaatagatgaacagtactcccgtactgttcacgctgacttggcatttgcttttgcgtcacacttgtattttcatctccttccaagtcgaaggtacatttgtaattcgatattgtctctatttttctatgatgatataataaagttaaattgatgatgtt

SEQ ID NO: 21444 - DNA, 977 bp, Zea mays
  Clone ID: LIB3332-045-F7_FLI
cccaagaagcgcgactgcgagaccgacgccgacgccgacgccgcgccgccgccggccgccaaggctcagctggtgggatggccgccggtgaggtcgtacaggaagagctgcttccagcagcaggcggcggccaagaacaagccggcggcagccctggcggaggaggccccggccgccggcgggttgttcgtgaaggtgagcatggacggcgccccctacctcaggaaggtggacctcaagatgtacaagggctaccgcgagctgcgggaggcgctggaggccatgttcctctgcttctccggcgccgccgacgcgcccgccgtcaacccctccgacttcgccgtcacctacgaggacaaggacggcgacctcatgctcgtcggcgacgtgcccttcggcatgttcatcagcacctgcaagaggctgaggatcatgaaagggtctgaagcgagagggctcggctcggccaagaacaactgatgatgaggcgtctatcgcatgcttgtgctgtgcgtgcgtgcatgcgccagcaaattcttttgttcttttggggtcttatttcttctccaaggcgtccctgcatgggtgtgggcgtgtggtgttgagtattatgtaccttctcccctagcattgtctgtgccaacaatggagcagcagctagcagcaaaccagagacatggcgaggcgaaagatgaagctgcttgcttggaaggagagagagagagagagagagagagagagagagagagagagagggaagctttgtgcatgcgtggaatgatgtgtggtcgctttgttctttttcttttgtgccccttgtaggggtgtgtgtgtgtgtgtttagcaagacatgcaaaaggagtggagagtcgagttgaatctccatgatgcgtggttgtacaaagccaaagatcactcttctttcttgtctatcagtctattgtctatctatcgatcagcagcctggtcgttgcttc

SEQ ID NO: 21445 - DNA, 2520 bp, Zea mays
  Clone ID: LIB3332-045-G11_FLI
cttccctcccctccgactccggccaacccgcccctccctcccaccgctcgtccgcccctcgcccgcaccaccggcgccggcaccggcgccggagcgcgacccggaggagcgtccgcacccgcgccgcgccagatctggccccgcccgcagctcccatgcccctccctccccagacccgcctgacctagctacgaccggccggccggacccgccccaccccccgccatggatgacgtgtccaagtatgcgcacagcccggcgcacctcgccgtcctgcggcgcgaccacgcggcgctgcgtcgactggtggcggccctcccgcgcctgccgcgcgccggggaggtggccaccgaggaggagtccgtcgcgggggaggccgtggcggacgcggtctcggccgtcatcgaccgccgcgacgtgccgcggagggagaccccgctccacctcgccgtgcgcctccgggaccccgtcgccgccgacatcctcatgtcggccggcgccgactggtcgctgcagaacgccgacggctggtccgcgctccaggaggccgtctgcacgcgcgaggaggccatcgccaccatcatcgcgcgccactaccagccgctcgcctgggccaagtggtgccgccgcctcccgcgcatcctcgcctccatctcccgcatccgcgacttctacatggagatctccttccacttcgagtcctccgtcatcccgttcatcggccgcatcgcgccctccgacacctaccgcatctggaagcgcggcgccgcgctccggaccgacatgacgctcgctggcttcgacggcttccgcatccagcgctcggaccagacgttcctcttcctcggtgacggcgccaggcccgaggatgccgggggcaaggagctgcactcgggctcgctaatagtgctggcgcacaaggataaggagattacggatgcgctggagggggcgggggtgcagcccacagagtctgaggtggcgcatgaggtagcgctcatgtccaagaccaacatgtaccgtccggggatcgacgtcacgcaggcagagctcgtgccgcacctgaattggcgccgccaagagaggacagaagccgtcgggcaatggaaagccaaggtgtatgacatgctgaatgtcctggtcaccgtgaagtctaggcgcgtgcctggggcgatgacagacgaggagctgtttgccatggatggggaggagaagaatgggaggggcgcagagcttgatgctgagttagacgaagtgttgacagccgaggagaggaagcaacttgattctgcgcttaggatggggaacaacgaagaggaatctgaggagaggggcgacgaaggtgatgctggtgctgatcatacggatgcgagtggcgtgaccaaagataagaagggatggtttggttggggcgccaagaaaggtgccaagggcgatgacaagccatcaaaggtggggagtaaggatgaaacaagtgacccagggaagcaaaaggagaagggcagtgggaagaagaaaaagggtggctcatctgctgagtctgtaaaacatgagagcgagtacaagaaggggttaagaccagtgttgtggttgacaccggatttccctctgaagacagatgaactcatccctctgcttgatgtcctagcaaacaaagtgaaggctatcaggaggcttagggaactcttgacaaccaaacttcctacaggcacatttccagtcaagatcgccatccctattgttccaacgatacgagtcatcatcacattcacaaagtttgaagaactacagcctctagacgagtttgccaccccaccttcaagcccgacacagtttcaagacgcgaaagccaaagaaccagaaggatcaggctcatggtattcatgggtaaagggtggccgaggtacgcagtccggtgacagtggtgatgggcggaactggaaagacgaggttgatccgttccacataccgtcggactacacctgggtcgatgccaccgagaagaagcggaggatgaaggcaaagaaagccaagagcaggcggaccacagcccgaaaacagtcctcgaagaacacttcttcggaaggaggccaccgccccatgatggatggcttcgaggagtaaaccgcgttctcacaagcatagtaagttgtatttgcattcttaaaatgttagttgttgatggcagctgcacgccagaggcagattgattgatgttgtgcctggagcaccccctcccttggcgtggcaatgaatcggagtcgaatctccttgagaacgtacaggatggcttatacccaccccactaatctgtaattcagccagcgctatttttttttgcccccctccgtgtttcatcttgctggatgtatcatgtatgtttgacagatgatgacgatgatacgaccctgttgttgaaaaaaaaatgtgtttgaggggactgtagtgttccctccccctgttgtaatggaagatttaccaatatgcagcgattttctcgcaaagaggaagctccaatgc

SEQ ID NO: 21446 - DNA, 1056 bp, Zea mays
  Clone ID: LIB3332-045-G6_FLI
cagtaagccaccagctgcagccgccagcacagcgcagggcagagggagagggagggcaccggcacaccatggccgtggggggccttctgcggggcctcgtttcgccccccgcctggctaccctgccatgagctcttcgcctcctggcaccactggcttccctccctcccgcgcctccgcccgcccgcatccgacggcttcaagcttctcttggtgctgctgctcttctccgccgctctagccgaggtccgctacatcgcctcctcctccatggcgcccacgcttcgtccaggcgaccgagccgtcgccgagaaggttacatacttgttccggaggccatctattggggatatagtgtttttcaaagtaccgactgctgtgcagaattatggtgtcaataaggatgttgtctttattaagagagtattggcaacaccaggagacttcattgaggtccgacaagggcagcttattgtaaatggtgtcgcactaaaggagcattacgcagcagcaacgtcattgtacacaatggaagcaatggtccagagatctttaaaagtcacaagaaagaagatgatcaaaaactggactggctgctccatgttgttgacttcttgagtgccccgttgtaatcaatcgatcaatgggcctcagatggtggatgatctttttcttattggatggatgggtgggtacctggatcctcagtcagctgaaagtaagtattctcgtactcctgcagcgccttcctgaaggtcacgtatttgtcatgggtgacaaccgcaataacagctgtgattctcgtgcctgggggcctcttcccgttgccaacatcgttggaaggtacatgacatcatttacaagatcctctttccagtaactggggttccactcaatgttcgtcctcataaatcaatcatagttagagagttgtggagccaggcggctgctatcttgtcaatttgtagcgatgtttgttgtatatgattctcacttaatttggacatgcatgattgtgtacttgtgttgttataaagtaagcatgttttgttgttgt

SEQ ID NO: 21447 - DNA, 1548 bp, Zea mays
  Clone ID: LIB3332-046-D8_FLI
aaaaccactcgttgcttctggaacaccaccgcgaaagcaaaggaataacgagccgaggaaatggccacgcggtcactcacctccgcacttccgctctccagaaccccgcgcgtcccctcgcatcgtccctctctccgccgactccaaaccctaacccgcgcgcttacctcctcgtcccctcaggccatggcgtcgtcccctacccccaagaaggtgctggtcccgatcgcgaatgggacggagccgatggaggcggtcatcaccatcgacgtgctccggcgcgcgggggccgatgtcgccgtcgcttccgtcgagccgggggcgacgtccgtagctgcctcatggggcatcaagcttaccgccgacgcgctcctcgccgacctcgcggacgatgagttcgatctcatctctctaccgggagggatgcctggttcttcgacttttggagagtgcaaagttttggagaaaatggtcaaaaaacatgtagagaagggcaagctttatgctgcaatttgcgctgcaccagcaatgactctaggaacttggggtttgctcaatggcttaaaggcaacatgttatccttcgttcattgataaacttccttcagaggtacatgctgtggaatcaagagtgcagattgatgggaagtgtatgaccagtcgtggaccgggaacagccatggagtattctgttattttggttgagcaactatatggaaaggaaaaagctaaagaagttgctgggccaatggttatgcgtcctcagcatggtgtggaattctctatgaaagaggtgaattcaactagttggaatgttggtgaaacaccaaatattctagtaccaatcgctaatgggacagaggagatggaagcaactatgatacttgacattttgcgtagggcgaaagcaaatgttgtggttgcctccttggaagacaagctagagattgttgcatccaggaaggtgaagatgattgctgatgtgctgttggatgatgctcttaaggagcaatatgatctcattctgttacctggaggtctgggtggtgcagaagcatatgcaaaatctgataaactaatggatctgatcaagaagcaagctgcggcaaatagattgtatggagctatatgtgcctcccctgcgattgctcttgaaccacatggcctactaaagggaaagaaagttacatcctatcctgctatgtggaacaaacttgcagaccaaagcgaatgcaacaacagagttattgttgatggtaacctaatcaccagccaaggtcctgggacttctatggaattctcgcttgccatagtggagaaactctttggacgggagagagcccttgagctggccaaatccatggtttttatttgagttgaaatggtacgtgtacgtattaggtttctggagtatgtacttgtgtaaatcgaggcatgctatgttctttttcttgtggaatgtacttcaaatccccttttaaatagaaataagacgaacgcttgtaatgtgtttcatatgcagtaaaaggtttgaggcaaacattaagcg

SEQ ID NO: 21448 - DNA, 1647 bp, Zea mays
  Clone ID: LIB3332-046-H12_FLI
cgtcttcgtactcgcctatctccgcgacccaaagcgttcccccttctcccattcttctctcatttctcaccaccgccgccgctaccccctttcgacaacaccatgagggagtgcatctcgatccacatcggccaggccggtatccaggtcggaaacgcgtgctgggagctgtactgcctcgagcatggcattcaggctgatggtcagatgcccggtgacaagaccattgggggaggtgatgatgctttcaacaccttcttcagtgagactggcgctgggaagcacgtcccccgtgctgtttttgttgaccttgagcccactgtcatcgatgaggtgaggactggcacctatcgccagctcttccatcctgagcagctcatcagtggcaaggaggatgcagccaacaacttcgctcgtggtcactacaccattggcaaggagattgttgacctgtgccttgaccgcatcaggaagcttgcagataattgcactggtctccagggcttcctcgtcttcaacgctgttggtggaggaacgggctctgggcttggttctctcctcctggagcgcctgtctgttgactatggcaagaagtccaagctcggtttcaccgtgtacccatccccccaggtgtccacatccgtggttgagccatacaacagtgtcctgtccacccactctctcctcgagcacactgatgttgctgtcctgctcgacaatgaggccatctatgacatctgccgccgctcccttgacattgagcgcccaacctacaccaacctcaacaggcttgtgtcccaggtcatctcatccctgactgcttccctgaggttcgatggtgctctgaacgttgatgtgaacgagttccagaccaacctggtgccctaccctaggatccacttcatgctttcgtcctacgctccagtcatttctgctgagaaggcctaccacgagcagctgtccgtggccgaaatcaccaacagcgccttcgagccatcctccatgatggccaagtgcgacccccgccatggcaagtacatggcatgctgcctcatgtaccgtggtgatgtggttcccaaggacgtgaacgctgctgtggccacaatcaagaccaagcgcaccatccagttcgtggactggtgcccgactggcttcaagtgcggaatcaactaccagcctcccagcgtcgtccccggcggtgacctggccaaggtgcagcgtgccgtgtgcatgatctccaactccaccagtgttgtggaggtcttctcccgcattgaccacaagttcgacctcatgtacgccaagcgcgccttcgtgcactggtacgtcggtgagggtatggaggagggcgagttctccgaggctcgtgaggatctggctgcgctcgagaaggactacgaggaggtcggtgctgagtttgacgagggtgaggacggcgacgagggtgacgagtactagacgctctactggcgcggcgtcgtcgggcttgtgtgccactgctatcctgtgatctgccctgagtggctcctatcgtgttatgtttctgtcggttcttatctatctgtcgttgtgtggtttacaacttacgttgtaagactttattcccccgctttgctactgggttattaagtttggcgttattgtttt

SEQ ID NO: 21449 - DNA, 1324 bp, Zea mays
  Clone ID: LIB3332-047-A10_FLI
aaaatctttggtggtggtgtctatattgtccagacctagttttgctacccaagaacatgagtacattgtagtacttcctggttctttgtgacacctgattaatttgtatatctttgcacttcaatactaactagacgctattgtttttgttcttttcacagggaaagaagataaaagtttctccctcccaggctaagaacaggctatttattgggaatgtaccccatgactggacacatgatgatttcaaaactgcagtggaagaagttggtcctggagttttaaaagttgaactcatgaaggcgccaggcttagatcgcaataagggttatggctttattgaatactacaaccaggcatgtgcagagtatgctaagcagaagatgtctaccccagaattcaaactagatacgaatgctcctactgtcagctgggcagatcctaagaatgccaatgaagctacatctactgcacaggttaaatctctatatgtcaaaaacctccccaagactgttactcaagagcagctgaaaaagctgtttgagcatgttggagaaattacaaaagttgttgttccacctgcaaaatctgggcatgaaaatcggtacggttttgttcattttaaggagcggtacatggctatgaaggctctgaagaacactgagagatatgaactcgatggtcagctgctggattgttcacttgcgaaacctcctgctgataagaaggatagtactgtatcaacacctactgcaaaaggaggcccgttactcccaagttatgccccacttggatatggactggtgggagcttataatccacgtggaaagggattggcagatgcttataataacccccttggaaatggactggcaggtgcttatggtgtgctttccgctcgtgctgcacagccaatggtgtatgctccaggtgctcctcccggctcaacaatgatcccaatggtcctaccagatggccgtcttgtatacgtaccacaggccgcggggcagcagcctgtgcatgcgacttcacctctgccacagcaaggtggtcgtcgattcggtggtagtggcagcggtggtggcggatccagctcttccggcggaaagcggcagaggggagatgaccatggtagtaacagcaacaacagccgcaggggccggcaccgtccgtattgatgattgcaatgccgctgattagcagttagaagttagaaccgagcagttagcacattcgtcgcagtaccatgctggaaacggtggtttgaattatttatttaccatgctggaaacggtggtttgaattgaataagacaaagtttttg

SEQ ID NO: 21450 - DNA, 1565 bp, Zea mays
  Clone ID: LIB3332-047-E10_FLI
gacggtgccgcaccgcccgcccgttttcttcctcagcgccggcacggcggcacatccactccaccgcaactgagccatctcttctccttcctcctccgcgcttctgaatgtgaggaggcttacaacgcccggtcccccctaaatccaaatccagcttccgctttgcagggcacgacccccttcgcaactgactgagtccaaatccaaatccagttaccccactcaacctcttttgatttgatttcgcaggatccatccgagaacaagcagccacttctccgatgccgtcctcaatggccaaatccctcctcctccctccccagttcgtctccgtctcaccccgccacccccaccgcgccggattccccgtcctcaagccccgccgcgcctcgctgctggcagccaccggtggagacgtcacgcccgcgccggacgccgacaacggctccaacaccaaccctctcgtcgaggtgccccgcgcgctctggcgccgcaccctgcagcctctcggcgactatggcttcggcaagcgcagcgtctgggagggcggcgtcggtctcttcatggtctccggggccgccctcctcgccctcgccctcgcatggcttaggggattccagctccgctcccgcttccgcaagtacaacaccgtcttcgagttcacgcaggcgtgtggcatctgcgtcggcacgcccgtccggatacgaggggtcaccgtcggctccgtcgtccgcgtcgactcctccctcaggagcgtcgatgccaccgttgaggttggagatgataagatcatcataccacggaattcagtggtcgaggttaatcagtcgggtcttctaatggagacactcattgatatcacacccaaggatccactccctgcaccttcagtaggaccacttgacccagactgcaccaaagaaggtttgattctctgtgacaaagagaggatgaaaggacagcaaggtgtaagcttagatgcattggtgggaatatttacccgactaggtagagacatggaggagattggcgttagcaaaagctataagttggctgaaaaggttgcatctataatggaagaggcacaacctcttcttacacggattgaggatttagctgaagaaatgcaacctttgctctctgaagtccgtgatagtgatctgctgaaggatgtggagactatagctaaaggcctggccgacgcgtctgttgacctaagaaggctgaagtcgtccatgctcaccccagagaacacggatcttattaagcagtctattttcacccttatatttaccctgaagaacattgagagtatcagctcggacatctctgggttcacgggtgatgagacgacaaggcagaacatcaagcttctgatcaagtctctcagcaggctattatgattgtttttcaatgtgcagaacagaatgatggattgctttgctttgctttgctttgtttgagacaggaattgatgctggtagagtagggtgactgtgtgtgtcttggtggcacagaggtgtaggaagagtagcagctaattaatgttccacaaggttttggtt

SEQ ID NO: 21451 - DNA, 1116 bp, Zea mays
  Clone ID: LIB3332-048-F9_FLI
cacataatatggcgcagctgccgcccagggtcccgaccgcggtgcaccgctggccggagggcggccaccacggcgcggcggcgtgggccgatgacttcgccgagttcgctgcgtcgcggcggggcgcgcaccgcaggtccctgagcgactcggtcgccttcgtcgaggtggcgcccgcggccggcgagttcgacaggctcgacgacgaccagctcatgtccatgttccccgacgaggccgccgccggcggcggcggcggcgggtcgtccgcggcagggtccgagaacaacggcggcagcagcgacagttacggcgataggcgcggcggcggtggccctgcggcgggaggcaccagcaccaccaccagctgcaatggcttcgatggtggcgagcacaacgaagccgcggacgcgcaggcgacggggcaagctgccgccgccgccgccgcctccacggagctgatccgggaccccaagagggtgaagaggatccttgccaaccggcagtcagctcagaggtcgcgggtgaggaagctgcagtacatctccgagctcgagcgcagcgtcacaacactgcagaacgaggtgtccgcgctgtctccccgtgtggcatttctggatcagcagcgtaccatactgaccgtcggcaacagccacctcaagcagcggatcgcagctcttgctcaggacaagattttcaaggatgctcatcaagaggcgttgaagaaggagatcgagaggctgcgccaggtctacgagcagcagaacctcaagatgtcagccggcgctgctgcctctgaccatggcccgccaccggtgcgcgcggagaaagagctcatgagctagctacccagtcgatccacgcgtgcccgctgtgcagtgcagcccgcccgccttatcattaattaacatggagggaacattgcatcatgatttctctttttttcggattatgtggatgttttcttctttctttctttcttcttccattgacacgtgtgcgttaattctttgtatgttgattttgggatttggttcactgtgcaaattgtggtaaagtcatcagggaaactgatctgttgtgtaaatcacttttttgaagcattacattcctggg

SEQ ID NO: 21452 - DNA, 1793 bp, Triticum aestivum
  Clone ID: LIB3350-031-A3_FLI
catcttatgcctttccactcagcctgacaatggcagcgaaggcaagatcattcaatcagataaacatcaatgcaaccagttcctccaaattcagtttcaagctccatcttcctccaagaagcacttcacttcatgccaagaaatccacgcccagcctcgtacggtgcgctccgacgagcaccagcaccgtgttcaaggacaaggatcccttcagcctcgagcgatacatggcgtccaaggcaatgaccgtgaatgaagcgctcgaccgcgctctgccgcttggccaccccgagcgcctctttgagtccatgcgctactcgctcttcgcggggggcaagcgggtgcgccccatgcttacgcttgctgcgtgcgagctagtgggcggcgatgaggccgctgccctgccggtggcctatgccgtcgagatggtccataccatgtcgctcatccacgacgacctcccttgcatggacgacgaccacctccggcgcgaccgccccacaaaccacgtcgtctttggcgtcagcatcgcgctgctcgcgggggacgcgctcctggcgcgtgcgttcgagcacgttgcccggggatgcacggagcatggcatgccggcgaactgcgcactccgtgctgtggcagagctcgccagcgccgtgggcacggacgggctcgtggcagggcaggtcgtggaccttgccagcgatggcacagacgtcgacctggccacgctagagtacatccacgtgcacaagacggcacgactcctagaggccgcggcggtgtgcggcgccatcgtctccggtggagccgatgaagagatcgagggcatccggcggtacgcgcgttatgtcggcctgctattccaggtagtggatgacgtgctggacgtgacgcgcgcgtccgagcagctggggaagacggcagggaaggacattgcgaccgacaaggcaacgtacccgaagctgatgggcatggacgggaccctcgcgtacgcggcacagcttgtggcgagcgctgaggcagagctagaccgcttcgacggtacttgtacagagcctctgcgtcacctcgcgcacttcattgcctaccggcagcactgattgatcagtgcaatcggccaattaaaagattgacggtgcttgaggaggtcagtgatagtgcagtacgatggggccgcttcaatacccagtcagcgcaccggttgcggggatgcagcagcttcagctcccggcctatagctttgaccagcagatctatatgtgcgggatgtggcggtggcagctgaaagggagggctcagtacaagcttccgaacagtccataggcaagatggacctagagctcctggatggacacgcagtgaaacaacatgcaactcaaggcgccatacgaaggattgagtaagcgcacaagatgctgcaccatttgtcggcggcagggacccaagaggatgacttgcccggatcgaggagatgttccaaagcaaccttggaaacctgttcagtgcaagaactgtggcgtcgagggtcaccggcgaaacaactgtgccaaagctgcagaactaaaactccaagagggctgctgaaattgcagctaagacaagatcagtgcatctgatgagaataatgcatgttgaaagctgaactgttttgctatgctgctttactgactaattagatcaagtgatgaactgttaagaaccaatttatgttcgtttgttgaggtgtgttgttgtgcagaattattttgtaactatcatttcggatgatactagattaaagaccactgtattttctc

SEQ ID NO: 21453 - DNA, 1592 bp, Triticum aestivum
  Clone ID: LIB3350-046-F10_FLI
cccaactctcgggcaccacctagcacatcatctccaggggggttaaataataggaggtttgatttgagagcaccggcaagccatcaaggacatcaaagaagagatgcccttgctagctcagaccctcccaatccccctctacagtcgggtaatgttattgctcggaagaggcgagttcaagcgcagtttaacgagcttcaagaatactatttgcaaagacggcgtactggagcgcagtctcacaggcaggaggatgctgttacgatgaatagagaaggttatcatgaaggtcttgaagattttcagtctgtgcttacaacattcactcgatatagtcgcttacgtgtaattgcggaacttagacatggagatctgttccactcagcaaatattgtatccagtatcgaatttgaccgtgatgatgagctattcgctactgctggagtctcgaagcgtattaaagtcttcgaattttctacagttgttaatgagccatcagatgtccactgtccagttgttgaaatggctaccagatctaaactcagctgccttagctggaacaagtactcaaaaaatgttatagcaagtagtgattatgaaggcatagttactgtttgggatgttcaaacccgccagagtgtaatggagtatgaagagcatgagaaaagagcatggagtgttgatttttcacgtacagagcccaagatgctagtatctggtagtgatgattgcaaggtcaaagtgtggtgcacaaatcaggaagcaagtgccattaacattgatatgaaggcaaatatttgctctgttaaatataatcctggatcgagctactatgtcgcagtcggatctgctgatcaccatattcattattttgatttacgaaatccaagtgcacctctccatgtttttggtgggcacaagaaagctgtttcttatgtgaaattcttatcaaataatgagcttgcatctgcatcgaccgatagcacgttacggttatgggatgtcaaggacaattgcccactaaggactttcagagggcacaaaaatgagaagaacttcgtaggactatctgtaaataacgaatatattgcttgcgggagtgaaacaaatgaggtttttgtttaccacaaggctatctcaaaacctgcttccagccatcggtttctatccacggacctggacgacgccgaggatgatcccgggtcttatttcatcagcgctgtctgctggaagagcgatagccctactatgctaactgctaacagccaggggaccattaaagttctcgtgctcgccccttgagtgtgatcaggggagatctgtagctagcttgtatatcctatgtatcccgtcgtttcattgttgtgccattatatgtcccgaagtgggagtggaggcatattgatctccagcctagggtgcgaaatttttgtggaggtaatcgtctgacgtagggttccaagggctcggaatgtgcatagtgggggtgaccctgttgtataggtgcaaagcagtcggcttgtctattatagtactactacatctgtaacgtgagaaataaatcttgaataaagagtccggcttggtttctg

SEQ ID NO: 21454 - DNA, 1094 bp, Zea mays; identical to SEQ ID NO: 15618
  Clone ID: LIB3353-001-A12_FLI

SEQ ID NO: 21455 - DNA, 770 bp, Zea mays
  Clone ID: LIB3353-001-E11_FLI
cctcctcccaccccccacacctgccctccccgccgccgcggaccccctcccatggcaaagctcccgcgtctacgctgtccgtttgccgtgctcgcgctcgtgtgcatcctcccgctctttgcgccgcggcccgccctgtcctcccgcgccgcgccgaaggacggtgtctccttcgccggcgcaggcaacacgatacatcaactccttaaagatcacggccttcccggaggactgctcccgcgcggcgtggagtcgtacaccctggacgaatcaagcggtctgctgcaggcgcggctgtcggcgccgtgctacgccaagtacgacaacggcgacctggcctacttcgacaacgtggtccgcggcaacctgagcaagggtgcgctccgcggcgtggagggcctctcccaggaggagctcttcgtctggctccccgtcaagggcatactcgtccaggaccaggagcccggggtcatcctgttcgacatcggcttcgcccacaagagcctctcgaggtcgctcttcgaggacccgccggactgcaagccgtcggccgccagcgggatgagcgccgccgccgccgccaggtggaaggttaggcaaggtgttactggtctgaggttgaggcgagaggtagcagcagacagcgacgagcatcaggagcagaggtgagggagggagacaatgcaacaccccgagacgacgccgaattccggtttcccgctttgtaaaatcctgtggtgagtgagagagagagagagtgctgccgcaac

SEQ ID NO: 21456 - DNA, 1971 bp, Zea mays
  Clone ID: LIB3353-001-F5_FLI
ccaaattcccaaagctctcgcgcgcggtgccatggcggagcgcctcgccgcctccctcctccctgccgcctcgccgtccccgtccgcccgccgcgcaacggtcgcagccgcagccgccgcctctttcccctccccatgctccgcccgcgcggggctgcgcctacgctcccgcccgcccctcttctcgcagaaggcggccgggcgcgggtgtggcctgcgggtggtgcggtgcatggcagcgtcggacgcggcgcagctcaaggccgcgcgggaggacatcaaggaactccttaagagcacatactgccaccccatcatggtccgtctggggtggcatgattctggtacctatgacaaggatattaaggactggccacagcgaggtggagctaatggaagtttaaggttcgatgctgagctgagtcatggagccaatgccggcctgattaatgcattgaagcttatccagcctatcaaggacaaatacccaggtatcacttatgcagatttgttccagttagcaagtgctacggcgattgaggaagctggtggtccaaaacttccaatgaaatatggacgtgttgatgtcacagcagctgaacagtgtccgcccgaggggaggcttcctgatgctggcccacgtgatcctgctgaacaccttagggaggtattttatagaatgggccttgatgacaaggaaattgttgcactatctggagcacacacacttggaagagcaaggcctgaccggagtggctggggaaagctagaaacaaaatatactaaggatgggcctggtgagcctggagggcaatcatggacagttgagtggttgaagtttgataatagttacttcaaggacatgaagtttttgagccagcttccctggaaagagcagaaggaacaggatcttctagttttgcctacagatgctgcattatttgaggacccatcgttcaaggtatacgcagaaaagtatgcagatgaccaggaagcgttctttaaagactatggtgaagctcatgctaagctgagcgatcttggtgcaaagtttgatcctcctgagggattctcactcgacgatgacacaagctcttcaccttccgacgagaagacggaagaacctacactggtagcggtaggagcggcagtagcaacagcgacagcggacgacaacaacggcgcagctccgcagccggagcccttcgtcgctgccaaatactcgtatggaaagagggagttgtcggatgcgatgaagcaaaagatcagggcggagtacgaggggtttggaggcagcccggacaagcccatgcagtccaactacttcctcaacatcatgatcctgattgcggggttggcgttcttgacatctctgcttgggaactgagtgttatatcatcatatgattatgatccgatttctgaagtctacgagtgtccactattgcaaactctgtaaacgtatgaaacatatctacgactagcattagagctacgtacactgtgcaaacagtttttttttttttcgcgaattttggagagagacgagcaaaagaaatgtataacgagtgttggagaaatagcgacctgactatcaacacactgttgctgccgatcctccggttgctaatcactatgttgaaaaccgacgacggggctatatacggaggcgcgaatgatctgcgacctggcacatgggctggtttcttgtctgatgagccggacggttcgtttctgatggccggacggtccgtgcgtgcgcaaaaacgacggagttcaccggcagcgcctagatctcgctcctgggatcccgtcggggaggagagaccctaggctttgtcttaggatcggcaggtcactcaagacgtctctagtcgacgtagagccgaagagaggtaaagatttgatggagagaaagactaaactagaactacttctaacgcataagataaaaacgaggtgtatattgagt

SEQ ID NO: 21457 - DNA, 2177 bp, Zea mays
  Clone ID: LIB3353-002-E9_FLI
caggctcactgctgaaataaagaggagagacatgtaatttcacagctagttttagcacatgaatctataaattttacgagaaagataagttcgattggtcatataatatcaataaagagctaaataacatatagatagactgaaagattgctgcagtacagctgtgatttgaggggcgtgttagttggggttggggcgcgtgtgcgctccatttcacttcaccgttcgagtgggcaaaaagcagaatcctgcctttccaactccaagggggagttgccattcctgtcatccggtgtggcctttgggagagggagagagaaggaaggggaggcttcttccgttccggcagcggctccctccgctttcggttctttgcaagatcgagcgagcgcaatcatcgatcgctgccatcatcaccaggcaagcatggcattagcggatggagaggcggattattcttcttgggacagtgacgacgagtaccagaaattcatccaaaacatgaaccctccaagggtcaccatcgacaacacatcatgtccaaatgctacagtcatccatgtggacagcgcgaacaagtatgggatactgttggaggtagtgcaggtcctcaccgacctcaagctcatagtcaagaaggcatacatatcctcagacgggggatggttcatggacgtcttcactgtgacgaaccaaagtgggcacaagataacggacgaatctgtgctgcaaggaataaaagactacatttacaagtctatcgggcctgactcctgcttccttccctcgcggaggagagccgtcggggtggagccgtcctccgaccacaccctgatagagctaacggggaccgacaggccgggcctcctctcggaggtgagcgcggtgctcacgagcctggagtgcaacgtggtgagcgcggagctgtggacgcacaacgggagagccgccgccgtgatgcaggtcaccgacagggagtccgggctggcggtctcggacgcggagagggtcggcaggatcaaggggcggctctacaacgtgttcagagggaggagccgggacgccaagaccgcggtcgcgacgacgggcgccacccacccggagcggaggctgcaccagatgatgttcgaggaccgggactacgagaggcgcggcaaggacgatggcagggcggcggcgagcggcagcaaccccggtccggtggtttcggtcgtgaactggcttcagaaatactactccgtggtgacggtccggtgcagggaccggcccaagctcctgttcgacacggtgtgcaccctgacggacatgcagtacgtggtgttccatggcagcgtggataccgagggccccgaagcttaccaggactactacatcaggcacatcgatgggtgtcccgtcaattcggaggccgagaggaagaggatcatccagtgccttgaagcagccatagaacggagagtgtccgagggcctgaagctagagctgtcgacaggcgacagggtgggtctgctgtcggacgtgacgcgcatcttccgcgagaacggcctgacggtgacgagagcggaggtctcgaccaggggcgacgaggcggtcaacaccttctacgtccgcgacgcggccgggagcgccgtcgagctgaggacgctggaggccatccgccaggagattggccagaccgttctccaggtgaaggggcaccccgagcagccgaagccgccggtagccgcgcaggactcgcccaccaggttcctcttcagcagcctgttgttcagaccgaggtcgctgtgcaacctcgggccctgatgatgagttccagctccagttccagctagcgcagcgcgtgcatgagaattgagaactgtctgttgtcgggagatgctgctgtaccccaagggcccaagggcaagagttgtacaacgcgatcaggagtgttcattcgtcagaagctcagaacaggtgaccagaagtcgtttaaagcgaagcccacacccaacagctggtgaatactgaatacaccctatagcatcgtccaccgttgagtagtgaaaggtgtagttctgtaaggctatctccagtcctgtcgacatggtggtgccccattgcaagtatgattcattcaagcttgctgtaaatactgcctcccacggccatctccatctatttattctctagacatc

SEQ ID NO: 21458 - DNA, 923 bp, Zea mays
  Clone ID: LIB3353-003-C5_FLI
gtcgcgtttgcagctaggcagatctgagttagccggcggatccgatccgtgcgcgtgcgcagtgtgtgtgtgtgtgtgtgtgtgtgtgtgtgtcggtggagagatggccacagcttacgctcccatggcgagccaggtgatgaagagcagcctcgtcgtgcactcgaggccgaggggcctgtcaggcgctgctgcgctcacgaggcggcccggccggttcaccgtcaaggccatccagcccgagaaggcaacgtaccaggtggtgcagcccatcaacggcgaccccttcatcggcagcctggagacgccggtcacctcgagcccgctcgtggcgtggtacctctccaaccttccggcctaccgcaccgccgtgagcccgctgctgcggggcgtcgaggtcggcctcgcgcacggctacctcctcgtggggcccttcgcgctcacgggcccgctccgcagcacgcccgtgcacggccaggccggcgcgctcggcgccgccggcctcgtcgccatcctcagcgtctgcctcaccatgtacggcgtcgcctccttcaacgagggggacccgtccacggcgccctcgctcacgctcaccggcaggaagaaggaggccgacaagctgcagacctccgacggctgggccaagttcaccgggggattcttcttcggcggcatctccggcgtgctctgggcctactttctcctctacgtgctcgacctcccctacttcttcaagtagaaatcatcaaagatgcgtatatatatagctccggccgatcctcctctctagctgcatggtatgtaggtggtgtggtccttgtttcatttcactccagcggtgatcagcgccgtgtataaatgtaattcctctgctttgcacatggatggattgggatgtaacctgttcaacttttttttacctt

SEQ ID NO: 21459 - DNA, 1479 bp, Zea mays
  Clone ID: LIB3353-003-D4_FLI
ttatgcttaactcccgcaccgttgggatgaagaaaacattgatatttcatgaaggcaaggcccctaagggcgacagaactgattgggtgatgtatgaatacagaatggaagatgaggatttggtttctgctggtttctcaaaggatgcttatgtactctgcaaaattttcaagaaaagtggccttggtccaagaatcggagagcaatatggggctccatttaatgaagacgaatgggataatgcagaagtcgaaacttctctgtttcctttgacttgttcagaagtgaatccaacagagggacaacgtgctcagcctactgtcctggctggtgctcttctggaacccgaaccacctctacataattcatcttctacatgtgctggagaggaatcatcatttggtcatgccactgctgaggacttaacttttagccatagtgttgctagctctgctatccaagatacacctgctcggatgtcaggagacggtgtggtttctgtgaacaacatatccaatgtggccaatgacatgcgtagtcctcgtgactgtgatgaatttctatcggagttgtctagatttatgaatgattctcctctgcgtaacactcctcttggagagtgctctggtcttcctccgatgtctgaagctgaggctcatgcttttgaagtcaactcttttggcctctacaatgaattatcagagcttgttgggttaggatgcgcggataacaacttaaacaccagcaatgtggaaactacggattatctcatgttgccacctgacagagaactgtcggctaatgattacatggaactaaacgatctccttgctcctgacccaagcttccccagtgaattttctgctcaggacaatcaatatatgcagcatcctcttgctcagtacaatggacattatgatctgtcaggtccttcggagccaacaatgcctagcattttcgatgtttttcctcccaataatggagtcctcgcaacagatgatccagccaactacttggacccagccatgcagttccctttctcatgattggttaccatttgtcatggaggtacggatgtttatacctgctctttttgtgcttgaacttgtctggactgcttcggtgttgcaacttgcagctcgctgttgctacaactctatccaccctgaacgtcaaggacgtcattgatgtcatgcctgggctcatgaaatcgtctgttgctcttctgaaccaagccgaccttggctggtatttcttggaagcacggtgcttggaacaatctgcatcgactgctgtatgctcccaactggttgagctaacggccaatctcggctcactctgctgaggagatcatagcctgtaaatctttgattatgctgttacttgtgtgtatcgcaacctgcctgattaccattgtcttgtgttgagttttgacaatatgcaaaccataataatgtcgtaatatggaactcgtttatc

SEQ ID NO: 21460 - DNA, 1128 bp, Zea mays
  Clone ID: LIB3353-003-H4_FLI
ccaaaaaggggttcgccgcaggccgcacacggcacaccccctacacgtcccaagtcccccatggagctaccagcaccgtcctccgcatccttcttcctcgtcgccgttgtggctggtgccactctctttctcgtaaccgttctccggctccgcgcgcgatcgacgcgcaagtacaggctcccaccaggcccacggccatggccggtgatcggcaacctgaacctgatcggcccgctgcctcaccactccgtccacgagctctccaagaggatttcgtcgccatggacatgatggacgtgctcttggagctcgctgacgaccccagccagctcgaggtccccatcacgcgggataatgtgaaggggttcactctagacctgatgggcggcggcaccgacacctcggcggtgactgtggagtgggccatgtcagagctcctgaggaacccagaggtcctcgccaaggccaccgaggagctggaccgtgtcgtcggccgcgaccgtcttgtggcagagggggacatcccaagcctcccgtacctggacgccgtcgtgaaggagaccttgcgcctgcacccagtcgcgccgctcctgactccgcggctgtgtcgggaggacgtgtccgtgggcggctacgacatcccggcgggcgcgcgcgtcttcgtcaacgcctgggccatcggccgtgacccggcggtgtgggaagctcccctggagttccggccggagcggttcgccgggagcagcgtggacgtaaaagggcagcacttcgagctgctgccgttcggctccggccgccgtatgtgccccggcatgggcctcgccctcaggatggtgcctacgatcctgggcaacctgctgcacgccttcgcttggcggctccccgacggcgtggcggccgaggagctgggcatggaagaaacgttcgggctcaccgtgccgcgcttggttccgctccaggccgtcgctgagcccaagcttcctgctcgcctgtatgctgccctgtgatgcatggaagcctatcttgttctgcttaatatttttctcttagtaattaagtggtttattagtcgtttagaacatcgtatcctgggactatcatctgaataaagcattgcacgtgatagct

SEQ ID NO: 21461 - DNA, 1202 bp, Zea mays
  Clone ID: LIB3353-004-A1_FLI
gccatggctctcgtcgccggctcctacgagcgcttcatctggggcttctcactcaaaaccctgacaaccccctccgccaccggcgcctcgccctccgagaccctgaccctcgcgccgctcttctcgtacccggcccacacgggcccggtgcgctgcgtggccgcggcgccgcgggcggggctggtggcctccggcggcgcggacaactccgtccgcctctacgacctcccttccgccgcggacctcggcccgctcctggacccctcggccgccgtctccgcactcgccttctactcccggggccccgtgccgcggaacctcctggccgcctgcgacgacggctcgctccacatctacgacgccgacggcttcgcgctgctctccacgctccgcgccttcccgcgccacgaggccgccgaggcgctcgccgtgcacccgtcgggccgggtcgcgctcgccgtcggccgcgcgggggcgcttgccatgctcaacctcgtccgcggccgacgcagcttcgcatgccgcctcgagcaccctgcgtccgcgatcgcctacgctgaggacagggatggcggggaccgattcgtgatggctgccgagaacaaggtcagcgtgcacgactccgtggatgccagggttattcatgatatggactgtggcaagaaggtgctcgccatggcgcccgcaaagagtggggtcctttacactggtggcgaggaccgttgtattactgcatgggatctgtccagcggcaaggtctcctcacgcattgagggtgcccatgcaactcgtgtaaaaggggttgttgtttttggtaatagcaatgatggatcacagctctccaatctaatttcttctgcttcgtccgatggtgtcataaggatatgggacattcgaacaatcgggaacggaaagcctactccattagcagaggctaatacaaaagcaaggctaacttgtcttgctggaacgtcactgaaatgactcaaggaacctacagtttgctaggcgtctgattctgcattgttagctgaattagaaaacctggacatgaaagaagaaattgaaggtgaaagatctggcacgcgagcattatctgtgtgcgtttggaacgtatccatccattatgtacaccgacatagttttggcttagtgtctgagctgcataacttatttatatttgattgcgcgacaagttttgc

SEQ ID NO: 21462 - DNA, 736 bp, Zea mays
  Clone ID: LIB3353-005-C9_FLI
ctggcttctcctccccctcttatcaagtcctcctcgggttagggttccttagggttttgtggaggggcgatggcggcggctgatgtggagtaccgttgcttcgtcggcggacttgcctgggccaccagcaacgagtcgctggagaatgccttcgcctcctacggcgagatcctcgactccaaggtcatcaccgaccgggagacggggaggtcccgcggcttcggcttcgttaccttctcctccgagaactccatgctcgacgctatcgagaacatgaacggcaaggagctcgacggccgtaacatcaccgttaaccaggcccagtcccgtggcggcggcggcggcggcggcggcggtggctacggcggcggtcgcggcggcggcggctatggtggcgggcgccgtgacggcggttatggcggcggtggcggctacggcggtcggcgcgagggtggtggcggcggctacggaggcggtggcggctacggcggtcggcgcgagggtggtggtggcggctacggcggcggcggcggcggctggagggactgatgtgtggccccatcctggcttcggccgagttatcttatctatctatagtatcgtgttaccgttcgcttctgtcaccgtgttagtgtccgttctacctttggattaggtgttggtaccccttttgttcgctttggttgctcccgctatgaaacgagacgagagaagaatgagcaaggtttttgttcgc

SEQ ID NO: 21463 - DNA, 1134 bp, Zea mays
  Clone ID: LIB3353-006-A12_FLI
tgcttctccatccttccacgaattacacgagggaagaacgctgatgaacaaatggcgtaaatctctatcgacgaagctgtggaggaaaacgaaggatctccccgtgcttgtgcatgccagatcgcctgctctacgtccgcatcccgtccctcgcgaaactcggcactcccaggactgtaggtgtgcaaaattcatggcttcagacacccgcaagaagctcattcagatcgatgtgagctcggatacagtgtgcccttggtgctttgtcggtaaaaagaaccttgagaaagcaatggagcaaagcaagggcaagtttgatttcgaggtccgttggcatccattctttctgaaccccgacgcgcctaaggagggcgtcaagaaatctgacttcttcaagatgaagttcggtcctgtccaatatgagggtgcgatgtctcgcatgactgagatatttcgaggactcgggcttgaatacgacatgtcaggattgacagggaacacgatggatagtcataggctcataacacttgctggacaccaaggctatgacaagcaaaatgttcttgttgaagaattgttcctcaattaccattgccaaggaaagtacattggtgacaagcaggttttgctggatgctgcaagaaaggtgggcatagaaggggccgaggaactgcttgaagatcctatcaaaggagtcgatgaggttcaggaagagctcaagaagtactcatcggacatctccggggtcccacactttgtgatcaataataaatatcaactcagtgggggccagccaccaaatgaattcacgagggcgtttgagatggctgcaaaagatggaacttaatggcgcttatttgcgagaaaaactgtggaacccgttgtgtttcgtagttttgatgtggtgataattagtggtgaagatggtgtggatgttcactttcgaatagagttctaggtgattggatatggaacatgggttatgtcctgtaaatagaggccagtctgtatatttgatttgatttcaaccgaaagctgtggttttcagaacctgagatttcagcatgaaaacctattgtaagcacccctgcggacattaacatcgagaaagaatctataaaaataaattttcgc

SEQ ID NO: 21464 - DNA, 770 bp, Zea mays
  Clone ID: LIB3353-006-B2_FLI
cgcaattgctcccagcagttgaggagtgcctctttggtccttttcgcatggcttggcaagattacactagagacttatatctctcagatccatatttggcttaggtctagcatgccaaatggacagccaaaatggcttctttgtttcataccagattatcctatgcttaacttcatgcttactacggcgatctatcttcttctatcataccgtgtgtttgagatcacgaatgtcttgaagtcggcttttatccccagtagggataatagccgtctgtaccaaaatttcgttgctgggatcgccatctcagtgtgcctgtatctctgctcacttattcttctgaagattcctgttgtatagggatgaacatacaccaagcaatcttgatagtagaaggtttcttgtaaagtgtttgcttgataggatgtttccagctctggcctggattcccttttgcttggtaggattcgaacatatacggggaactgagagattcaattgccagaggctgcatatacagaaatccgatttttgatctctttgttggttcaaaacactctgctgtatgtatacaacaagtaggcaatcagcgcattcttttggaagctgtagcaactactactcgccagcctcgtgtaagagttatcctgtagaaccgcaccgtgtcgtgttgtaccataggtagtttggtgctgtacaaaaaacgacgggcttttcctcttccttgaaaagaagaatatataaaggcagaggtgcagggccctttcttc

SEQ ID NO: 21465 - DNA, 1020 bp, Zea mays
  Clone ID: LIB3353-008-A6_FLI
ccatccactactttactcaaagtctagagctagctttttgctttgctcaccagacaaaccgcagcagatggcgtcgacgatcatggccgccacctcccgcatcgtcgcggccaagacgccgtttcttggccagggtcgcgccgccgccgccgccgccaatgccagccccctccgcgacgtcgccgccgccgctgctggcggccggatcaccatgggcaacgacctgtggtacggcccggaccgcgtcaagtacctgggccccttctccgcccagacgccctcgtacctgaccggcgagttccccggcgactacggctgggacaccgccgggctgtccgcggacccggaggcgttcgcgcggaacagggcgctggaggtgatccacgggcggtgggcgatgctgggtgcgctgggctgcatcaccccggaggtgctggagaagtgggtgcgcgtggacttcaaggagcccgtgtggttcaaggccggcgcgcagatcttctcggagggcgggctggactacctgggcaaccccaacctggtgcacgcgcagagcatcctggccgtgctcggcttccaggtcatcctcatgggcctcgtcgagggcttccgcatcaacggcctcgacggcgtcggcgagggcaacaacctctaccccggcggccagtacttcgacccgctgggcctcgccgacgaccccgtcaccttcgccgagctcaaggtcaaggagatcaagaacggccgcctcgccatgttctccatgttcggcttcttcgtccaggccatcgtcaccggcaaggggcccctcgagaacctgctcgaccacctcgacgaccccgtcgccaacaacgcctgggtctacgccaccaagttcgcaccagggtcttaagctagctaccgggccgcggcgtgccaggacattgtgttgtacactactcgtttctgtcgtgatctgtaccatgaacgaatgcaaatattcttgtgctctcccagaaggaacgaactggactagttttgctcttc

SEQ ID NO: 21466 - DNA, 550 bp, Zea mays
  Clone ID: LIB3353-008-B2_FLI
ccgttttccctttccccagagattcgcatattctcgcgatgggagcggaggaagcagagggtactcccccgccgctgcccgccaccggcgagcccgcaaccacggcaagggcgcagccaatatctgcagcacaattcctctcctggaagcagcgcaaggatgcagaggtagccgcaaggaaagctgaagcagctgagaagcgagctgatgatatcgcttcgggagcggcgcagatgaacggccgcgagctgttccaacatgagccctgggtgttcgacaacaacatttactgagatcgtgtcgggctactgttcctgcattagtccaagctccagcggtggtttcattttgtactgctatatcagctttgcgaaactgtggattttatttcaccgtttctaagattattctctcaataggtaattgaacttgtttcaaatacgttttgccaaatctttgtgcagtcaccgaatggtatctagtgtcgctattctttttctaaaactcttacaaacaaagagtattggtcggaagagaattctcgatcttc

SEQ ID NO: 21467 - DNA, 1643 bp, Zea mays
  Clone ID: LIB3353-008-D4_FLI
ctcatcgatcgtcagctaatataatagcatatatatactccgatctcagaattgaagctccgatccatccgtcgaccacctatggctgccgctgcagctttctcctccacttccgtcgtcgctgctctcgcggcgagcggcttcctcggcaagaagctcgtcaccagcatcatcatcaggaataagaagaaggggtacgactccctgcatggcgccacgaccaccatcagagtcagagccatggcggtgaacaaggagacggagcaggacaggtggaggggcctggccttggacacctcggacgaccagcaggacatcaccagggggaagggccgcgtggacccgctgttccaggcgcccatgggggacggcacccacgtcgccgtgctcagctcctacgactacatcagccaggggctcaggcactacagcttggacaacatgatggatggctactacatcgctcccgcgttcatggacaagctcgttgtccacatcgccaagaacttcatgcccctgccaaacatcaaggtgcccctcatcctgggtatctggggaggcaagggccaagggaagtccttccaatgtgagcttgtcttggccaagatgggaatcaaccccatcgttatgagcgccggcgagctggagagcggcaacgccggcgagcctgcgaagctgatccgccagcgctaccgcgaggcggccgacatgatcaagaagggcaagatgtgcgtgctgttcatcaacgacctggacgccggcgcggggcggatgggcggcacgacgcagtacacggtgaacaaccagatggtgaacgcgacgctgatgaacatcgccgacaaccccaccaacgtgcagctcccggggatgtacaacaaggaggagaacccccgcgtgcccatcatcgtcacgggcaacgacttctcgacgctgtatgcgccgctgatccgcgacgggcgcatggacaagttctactgggctcccacccgcgaggaccgcgtgggcgtgtgcaagggcatcttccgcagcgacggcgtccccgacgaggacgtggtgaggctggtggacgccttcccgggccagtccatcgacttcttcggcgccctccgcgccagggtgtacgacgacgaggtgcggcggtgggtggccgagaccggcgtggagaacatcgccaggaggctcgtcaactccaaggagggcccgcccacgttcgagcagccgaggatgacgctggacaagctcatggagtacgggcgcatgctggtggaggagcaggagaacgtgaagcgcgtgcagctggcagacaagtacctcagcgaggcggcgctgggcgacgcaaacgacgacgacgacttgtatggcaaggcggcgcagcatgtccgcgtgcccgtgccggaggggtgcactgaccccaaggccggcaacttcgaccctaccgccaggagcgacgacggcagctgcgtgtacaactaatataattgtccaaacaatttctgtggcacgtacttaagtttgagccaggatacaaactttggccgctaatggttgctgtcgccggtcaagagggcgttggctacttgagttagattttggttgtgtttcatccccacgtacgtccagcaaagaaaaattgaagctagtgc

SEQ ID NO: 21468 - DNA, 812 bp, Zea mays
  Clone ID: LIB3353-008-E10_FLI
gatcgacctgctccctccccaccaccgagcccatggcggaccagctcaccgacgaccagatcgccgagttcaaggaggccttcagcctcttcgacaaggacggggatggttgcatcacgaccaaggagctgggcactgtcatgcgctcgctggggcaaaatcctacagaggctgagctccaggacatgatcaacgaggtcgatgctgatggcaacggcaccatcgatttcccagagtttctcaaccttatggctcgcaagatgaaggacaccgactctgaggaagagctcaaggaggccttccgtgtgtttgacaaggaccagaacggcttcatctcggccgccgagctccgccatgtcatgacaaatcttggtgagaagctaactgatgaggaggtggacgagatgatccgtgaggctgatgtcgatggtgatggccagatcaactacgaggagtttgtcaaggtcatgatggccaagtgagccacagaaccataatctgaaggcagagaagattatgcattgcatattagtcaagatgcaactttttattccatcgacttctagtgaaacattctgctagttgtagttgctgaaaaaggcaatgtagttcctgctttgttcttccctccagtgtgttttcagaactgttgtttcatgtgaacttgtaatgattgccctctctgctgtgtcttgattgcagttaaaatcatatgtagtttcaccccacccacacatcaacttctgtttcacgctgtttgtatcaatggatggcccgttgtttttagtgcaatgatctttagttaccgtggc

SEQ ID NO: 21469 - DNA, 1690 bp, Zea mays
  Clone ID: LIB3353-008-E6_FLI
cacaggcccactgccaccgctaccgctaaccatggcctcctcagcgtccctgcagcggttcctcctgccctccccgcacgcggcggcgacggcggcctcgccgtcctcccggctgcgccgcacagggcgcgcccgcgcggccgtctccgtgcctccgccggcggcggcgggggagcaggtcccgacggagcggctggagccgagggtcgaggagcgggcgggcgggtactgggtcctcaaggagaagtaccgggcggggctgaacccgcaggagaaggtgaagctggagaaggagcccatggcgctgttcatggagggcggcatccaggacctggccagggtccccatggagcagatcgacgccgccaagctcaccaaggacgacgtcgacgtccgcctcaagtggctcggcctcttccaccgccgcaagcaccagtacgggcggttcatgatgcggctgaagctgcccaacggcgtgacgacgagcgagcagacgcggtacctggcgagcgtcatcgaggcgtacggcgccgacgggtgcgcggacgtgaccacccggcagaactggcagatccgcggggtgacgctcccggacgtcccggccatcctggacggcctccgcgccgtcggcctcaccagcctgcagagcggcatggacaacgtgcgcaaccccgtcggcaacccgctcgccggcgtcgacccccacgagatcgtcgacacgcgcccctacaccaaccttctctcctcctacgtcaccaacaactcccaggggaaccccacaatcaccaacctgccgaggaaatggaacgtctgcgtcatcggctcgcacgacctgtacgagcacccgcacatcaacgacctcgcgtacatgccggccgtcaaggacggcgagttcggcttcaaccttctggtgggcgggttcatcagccccaagaggtgggccgaggcgttgccgctcgacgcctgggtcgccggggacgacgtcgtccccgtctgcaaggccatcctcgaggcgtaccgggacctcggctccaggggcaaccggcagaagacgcgcatgatgtggctcatcgacgagctcgggatggaggtgttccggtcggaggtggagaagaggatgccgaacggggtgctggagcgcgccgcgccggaggatctcgtcgacaagcgctgggagcggcgggactacctcggcgtgcacccgcagaagcaggaaggcctgtcgtacgtgggcctccacgtgcccgtgggccggctgcaggccgcggacatgttcgagctggcgcgcctcgccgacgagtacggcaccggcgagctccggctcacggtggagcagaacatcgtgctccccaacgtcagcaacgagaggctcgacgcgctgctggcggagccgctgctgcaggagcagcggctctcgccgcggccgtccatgctgctcaggggcctggtggcgtgcacgggcaaccagttctgcgggcaggccatcatcgagaccaaggcgcgggcgctgcaggtggcgcgggaggtggagaagcgcgtggccgtgccgcggccggtccgcatgcactggaccggatgccccaacagctgcggccaggtgcaggtggcggacatcggcttcatgggctgccttaccaaggacagcgacggcaagatcgtcgaggccgcggacatcttcgtgggcggccgc

SEQ ID NO: 21470 - DNA, 1137 bp, Zea mays
  Clone ID: LIB3353-008-G8_FLI
cttctgcgcccctctcctcccaaactgcggatagagcagcgagccatcgacacgatcgcgagcgcaagcacgtacgttgtcggaagctcaagttagaagaagcaccagtgcctgatcgatggcggcccaggctctcctctccggccggcagctgctgggccgccccgtgcagtcggccgtctctaggtcgtcggcgaggaaggcgcccttcgtcgtcagggccagctccagccctccagccaagcaaggtgccgacaggcagctgtggttcgcgtccaagcagtccctctcctacctcgatggcacgctgcccggcgactatggcttcgacccgctgggcctctcggacccggagggcaccgggggcttcatcgagcccaagtggctggcctatggcgaggtgatcaacggccgctacgccatgctgggcgcggtgggcgccatcgccccggagatcttcggcaagatgggcatcatccccccggagaccgcgctgccgtggttcaagacgggcgtcatcccgcccgcgggcacctacaactactgggccgactcctacacgctcttcgtcttcaacatggcgctcatgggcttcgccgagcaccgccgcctccaggactggtacaacccgggctccatgggcaagcagtacttcctcggcctcgagaagttcctcgccggctccggcgacccgtcctaccccggcgggcccctcttcaacccgctcggcttcggcaagaccgagaaggagatgaatgagctcaagctcaaggagatcaagaacggcaggctcgccatgctcgccatcctcggttacttcatccaggggctcgtcaccggcgtcggcccgttccagaacctgctcgaccacctcgccgaccccgtcaacaacaacgtgctcaccagcctcaagttccactagaacgtggtgcatcagcatacctgctgctgccgccgccgccgccagttgtttgctgtggaaagctagatgcatgcgtgttgtaaaggaacctgaagcgttgcatcggtcatgattcatgcatggccagcctgctgcctgtaacaacaaactagtattgatcttattgagaccggaaactgtattgcacatggtaaatcaatgtacaattcctccct

SEQ ID NO: 21471 - DNA, 736 bp, Zea mays; identical to SEQ ID NO: 21462
  Clone ID: LIB3353-009-A10_FLI

SEQ ID NO: 21472 - DNA, 1522 bp, Zea mays
  Clone ID: LIB3353-009-C5_FLI
aaaatctagacacgtcccgatcgatctccctatatataccaccaccaaattttacttttgatttagcagctagtagcggcagatcatgctctcatcgtacaaatagcagtcagtagtctactcattcaattcgctccggcctctcgatcgatctgctgccatggacgactacggcaacgcgatcgtcgtcacgggcacggcggctccgctcaaatacaactgtcgctccgtgtcgccgccgtcgagcgtgtcgtcgtcgtgctcgccgccaccgcctcctcctcctcctactcctcctgccgccgtccaggtggtggtgggcaacgtggcgccgaccgtcgtcctgagcccgtgcgcggcgtgcaagatcctccggcgccgctgcgccgacggctgcgtgctggctccctacttcccgccgacggagcccgccaagttcaccacagcgcaccgcgtcttcggcgccagcaacatcatcaagctcctccaggacttgccggagagctcgcgcgcggacgcggtgagcagcatggtgtacgaggcggaggcgcggctgcgggacccggtgtacgggtgcgcgggggcggtgtgccggctgcagaggcaggccaacgagctcaaggtgcagctggcgcgcgcgcaggccgacctgctcagcgcgcaggcgcagcacgccgacctgctagccctcttctgcgtcgagatggccaaccgccgcggcaaccggcagcagcagcagcagccgtcgccgccgacgacgacggtggacggcggtggcggaagcgagttcggcggcgcggcgtacgggcagacgttttacgactcggacgacctggactcggccacgtggccggatcacgaagcccagctctggacctagctagctgatgggtgcatggatagtaggtaactctcgagtgctacaggtactgcttgtgctgccttgtgtgcagcagcaccaccacatgcatgcatatacgccgtacgtaggggtggtaatggatcacgatctaaatgcctcttcataaaagttaagacccttaaataatataagttcaaaaatgaataagaatagagcctgatcctaatccgattcaatccttaaaattcgcagcgtaaagtttatagtccattaccacccctgaccgtacgtgctgctacgtgtgtagggagcggcaacgtttctgctacctcgtcggtcggatgctgcaacaacgctgtgtatagcccggccgtcaatacgattatttgctcgtgaatgcatatattatattactccctccgtttctttttatttgggaacaattggatctataccattaaaagatccaaactttagatatatatcatggaccccacatgtcattgactcatgtggacccacatgtaagtgagatagtaatggtatgaatccaaagtggtgatcttttaatggtatggatccaaatttcccttttatttgtcgctggattacactatgcagcgacaaataaaaaagaaacagagagagtatcattcagtt

SEQ ID NO: 21473 - DNA, 666 bp, Zea mays
  Clone ID: LIB3353-009-D11_FLI
ctgggaccaccaccgccttcttcaagatcggcgggcgggcaccggccggcgatgacatccaccgtcaccacaaccgttgggtgcggggggctccccgtccgcccgttgtcgacagcgaccagaggacgcccacgcagatgcctccaatgataagtcagtggaggtcatgcgcaagttctccgagcagtacgcccgccgctccaacactttcttctgcgccgacaagacagtcactgccgtcgtcatcaagggacttgctgatcacagggatactcttggagctcctctatgcccttgtaggcattatgatgacaaagctgcggaggtagcacaaggattttggaattgcccatgcgtccccatgcgtgagaggaaggaatgccactgtatgctttttcttactcccgataatgactttgctgggaaggatcaggttatctccttcgaggagatcaaagaggcgacatcgaagttctaagcccttgtatttgtcacggagtgtttacttgacagctaattttttatatgtatatgtacttaagtagcatctataagatatgccatcaggaaaattttcataaaatgtgcagtaaacagcacttcgcaaggctgccgatcatataagccgccttcggcctttttattgtatctgggctccatttcgtg

SEQ ID NO: 21474 - DNA, 1053 bp, Zea mays
  Clone ID: LIB3353-009-E5_FLI
gcagtgcaccttagtaggtgggtacctttacggtacctgcagggaagcaaagcagatgtgcatgctccagattctcaaggaatgaaatgacatgaatgaatgttacccctaaaagctttgctatgctatgctttccgtgtgcttccatccaaacgaggatgctgatgccctggcaaagtagtgcaccacaccaccaccatgatgttgctttagggactgcttgtttgtttgtatatataatatatctcgtcacatgctaaatctgcagcagtctggatctccaaccccatctccggagccctcgccgtcggtcggcggaggcaagtggtgcgtggccaagtccggcgcgagcgcaaccgacctgcagaacaacattaactacgcctgtgcctacgtcgactgtaggccgatccagagcggcggcgcgtgcttggaccccaacaacatccactcacatgcctcgtacgtcatgaacgcgtactaccaggccaatggcatgcacgactatgactgcgacttcaagggcaccggcgtggtcacctccagtgaccccagtaagcagctgtgaattatctctctctctgtactgtgtacaactgcagctgcaactcatatttctcgctcgtgtgtcgacgacgacggcggcggttgcaggttacgggagctgcaaatacaacgcctcctcctgacggcgcgcagcaagtccagctggcactactgcaccagcctccagtccacatcgtcctccagctccaggctccagccatggccacgctggggacgggaggaggtccgtactgccgccgggcttgcgccacatacttgtatactcatgtctcacacccatgcttcttgttgctctcaaccactactagcactactatttgtctagttccataattacaagtccctctcccctcatgttaacttgatcattgtccgtgtgtagtggactagtggtggtgaataaaatagcttccattccatgtagacaaacaaacaaattgtaacatctgttatccttgggttatttgatatatttatttttcatat

SEQ ID NO: 21475 - DNA, 974 bp, Zea mays
  Clone ID: LIB3353-009-F10_FLI
ctcggagcaagataggcctagctggttacaagccaagaacaagtagagcggtagagggaaaatatatctggagagggaaacaatggcgggcgaggacggtcttaaggtcctcggcctgcaggtgagcccgttcgtgctccgcgtgtgcttggcgctgaacatgaaaggagtgagttacgagtacgtcaaggaggacatatccaacaagagtgagctcctgctcaagtccaacccggtgcacaagaaggtgcccgtgctcatccacaacggtaagcccatctgcgagtcactcgtcatcatgcagtacgtcgacgagctgttcgccggccggccgatcctcccaaccgacccctacgagcgcgccactgctcgcttctgggctgcctacgccgacgacaaggtattatgaacttgcacgcacgcgcgtttacgtgcctgatagtctggtaccgatcgaatgggcggcgccttgctcgcagttgtttccagcgtggtacggcatggtgaaggcccaggcggaggaggagagggcggagaaggcgaaggagacgctcgccgccatcgagcacatggaagtggcctttggcaagtgctccggcggcaacgccttcttcggtggcgactccatcggctacgtcgacatcgtgctcggctccttcttgttctggttcgaggcggtgcgcagggttttcgacctggagatcattaacgctagcaagactccgctgttggctgcgtgggcggagcggtttgtagggactgtagaagcgaaggaggtggtgccgttgcccacggcggacatggcggtacagtacatcaataagcttcatgcccccctgccgccgccatgagttcacaatgagtcgtgtaagtgtaaccaagcagggaaaaaggtaaatggtgcggtgctttggtccaaattccaacagaataatgttcaaagcttatattgataggcttgggttgttgtcatc

SEQ ID NO: 21476 - DNA, 276 bp, Zea mays
  Clone ID: LIB3353-009-G2_FLI
cactgccaactcgctccgaagagggaggaggacgacgccggttgccactgccactgccgcgccgctcccgtctcccctccctccgcgggaactcggcgccaccatgctgtccacgcgcaccgccgccgtcgccgcctccgcgtcccccgcctccccgtggaagctgggaggacggagcgagggcggcgccagctgcgacggatgccggacctacaggaacaccctgcggaggagggccgcgcccgccaaggtgcgcgccttgccgcccaggcgggt

SEQ ID NO: 21477 - DNA, 1085 bp, Zea mays
  Clone ID: LIB3353-009-G9_FLI
gcttgctctggggggaaggagagagagagagcgagagagagagagagatctagtagagaggctagtaggtggtcctcgaacgaagatgttggcggtgttcagcgggcaggtggtggaggtgccggcggagctggtggcggcgggcagccggacgccgtcgcccaagacgaaggcgtcgcagctcgtggggcgcttcctggccgcgtccgagccggccgtgtccgtgcagctcggcgaccacggccacctcgcctactcccacaccaaccaggcgctcctccgccccaggtcgttcgcggccaaggacgaggtgttctgcctgttcgaaggggtgctggacaacctgggtcggctgagccagcagcacgggctgtcaagcaagggcgccaacgaggtgctcctcgtcatcgaggcctacaagacgctgcgcgaccgcgcgccctacccggccagcttcatgctcgcccagctcaccggctcctacgccttcgtcctcttcgacaagtccaccaactccctgctcgtcgcatctgaccccgagggcagggtgccgctcttctgggggatcaccgccgacggctgcgtcgccttctccgacgacatcgacatgctcaaaggctcatgcggcaagtcgctcgcgccgttcccgcaaggctgcttctactccaacgccctcggagggctcaagtgctacgagaaccccaagcacaaggtcaccgctgtccccgccgacgaagaagagatctgcggtgccactttcaaggtggtggaagggtctactgtcctgacggcgctgcactgatcgatcatcatcaggcggaggcgatgcgacgatacagaactttgtacatgcgtggtgggtgtaacatagtggctggcaacaagccatgctcatgcaaaccgatgaatctatctctgtatcatgcatcgatctcggttgcttgctagtccagactccagactccagacatggctatatatagctggtgctaataaataggagtataatcgtcatatcgatcggttgcgtgtggaatgccaatcaagtgtgtaatctgttccaaataacaaacctatgttcctcc

SEQ ID NO: 21478 - DNA, 1403 bp, Zea mays
  Clone ID: LIB3353-009-H8_FLI
gagacacgcgaccagtttgccggcaccaacacggcctgctgctccgcattttgatgactatttctgtctgaaaactgtctctgtcagttgttcattcaggctgctgcagcaagcaactggatgatggcttccaggcagtcagggaacaatgcacaagaagcagcatcaccattggcgagtcctcctcactccaacatagccagcatcatcccttcgctgcccctcgagaccaggtgcccaccgttccctctccgccggtacgccaacttttgggtgcctgaggtaatattgaaggcagacctccccggcattcattcctgcttcaagccgagacccaccgacgtgttcgtcgcaagcttccccaagtctggcaccacttggctcaaggcccttgccttcgcgacgctgaagcgttccacgcatccgccattggatggcgaccatccgctgcgtcgttgcaaccctcatgactgtgtcaggttcctcgatgctaatttcaaccagcagaaggatgagttggaggctctcccgtccccgcgcgtgctagccacgcacctcccctactccctgctgcccggcagcatcaccggggatagggagcgctcggggtgccggatcgtgtatgtctgccgggaacccaaggacgcgctggtctctgcctggctgttcacgaggaaggcggcgtcggcgctgggggctgacgctcgatcgttcacgatccaggaagccttggagcttttctgtgatggtcgctgtatgtgcggcccgcagtgggagcacgtcctccagtactgggaggagagcgtgaggaggcctgacagggtgttgttccttcggtacgaggagatgctgattgatcccgaggcacacgtcaggaagctcgccaagttcatggggtgtggattttctgaggaggaggaggagcacggggtggtgagcgccatcgtggagctgtgtagcctgggcaagatgagggacatggaggtgaacagaaatggaagcaatatgttgggggtcaagaacgaaagctacttcaggaagggagttgctggggactggagcaaccatatgacgccggacatggcgcagaggctagacaaggtcgtagaggatgcattgcaagggactggattcagctttacgagcaaagcatgatgagccactgcgctcatggtagttgcgaactccataatgccaagaacaactcgttttgtcggtattgcttgctggatggagatcataccagccagccatggtgagcatccttcttttgtgatgaaggggaaattgatttgcgtataattcatctgtataactttgttacaaaccatagtttgtggcaccttggcgcgccaaaaccatatgcattactgtgtaagattcgtcataaagctatgtgtatc

SEQ ID NO: 21479 - DNA, 1004 bp, Zea mays
  Clone ID: LIB3353-010-A12_FLI
ccgctctctgcggactgcgtgagcgtgaagcaccagcggcggccaccgggcaggacgagccccctccccaaacagagagggccggggatcagtgcgtgcgctcctggtggagggcgtggaagagcttggcaggcggcaagcaggggtttgggaggatggtttcgctctcgacttggttccgctatgccgcacaaaagttcgagtactgcgtttccctctcgttgaagaaatataatgatgtgggccggatcagcagcacgcagctaactgatgtgttgaacaaaaatttattccaaggcaagctcacctacgtgtgtccgaccaaaggggaagaagccatggctcccatcgcatctccaactggaggagccgtccttgtcagaaaactcgcaaatttgagccccacgcaagtgtttgtcggggacgttgtgttgttaaaagacccagagaaatctgatgatttaattattcgacgactggctgccctggaaggctatgagatggtctctaatgatgagaaggatgagccgtttgtgcttgagaaagaccaatgctgggtcctggcagacaacctagcccttaagccaaaggaagctagagatagccgcttgtttggacctgtcccaatgactgacatccttggcagagttatttactctttaagaaccgctgttgatcacggtctagtcgagaacagcggcatggccatgaaacaggatggtccagtactggcagttgagcttgatgtggaagagatggcgaagaacattaagccctagacagttgatgttttggacatcgtgcgctgtaactcaccgtcacaatggatctttttttttttgtttatgatctgttgcttcaagtagaactgcattggaatgttttttcacggtttgcctttggagcagtcaataatggtcttgacagataatccagaggccgctggaccgtgttcactcagaatggctgtttttagggtttttcttattcatgaagttgctgtg

SEQ ID NO: 21480 - DNA, 2011 bp, Zea mays
  Clone ID: LIB3353-010-F12_FLI
ctcactcaaaccgagcgccagttgccagcacgaagaataggagtagggatcgaagagtgagtgaaactgaaacacgaggaggaggcatggcgaccccggatgaccgcggcagctggttgctgtacctgtccctagccgccaaatgcgccggcgaccagccttaccgcctcacgggcttccttgccgtctgcgccgtggccttcgtcgtgacctgcctcctgcactggtgcttcccgggaggcccggcgtgggggaggtggtggtggacgcggcggctcggtgccggtgccggtggcggcgcgacggcggcggcggcggccctgccggggccgaggggcctgcccgtggtcgggagcatgtggctcatgacgggcctggcgcaccgcaagctcgcggcggcggcggggagcctcggcgccaggcgcctgatggccttctccctcgggggcacgagggtggtggtggcctcgcacccggacgtggcgcgcgagatcctcagcagcccggcgttcgcggaccggcccatcaaggagtccgcgtacgggctcctgttccaccgcgccatcggcttcgcgccctacggcgactactggcgcgcgctgcgccgcgtggcgtccacgcacctcttctccccgcggcaggtcgccgcgtcggccgcgcagcgcgccgtcatcgcgcgccagatggtcggcgccgtgaaggagctgtcggcggcctcgccggggcggcgcggcggcgtcgaggtccgccgcgtcctgcgccgcggctccctgcacagcgtcatgtggtcggtgttcggccggcggtacgacctggagctggacccggccagggagagccccgagacgcgggagctgaggcgcctcgtggacgaagggtacgacctgctgggccagctcaactggtccgaccacctccccggcctcgcgtgcctcgacctgcagagcaccagggccaggtgcgaccgcctcgtcccgctcgtgacccgcttcgtcggcggcatcgtcgacgagcaccgcgcccggaaccacctccgcgctgctccgcctggcgtcgtggacttcaccgacgtcctgctctcgctgccggccgacgacaggctcaccgacgctgacatgatcgccgtcctttgggaaatggtgttccgtggaactgacaccgtcgccgtgctgatggagtgggtgctggccagactcgtgctgcaccctgacgtgcaggcccgcgtccacgacgagctggaccgcgtggtcgggcccgaccgggccgtcaccgagtccgacacggcgtcactggtctacctgcacgccgtgatcaaggaggtgctcaggatgcacccgccgggcccgctgctgtcgtgggcgcgcttggccacgtcagacgtgcacgtcgacgggcacctcatccccgccgggaccaccgcgatggtgaacatgtgggccattacgcacgacccagacgtgtgggccgagccgacggagttccagccggagaggttcatggggtccaccgagttcccgatcatggggtcggacctcaggctcgcgccgttcggggcgggccggcgcagctgccccgggaagagcctcgccatggccaccgtggccttctggctcgcgacgctgctgcacgagttcgagctgctcccctcgcccgtcgacctgtcggaggtgctcaagctgtcgtgcgagatggccgtcccgctggcgctggccgtgacggcgaggccccggcaagcggttcagaagtcggttggggtatcagtctcactgtgagcaatagcatggcgggctggcgctactgtacatggaaagtgcttctgcttgcaggttgctactactcggtcgacatgggtatatgcttttcatgttactgtctttgatgtgtatcgatcaggtgccgaatgtgatactttggcttgtactgttagctcttttcctgggtgctcttttctttctttttcttagtactcgctgtaagactcgtcaaatgtatatgctggtttggatggttt

SEQ ID NO: 21481 - DNA, 1116 bp, Zea mays
  Clone ID: LIB3353-010-G11_FLI
catttacgtatatgcccttgtcccggttcctttccccatccccaactccattatttgcttgatccttgagaagagagaggaagacgagagctagaagcgaaggagaaaagcagttcttcagctaggcaggagggcacaggaaggaggagatggcgtcaaagaggattcagaaggagctcaaggatctgcagaaggaccctcccacctcgtgcagtgcaggtcctgttggtgaagacatgttccactggcaggcaacaataatgggtccatctgatagcccatattctggtggagttttcctagttacaatccattttcctcctgattatcctttcaaaccaccaaaggtggcatttcgcactaaggtgttccatccaaacatcaacagcaacgggagcatttgcctcgacatcttgaaggaccagtggagtccggcactaaccatctccaaggtgctgctgtccatctgttccctgctgactgatccgaaccccgacgaccctttggtccccgagatagctcacatgtacaagacggaccggcacaagtacgagaacaccgcgaggacctggacccagaggtatgccatgtagtattttctctacctggcctttggggtcgctgctgcgttgtgttgccgggacctggacgtgcctccatgtattcgttctatccttcctgtataatgatgaaccgaattgggtttgcagtacagtgccgcgtgtggtgctgaatgctgctgtattgtgtcacttggaagctgtaattctcagtgtcaaaaaaaactggtacttggaaccattttgcgtcggatggcgctgcaggccagtccatgcttgcgtccttcttcccttcaccagtcatcgtgttggaagaaacataacgttctgtctcttgagtaactggtacgaaacaataatgatcgttggggatttggttgcagcagatgaggccaatcttaacgggagttttacaagagatttatgacattaaatagcatatggtacatatgatttttttataacatatcactacatttatttattattaggtgaaactatgtctatctgtttccaaggtattggagtgaaaccgccgcagagaccaatttatttt

SEQ ID NO: 21482 - DNA, 910 bp, Zea mays
  Clone ID: LIB3353-010-H5_FLI
tgcctgactgctactacccagcaaccacctgggactgggagtcgagctctcgctccagcgcccccttcaattccgtcctgatacgctcgaccggtagtagcccggccggaacaggttgatcgatcatcatcagtcgagcacgctagcctagctagccaccgatcgacgacgacacacatggcgaaggtccacccggaccgccaccccgacgtgccgccgtcgtcgccggctgcggaggaggaggaggaggaggcgacgtcgctgacggtgtggcgcaagtcgctgctgttcaactgcagggggtacacggtgttcgacggcaggggcgacctggcctaccgcgtcgacagctacgacgacgccggggccgacgccgaggccgtgctcatggaccccgccggccgcccggccttcacggtggcgcgccggagccgcctcctcggcctgctgtccggccagcagcggctcatctacgcgggcgaggacacgcggcggcccgtgtacgccgtcgtcaggcgcggcggcaaggcgacggcgcgcgtgacgccgtgcgctgctgcaggcgccgcgtacgaggtggaggggtcctacgcgcgccgccgctgcgtggtgtacgacgccgagcggcgggtcgttgtggcggaggtgcggcccaaggaggcggtcggcacggacgtgttccgcctggtggtgcggcccgggttcgacgtgtcgctcgccatggccgtggtggtggcgctggaccagctgtttggggggaggccgtcgctcctcaggagctggtccacgacgatgtagattcatgtacatgttctttgttcagttcaatctagactagatagagttttgcccctggacttggggttgtgacttgtgagttatcactggatatgatgatgattcttcaatc

SEQ ID NO: 21483 - DNA, 601 bp, Zea mays
  Clone ID: LIB3353-011-D6_FLI
gcatacactagtgcttttgctagctacttgtgcgagaagagagagcgcacggcgatagatatggcgcatagcaagcgcgaaatcaagcccgggagggcgcataccaaggtggccggcgacgacgagatgctgcggaccgggttcttcgacggcacgccgctggagggcggcaagatcgccgactcccagcccgtcgacctcttcgccgctgcccgccgcgtcgccgacgccccgtactcatcgcagcaggaaggaccacacgaggaggggaccaacaagaacgccgtcatcgcggagtcggagcccgtcgacctgcccgcgagcgcgcggggcgtggcggaggtgaaccgtgctgggccggaggagcagacaggccgcggtcggcagggcatggccgagcccaccgccggtggacgtcgcttgggattaggtcgcccggccccggcttaacgatccagatcaagcagtactcgactaccgccactacactacctgctctgctcgtgtcttgtttccagttttctttctctgtaagcggtgtagggtttgccaaacttttatgtacgaattatgaatatcaataaagtcgatctgctgctgc

SEQ ID NO: 21484 - DNA, 1015 bp, Zea mays
  Clone ID: LIB3353-013-B4_FLI
ctcacagacagtcacagacacatccaacgagcccgaccgccagagctcgccgccgtcctccgcagacaatccaccatggcgatggtgctggggatggtgctggggaagatcccggtggagacgcccaagcacgaggtcctccacaccggcgccggctacgagatccgcaagtacccgcccagcatcgccgcggagttgacctacgatcccaaggagatgagaggagaccctgatggcgggttcaccgtcctcgccaactacatcggggtcctcggaaagccgcagaacaccaagcccgagaagatcgccatgacggctcccgtcatcaccaccggcagcggcagcggcggcgacggcgagaagatcgccatgacggcccccgtcatcaccaccggcggcggcgagcccgagcccatcgcgatgaccgcgccggtgattacggacgaccagcaggcgccgggcaaggtgacaatgcagttcctgctgccgtccaagtacaccagggtggaggaggcgccgcggccgacggacgagcgggtggtgatccgcgaggtgccggagaggaagttcggcgtggcgaggttcagcggggtggccacggacaggacggtgagggagaaggcgaagggacttaaggccgccctggagaaggacgggtacaccatcaaggtcccgttcgtgctggcgcggtacaacccgtcgttcacgctcccgccgctgcgcaccaacgaggtcatgttccccgtcgagtgatccggcaaggcgccggccaccgcccagctaccggccgcggttcttctgtgaaatgacggcttgaggttcaggaggaactgtgtttgtattttgtatctgtatttctcttgaagttgttgtagaatatgctttatgcaacgagttatggataaattttactactcttcgatcaatgaagaactaaaccctggtgtggatccgtatttcagacagtttttagttataaggtataaagcaatttacatttatattataaagtact

SEQ ID NO: 21485 - DNA, 950 bp, Zea mays
  Clone ID: LIB3353-013-C11_FLI
agagatcgcatcttgcctgcccacccaagcttccctttcgttcctcctcgccccagcgacgcggcctcccgtagaccgagcaaggcaacccaccactgagaggcacgcagaggagcaggaagccggagaccaagatgtcgtcggtgttcagcggcgatgagacggcccccttcttcggtttcctcggcgccgccgccgccctcgtcttctcatgcatgggcgcagcgtacgggaccgcgaagagcggcgtcggcgtggcgtcgatgggtgtgatgcggccggagctcgtcatgaagtccatcgtgcccgtggtcatggctggtgtgctcggtatctacgggctcatcatcgccgtcatcatcagcactgggatcaaccccaaggccaagccctactacctttttgatggctacgctcacctttcgtccgggcttgcctgtggccttgctgggcttgcagctggcatggccatcggcattgttggtgatgctggagtcagggcgaatgcacaacagccgaagctttttgtgggcatgatcctcatcctcattttcgcagaagcgcttgctctgtacggtctcattgttggaattatcctttcatcccgtgctggtcaatcccgagcagattaagtgcactaccattctgcgattaccgtactgtttattatgctattctaagagaattgaaactctatgcccttgtctagtttattcttgttaccatgtattaatgaaacaatttgtagctgaaggaaggtgacacttccagccatgttggttttggcggtgttaagcagaggttatttattgggttaaggttggagggatgtgggttaagattggatggatgctcctgggctaagtggatttaatttttatccttggtgaataatgaacacggaggtgtagccaaataataacgtgatatatatatttctttgccccttt

SEQ ID NO: 21486 - DNA, 432 bp, Zea mays
  Clone ID: LIB3353-013-C3_FLI
gctacaccgacgtcgagaacgggctgtggggatgggtgtgcaggtactcgccgacggagaaggagaactgcgtgctgcgctgcctctcgccggagtgctacgacctcatatacggcggggatccgcttgaggaaggggagttggactatgttcgaagccaggagtacaagtattgtatgcacaaatcatcccttggagaaagcttggatggtgtgaagggatccttcagctactcatgaaggaatgagaagaaaaaggttctgttagtctgctgtaaattttatttacaatcttgaacagacatgcatctttttagataatggaattgtaattccagactttgctttttctcaaagcatcaccggtgcatcatcttatattaaacttacaaatgcaaattaaacattggattcatttgttggccacaccaat

SEQ ID NO: 21487 - DNA, 1189 bp, Zea mays
  Clone ID: LIB3353-015-A10_FLI
gtgtaaatcatggcgtcctccgcgttcctcaacgctctcgtcctccgatcgccatcaccgtcgctctcgtcctcgtctaaccgccgcagcaccggcgccttcgcgttcccgaacccaccgcgcttcccatgcctgcgttctgcgcgtcgactcgtccttgcgagggcggcggcagcgccggcgccgggcgatggccccgaggacgagtgggggccggagcccgagggcgggtccgctgtcacgggggccgcggtggcggaggcgccggaggcgagagaggtcgcggagctcaaggcgcagctaaaggacgcgctgtacggcacggagcggggcctgcgggcgtccagcgagtcgcgggccaaagtgctggagctcatcacgcagctcgagacgcgcaaccccacgccggctcctacggaggcgcttacgctcctcaacggcaagtggatcctcgcgtacacatcattttcccaactattcccactattggggtttggtaatctgcctcagctggtgaaggtggaggaaatatcacaaaccattgattctgagaacttcacagtgcaaaactgtatcaagttttcaggacctttggctacaacctcagttgccactaatgcaaaatttgaaattagaagccccaagcgtgtgcagatcaaatttgatgaagggattgttggtacaccacagttgaccgactccattgtgctaccagagaagtttgagttatttggacagaacatcgacctgagtccactgaaaggcatattttcttccatcgaaaatgcagcatcctcggttgcaaagaccatatctgagcagcctccgctcaaaataccgatcaggacaaacaatgctgaatcgtggttgcttacgacataccttgacgaagagctcaggatctccagaggcgatggcagcagcatctttgtgctgttcaaggagggaagtactcttctatactgagatccaaatcccgagtcgatgatcgttgaagctgaaccgtgaagtagttatactgcttatgcttttctttcttatagtattatactccgtctcaaaataagtcaatttctagaatcacttaaagtcaaattatctaaagtttgaccaattttataggaaaggtaccgtcgtctatgtttctatgacaccaaatgagtacattatgaaaattattttatggtgc

SEQ ID NO: 21488 - DNA, 708 bp, Zea mays
  Clone ID: LIB3353-015-D12_FLI
cccccccccccgcctttgccttagtgtagaaaagtcgccgcgttcctattgcctgatgaaatcaatcctcttctcgtctagatctgagcctccgcgtggcttccagatcagatgcttggtccgatcaacgacggtgagtcttgctctgttagttgattgttcgaaatgcatggttttgtttttgtgatgatgtgcaggttccgatcagtttcgtttgattgatgagttgacgcatcggttcgaagcgagacgaggctgcatggtttttgtgcctggaggtttctgatcagcgtgtttaaggaaactggatgctacaatttgttatctgcagaccttcagagctgcgacgttccggcttccgggggatctggatcttggctgactggacaattgcgaggcgttgacgggcttctaaagcgtggatggattgttggatctcctttctgccccgcgactcgatgatatctctttgtattggtaattattggatgaaatttcgataattattagatcggagagatgttggtcgcggcggtccgtgcctaactgaaggcaaggtaaggtccgagacaaaagaggggaaaaggatacatgaaaaagaagtgagatgtgacatcttgaaggcctttgccatgttgggtgcgctcgcatggcaggcatcgtaataaagatgttggttttgtgtgctgggtgggagatcgcacaggg

SEQ ID NO: 21489 - DNA, 774 bp, Zea mays
  Clone ID: LIB3353-018-B12_FLI
cagctctactgaacattaccgctcatcatcagggtatacagagagatcgaagagagacctatacagagatggcctccggcggcggctccaagcagctcaaggctagtcttctcatggtggtagcagctctgctcctcctcatctgcacctgcactaccagggggcaagcggcaaggccggatccaggatccgagggccacacgccacagcagctgcgtgctgctgtgtccgtctccgtcgtcgctggtcatgagaagaagagtggctcatcagtggccgtggtggaaatgcgtcgagaagatccggatcaggcggcgagagaatgtgaggacgatgacgcagacgacgaacaggcggagtgcctggtgaggaggacgttgctcgctcacaccgactacatctacacccaggggaagcacaactagctagtcactgctcactagcctgtgctggctcatgttcatgtcatgtcgaggaaacaagttcaagggacaaaaaaaaagttcgcatggttcacgagctagctagccaacctgaagttctacagtgccgtcaactgtgtggattgttttaaaatacatatacctatagtctttttctttctgcagttctgccaggctgtggattattttcatatttacctcgctaattaccccctgtgatttcccatcggcttctcgagatcatgtacaatatactatccatatagatatcatggatagaccttactcgtggcctgagaagctaaatggaaattctagaatattaacgtct

SEQ ID NO: 21490 - DNA, 2930 bp, Zea mays
  Clone ID: LIB3353-018-C3_FLI
cggcaggctcgcgagagagagccgtgcggctgccgaactccacaggcctatacgggtgtactagcactgtagcctactagccagcaagcacctcctggtgctatatgaccccccgcaccccacccaaaacccctccttttccgctccagacacagcagcccctcttgtaccagtaaaccgtgctgctatcccccgctagccgccgcgctgctgcggctcgcctccctcctccccagtccccgcgccccgccgccgccgccgccgcctcctctcgctccctccttttaccccgagcttaagctcgcgcgtacctgcctacctatccgtaagagaggaagaggggacaaggcccggtcggtcggtcggtcggggggctctcggatctcgccgctgcctccccgttcgttcgttgggatctcgcgccatggccgccgtcgcgccgcccccggcccccgcgccggcaccggttccggctcctgctcctgccaccgtccctgtcgcggatcaaaccacggatctgctgcagaagctgtcgctcgactcgcagcccaagccggcggacgcaacacagcctgctgctgccaccgccaaaaagcagggcgccgcggcgagccagccgctgagcgtggcgatcccgccggagccgtccatcacgccggtgatccaagactttacggatcccaacctgttttatctaccagcgtattactacggaggctacgacagttccatgagcgagtgggatgattatccgaggtatctaaattcagatggagtggagattgccccagcggtatacagcgatatttatggatatgggtatgctccttacggggcatactctcctgccacttccccagttccaacagttgatggtcagatgtttggtgcacagcattaccagtatccaactgcttatttccagcctcctacaccagttccttctaccactcaaagtaacctacagtcttctaaaaatcctgaaaagccagcagctaaagcagatccagccaagaccactaacggtgttcccaatggtactgctcacagtaacagtggaactgtaccccttgcgtcgagccaacaaaattcatcactgacgcctgatggaacttatagggcgcccttgctaggtggagttccttctgctggttacctggacacgacttatgggtatgacagcacaggggcacacttcgcatggtatgatggctctgcttatgcaaatggacaacaaagaacagctacaactaaccattttccatcctcaacatttggtaatggttccccagcaagatatcagaacaagagcaccaccacaccgcagatgggtatgcagaatagaagacctacaactacatcaccagctcctacttatcccaataggatgtaccctagctcccgaccgtacacccagtatgggaattcaataaaaactggccttccctacgggagcaacggttatgattccaggatatatgggcgatggggtcttggtatggataacaggtacaggcctaggggccgtaatggatattatggttatggcaacgagagtcaggatggaacaatcgagttaaacagaggtcctagatctggccgtttcaagaaccagaaattgtacggccatactgtcactattgctgtgaaagggcagagccttccttctggtgaaagcaaggatgatagtgccgtgcctgatagagcacagttcaatagagacgatttccctgttcagtatgatgctgcaaagttctttgtcattaaatcgtacagtgaggatgacatccacaagagtgtaaaatacaatgtgtgggcaagcacaaccaatggaaacaagaagctcgatgctgcttatcaagaagctcagtcgaagggttctgcgtgccctatattcttgtttttttcagtgaatacaagtgggcagtttgttggtgttgctgaaatgacaggggctgtcgattttgagaaaaccctggggtattggcaacaggacaagtggaatggttccttctctgttaagtggcacattgtcaaggacgtgcctaacaacattctcaaacacatcatcctagagaacaacgagaacaagcctgtcacgaacagccgtgacactcaagagatacacctagaacaaggccttcagatgctcaagatatttagggagcatgtcagcaagacgtccatcttggatgacttcgccttctatgagagtcgccagaagctgatgcaggataagaggtcgaaacagcagcaggtccaaaagcaggtctgggacagtaggacccccatttctgtcactggaagcgagcaacagcaggaagctgctaatgggaagcccaatccgtctgtaccaaacggtgtccctgcagaggtgaaggcggcgaaggcttctgcagagaacggcaccgccactccagctatttcctacgcggcaaaggtggcccaagcagcaacagagaaacctgtgctcgccaacggagacgctaagaccggttagctggaccgcccaaccgatgctccatagctagccgcgagcgacggtcgacgtccccaagagctcgaccgaatcgctgtacaagggaactggtgaccaaccaaggcaggctgtggaactgggcaggcatggcgccctagagcgttgcggctccatctcgtcgctgctggagagcagctggctagctgttagcgttttccctagtttctctctctctctctgtcgctgtgttccccgtttcagtttacttatagcccgaagacttttctgtagtattggaatgccagagacctttggccggacaagaggaatttgcgaaggccgtctggctgggtgtgttgcgtcgtcattggggtctagtatggccagttgtgttcgtcgttatattgagtggatccgaatgaatgtgggttagattggagctttccttttc

SEQ ID NO: 21491 - DNA, 1208 bp, Zea mays
  Clone ID: LIB3354-001-B11_FLI
gcaaggaacgcggggccgcgggccgcggcacacgcaaaattccccatcccccaaggaagccacgccctcgcgcaccagcgcgaccggaccagaccgcccgtctgaccgacgcaacccagccgtccagacgcgccgccgaccgtccttccaccaccacgcccgcgccgtcgcacgctccctagggttccgcagggccggggatcgccggagatggactggagcgcggtgacggcggaggacttggtggacgcgctgcgggaggtggactggtccatgccgccgcggcctgtcccggagttcttctcccgcttcaccgtcccacgctcctactccaagtggaccagccgcctcaagtgcaacctctactactacaggacaaactatttcatcttgatcatgttcatccttgggatgggcttcctttggaagccagttgctatagttgctgcttttatgactggacttagcatcgcatttctcaatgatagttttgcagtcactttcaatgagaaagtcacaaggaccgtaagacaattttcaccacatttagctgcaaagttgaggccacctataactcctgttcttcgcggtcgaccaagctctaagagatcaattcatatttgtgggcgacctcgctgggtgtttgtcctgttcttttctgcagtgagctgtatactctggttgacctcatgcagtcttctcacagtcctctgggcacttctcattgctctatttgcaactgtgctccatgcaagcttcagaacaccaaatctcaaagcacgtctgaatacattcagagaggaattccgggctgtttggcggaattatagtgagctttaagggtttcctttgtttctctcatgttcatgggtaatgaaggtgtctggtgccgttgtttgtgagctgtgctaggagatctagttgaaggtgaaacgccattgcacattacatggactacttgctctcttgggaggtgggattctggttgggttgactccgaatgcgatgctatgccagcacacgatccttcaagaacagtagttttctttcgtacttctccctaaccgagcatttgagagaggacagcatgtaaaggatgtaaaaatgtacttgttctcgatcaaaaagtatgttgtttgttgaaattattactaatttgtattgcatcctcttttggatcatttgttaggtgactatcattttgcttc

SEQ ID NO: 21492 - DNA, 826 bp, Zea mays
  Clone ID: LIB3354-001-F10_FLI
ggagcacaaggaggctgggtgccaggcccccgagggacccatcctctgcatcaataactgtggcttcttcggcagcgcggcgaccatgaacatgtgctctaagtgccacaaggagatgataacgaagcaggatcaggccaagctggctgcctcctctatcgacagcatcgtgaacggcagcgacgccgtcatggagccggttgttgctggcagcaacacggtagtagctgttgcccaagtcgagttgcaaacaatgaacgtgcagcagcccgctgatgttgccggacccagcgagggggtggcggcgatctccaaaggggggaaggtagggccgaaccggtgcagcgcctgcaggaagagggttgggctcacgggattcaactgccggtgtgggaacttgtactgcgcgctccaccgctactccgacaagcacgactgcaagttcgactaccggactgctgccagggacgccattgccaaggctaatccggtggtgaaggcagacaagctcgacaagatctagggggggttccctacggttggtgtcaggaagattgtaaaccgcggtaactcgtcatgcggaactgctgccttgccccccgcgcctttctcttccatgtttgctgctacaatcttgttgttgggcattgcagtgcacggtgcacacttgtgtagcccgcctccgagaattctcctgcctctgcatctggtcagttcaaaaatgatttgcatgttggctatgttgtgtaagctctatttatggtggtctcgctgagacgggtatttggcttcgcagttatctagctatgtgatgtactgttgtctt

SEQ ID NO: 21493 - DNA, 1448 bp, Zea mays
  Clone ID: LIB3354-001-F9_FLI
atgggaatgagtttgttgacctgcacaccatgcttatccattgcgcacaggcaatggccaccggtgatcgccgaagtgcaaccgagatgctgaaacagatcaagcagcactcctctctcaggggggatgccacacagaggttggcctattgttttgcagaaggactggaggcgcgacttgctggcacagggagccaggtgtaccagttgctcatggcaaaacacacatctgttgtggagttcctcaaggcatacaagctatttttggcggccatcagcctcaataaggtgcatatcatcttctccaatcggaacatcgtgcatgccgtggcagggaggagcaagttgcacattgtagcatatggtgtacagtatggtttacagtggccaggcttgctacatttcctggcaggtagagaaggtgggcctccagaggtgagattcaccggcattgaccttccacagccagggttccgcccagcctaccagattgaagaaacaggccgccggcttagcaactgtgcccgtgaattcggcgtgccattcaagttccatgctatagcagcaaagtgggagatggtctctgccgaggacctgaacattgatccagatgaggtgcttgttgtgaacagcgagtgccacttgagcaacttgatggatgagagtgttgacgctgacaccccaagcccccgagatttggtgcttaacaacattcggaagatgcgacctgatattttcatccagattgtcaatagtggcacatatggtgctccattcttcctcacacggttccgggaggcactgttctactactcagcactatttgacatgctggatgcaaccattccccgggataatgatgaacggctgctgatcgagcgggatattgttgggcgatctgccctgaatgttattgcttgtgagggtgcagacaggttggatcgccctgagacttataagcaatggcaggtgcgaaaccaccgggctgggctcaagcagctaccgttgaatccagaggttgtaaagcttgtcagggataaggtcaagaaatattaccacaaagactttctcatcgatgaggatcgccaatggttgttgcagggatggaaagggcgggtcctctttgccatgtcaacttgggttgctgaggataataactccaccttttagctgcttcactttgtcttgttttggattatgagtgatattgatgtttgatggatggtctgtgtctttattttaccaccaaactacgacccagcatctgtggcccgctggacttctgtttctagagggttttagtgctgaaactttgtaagctagaaaaataagtagatgcttagaggtacataggatgctgatatatttctggatatgttgcagaattgtgatgtgtacatcatctgtaactgataaaagcaattttattgattacttaatcgacctttt

SEQ ID NO: 21494 - DNA, 1129 bp, Zea mays
  Clone ID: LIB3354-002-A7_FLI
gcatgttgcaactcggaagggaaacaccattatggttcagaccctaatatcagttgaggggattgaaatcaatgcggttaatagagctggagagactgcttttgctattgcagataaacaaggtaatgaagagctcgtcaacatcctgagagaggtcggtggaggaactgcaaaagagcaagtaaatcctcctaatccagcaaagcagcttaagcagacagtcagcgatatcaggcatgatgttcaatcacagatgaagcaaacacgccagaccaagatgcaattccaaaaaatcaagaagaggattcagaagctccacattggtgggctaaacaatgccattaactccaacactgttgttgcggtgcttattgccaccgttgcatttgctgccatattccaactccctggtaattttctggaggacatgactcaagcacctgacccagacatgaccttggggcaagcattgatagccagtgatccagcctttataatcttcttggttttcgacgctttggctctctttatctcgcttgctgtcgtagtagtccagacatctctaattgttgttgaacagaaggccaagaagaagatggtctttgtgataaacaagttgatgtggctcgcatgcctctgcatctcggcagccttcatagcgctaacctacgttgtcgtgggtcgagacgaggagtggctggcctggtgtactatggcaattggcactgttaccatggtggccactgtcggttccatgtgctactgcgttgtcgctcacaggatggaagagaagagcatgaggaagatcaggaggacctccatgagccagtcatggtccatatccattgactcggaagcagagctgatgaacagtgagtacaagaagatgtatgccctttaggatgatgtccgtgcttgtcggctgagtcttgtatatattggtacccatttgcctgagaccagtccatggcattgagtgggattgactcaatcagaactatattttgtcctagaacatggcacctgtatgtaactgtagtcttgcagcctccagacatgaacctaggggtgaagtctaggtgataggtgtagtcacttttttgttggcaaaatacaaatattgccaagc

SEQ ID NO: 21495 - DNA, 734 bp, Zea mays; identical to SEQ ID NO: 15274
  Clone ID: LIB3354-002-E2_FLI

SEQ ID NO: 21496 - DNA, 1624 bp, Zea mays
  Clone ID: LIB3354-002-E9_FLI
gatcgggttccaaccagcccaaaccaccccgccgccggccgtttccccgcactccaccacctgcgccggcccatcctcccggcctggcccatgccaacgcgccccgcgctgcccttgccgtgcctcagccggatccccctcaaagcacgaccacaccacgccgccggtaccggcgcaccatcgaaaccaaccctagccaaaccaaatcagatcagatccccttcccctctccacgcccaaatcgctccgatccgccgcgaccgcgatggacgacgacgacgacgtgtcgccctcctcctccccgtcgccgccctcctcctccgcgctccccgtggacggccccgtcaccgtcgccgctgcgccgccgggcgcttccatggcggtcgctctcccgatccataggaccgcggcgtccctgtacgctagcgccggcggcgatggcggcggcggcggcgggagggaggacgcctggagcgacggcgccacgtccgcgctcatcgacgcctggggcgagcgcttcgtcgcgctcggccgcggcagcctccgccacccgcagtggcaggaggtcgccgaagccgtctcctcccgtgacggctactccaaggcgcccaagtccgatatccagtgcaaaaaccgcatcgacacgctcaagaagaagtacaaggtcgagaggatcaagccggtctccggctggcagttcttcgaccgcctcgattttctcctcgcgcccacctacggcaacaagcccggcaacggcggcggcgggcacaactccaacagccgcagccagatgcctgcggcgccgcgagtgggcttccctcaacgcagccgcacgccgctcatgcccgcagcaggatccggggccaagcggagggcgccttcgccggagccgtcggtgtcctccgattcctccgacggcttcccgccaatgccggcccttccggcggtgaacgggaagaggaagaggacggacgatgggcgctccgacggaggcggcgaccgcgcgcaggggcttcgggagctggctcaggcgatacggcgcctcggcgaggcgtacgagcgcgtggaggccacgaagctggaacaggaggccgagatggagcgtcggcgcatggacttcgcgcaggagctggagtcgcagcgcgtgcggttcttcctcgacacgcagatggagctcacgcaggccaagaatcacgcgtctcctgccacggccgccgtccctgctgttggctcgtcgaggaggattccgaggatgtcactggttaccgacgccggtggcagcagcaatcaccatagccgttaccggatcagccatgttgacaggcaccgccatgctccacgcccacattaccagcagtaccatgacaacaataacgcgggggcagcggctgcaagtgacggtgagcagtctgacgaggaagattatgaagaagagagccagtaactgcatcattgttcgccataattcatagggttaattaattggatctctatgccatgacaattccgtgttcgtagtgtctaactgagtcgttcttttttatacgctcgcaacgacgtttgatccacctccaggtcactatattttagtacgaaccaaagtaactcttctttctctggcttc

SEQ ID NO: 21497 - DNA, 1252 bp, Zea mays
  Clone ID: LIB3354-002-F11_FLI
ggaaaatggagcctgttgaagctggcacggaggatgatggagaacttctgcgcagggatgggcgcgtcatcttcccgcgaatggagtatgctggatggtttaacaggtagcatggggaaagacgtgcgggtcatggtgcagaacagtgtggatgaacctggggtgccaccgggtgtggtgcttagcgtcgccacagcagtatggctgcctgtgacccctgagcggctcttcaacttccttcgcgacgaggagctccgtgctgagtgggacatcctcagcaatggtggccctatgcagcaggtgctacgcattatcaagggccaactggatggcaactctgtggctatgctgagagccgatcatacagactcgcacctgaacagcatcttgattctgcaagagacgtgcactgacagatctggcgcaatggtcgtgtacgccccggtggacttcccggcaatgcagcttgtgcttggtggaggggactcgaagaacgtggcgctcttgccatctggtttcgtcattctgcctgctgggtctagcgccggtggggttgggcacaagtcacgcggatcgctgctcacagtcgcattccagatcctcgtgaacagccagcccacagcaaagctgacggtggagtcagtggacaccgtgtacagcctcatctcctgtaccatcgagaagatcaaggcggcacttcactgtgacgtctgttaacttgggaacaggaagcttcaggcatggaggcaaggcaacagctggtgatcagcctgagtcaagaacgaaccgcgcaaaacagtagtgacctttgctaggtggtacgggtccatagggctggcccgtagcacacagcaatggcggtggttcgggtattgactcagcctccaattgttctgggttaaattttgcattttggacgtacgactggccgggcaatgccatggttggttttggtggttttagggagtctggagtcatcggtgctttttgttggctggctcgtggttttttggtatcaggtttgcttttgtaaccatagatgtaggagagccccccttgatgatacagtcaatatcagacaaatgcagcattgtatcgtgagattccagtctcagatcactgtagatttaccttgtgtggaacagtagtacgagtagcggcagtttatgaggagggttgtgtcatccaaaacaagcttcctgtttcgatagaggaaattgatacagttaatgactgggtgtcacagttttgt

SEQ ID NO: 21498 - DNA, 1933 bp, Zea mays
  Clone ID: LIB3354-003-A5_FLI
cccgtgccaggccgctcggccttcgacgccgtgagcccgtgagtcaggcaggcaggcgcctctttctgtccctccacccgggtctccacgccgccgccgccgccgcctcgaccgcccccacgcatccgccgctcctctacccatcctcggcccgcggcccagggagaagaccgcacgggcgggcgagacggacggattcatgatgcagtcgttgaacgggggaagcgcgaatgcgaccgccgcccgaggggcgtggccgcgatggatcacaacgaatctttcgttcctccgatccgacaaagtccgtgggcgtagcggccggtagcagatggaaaaccataatccattacattctcagattgctgaagtgaaaatggacatctcagcatcagcttctgttgcatcagggaacaaattctgcaagggtggtgcctgtgatttctctgattccagtaactcctcgaaagatgccaaggagagatccacgtccatgaggaagcttataatcgcagtgatcctttgcatcatattcatgacggtggaagtggtcgggggcatcaaagcaaacagtcttgccatcttaactgatgcggcgcaccttctttctgatgtggcagcatttgccatatcgttattctctctctgggctgctggatgggaagcaacaccgcagcagtcatatgggttcttccggattgagattcttggtgccttggtctccattcagctcatatggctacttgctggcatactggtatatgaggctattgtaaggctcattaacgagagtggcgatgtgcagggctccctcatgtttgctgtgtcggcgtttggactgtttgtcaacattataatggctgtattgctaggccatgaccacgggcacggccatggacacagccatggacatccacatgaccatggtcatggtgattcagacgatggccattctcaccatgaagaaccagaacagggccatgttcatcatcatgagcatagccatggaagttctattactgtcacaacacatcaccaccaccactcaggcactggacaacaccatgacgctgaggagccactgatcaagcacgaggccgactgtgagggcacccaatctgctgctaagaagcctcgacgcaatataaacgtacacagcgcttaccttcatgtgcttggggactccatccagagcatcggggtgatgatcggcggggctatcatctggtacaagcccgagtggaaaatcatcgatctgatctgcaccctcatcttctcggtggtcgtgctgttcaccacgatcaggatgctgcgcaacatcctcgaggtcctgatggagagcacgccccgtgagatcgacgccaccaggctggagagggggctctgcgagatggaaggcgtggttgccgtccacgagctgcatatctgggccatcacagtggggaaggtgctactggcttgccatgtgacggtcgccagggaagccgacgcagacgagatccttgacaaggtgattgggtacatcaagacggagtacaacatcagccatgtgaccattcaggtcgagcgtgaatagagggggagctgtcttttgggctgtcagggcataaatggcgtcacgccttcactggttatcttactctgtcggttaaaacttttttttggcacctgggaaggcatcaggcagccatcggagtcttgatgtgcttgcaagttcatctgtggttcaagctttgatggtcagtagtgttatctgttactactagtctattaggcgggggtaggcgtcaaccagtgtgtacgggtttgattttcggtcatgctgttaacagcattgcggttcgtcgaactggatatgtagtttagtacgctgtgtcatcacctcttgtgtaagggaacgcttcttttctgtggtatggaagatgtgaacttcgtg

SEQ ID NO: 21499 - DNA, 1879 bp, Zea mays
  Clone ID: LIB3354-003-B3_FLI
cttttctgcttcggtgccaagaagctgagtagtgagcactgcaggtctgtgttgtagctgccaagaaatgagcttggggacctgcccggccgcggccggcgacgcgacggcagaggagctgcttcaacgggcgcgggggctggtgccacccgcccttgccgctgcgcgcgcggccactggcttcggtgggcggtggaaggctatcgcagcgaggctggagaaggtgccaccgtgcctgtcggacctgtccagccacccctgcttttccaagaactcgctgtgtcgggagctgctgcagtcggtggctgcgactctagcagaggccgccgagctcggtgcgcgctgccacgagcctccgaaggcagggaagctgcagatgcagagcgacctcgacgctctggccgggaagctggacctcaacctcagggactgctcccttcttgtcaagactggcgtgctgtctgacgcgacggttccggcggccccggctgcgtgcgcacaggctgacgtgcgggagctgcttgccaggctgcagattgggcacgcagaggcgaagcaccgggctgtggatggcctgctcgatgctctgcgcgaggacgagaagagcgtactgtcggcgctcggccgtggcaacgtggccgccctggtgcagctgctcacggcgacggcgcccaaggtcagggagaaggccgccactgttctgtgcttgcttgccgagtctggcagctgcgagggcctactcatgtcagaaggcgcgctgccgccgctcgtccggctggccgagtccggcagcctcgttgggcgggagaaggctgtcatcacgctgcagcggctgtccatgtcggccgacatcgcccgcgcaatcgtcggccacagcggcgtccgcgctctgatcgacatgtgccagaccggggactccatcacacagtccgccgcggccggagcgctcaagaacatctccgcagtgccggaagtccggcaggcgctggccgaagaaggcgtcgtgcgagtcatggtgagcctgctggactccggcgtcgttctcggctccaaggagtacgccgcggagtgcctgcagaacctgacgtcaagcaacgacagcctgcggcgtgccgttgtgtccgagggcgggctacggagcctgcttgcctacctggacgggccgctgccgcaggaatcacccgtggcggcggtccggaacctggtgagcgcggtctcagcggacagcctggtgtcgctttgcgtgctcccgcgcctcgtccacgtgctccgtgacggttccgtgggtgctcagcaggctgccgcggcgaccatctgcaagatgtcgagctccatggacatgaagcggctggtgggcgagcacgggtgcatcccgctgctggtgcggctgctggaggccaagtcgaacggcgcacgtgaggcggcggcgcaggcggtggcgagcctgatggggtgccccccgaacgcgagggacatgaagaaggacgagaagagcgtggccaacctggtgcagctgctggacccgagcccccagaacacggccaagaagtacgccatctcctgcctgctggcgctttcgacgagcaagcggtgcaagaagctgatgatctcccacggcgctatcgggtacctgaagaagctctcggagtcggagaaggacgtggccggcgcgaagaagctgctcgagaagctggaccgaggaaggctacgcagcctgttcggcaggaagtagccaccaggcgatcgatcgttcttcatgtacaaagatcccgtccgtcctgtttgtgtcatagcctctatgactatgatgaagtgaagtgcggcaggcagctgttcgttcatgtgaagtccctaacaatggccaaacgaatttctttct

SEQ ID NO: 21500 - DNA, 882 bp, Zea mays
  Clone ID: LIB3354-003-B5_FLI
gtcagtttccctctcccctcccgaaaccggattccgtaccgaatctggtctcgccttggagccgaggttgcacgcggttcgtcctgcggccatggaggacgaggagcacgaggtgtacggacaggagatccctgttgacggcgaggacgtcgacatgtccgccggcgacgacgcgaccaagcttcaggagctcgatgagatgaagcgccggctcaaggagatggaggaggaagccgccgcgctccgcgagatgcaggctaaggtcgccaaggatatgcaagatcccaatgcaaccacatctgaaaacaaagaggagatggattctcggtcggtattcgttggaaatgttgactatgcatgcactccagaagaagtgcagcagcatttcaattcttgtggaactgttaacagagtgacaatcctgactgacaagtttgggcaaccaaaaggttttgcttatgtggaatttgttgaagttgaagctgttcaggaagctattaagttgaatgaatcagaattgcatggtcgccagctcaaggtggcaccgaagaggactaacgttcctgggatgaagcaaccccgcggtcgaggtttcaatccataccggccatatggttatagtccttatggttatggctatggctacgggagattccccagattccgccgcccgcgaagaccttatttttgaagctcgtatgtccatatggtttgcagaacatggacgatgagacggcttgaccttatattcccgcgtcctattacttcatagcttattcgggatgttctcagacatgttattcccatattgacgatgcttaagatttgtactgtattgtttcagtgacagttacgcaaaacgattatgatctagttacgcgg

SEQ ID NO: 21501 - DNA, 1042 bp, Zea mays
  Clone ID: LIB3354-003-C4_FLI
cgctactaccgccgctagctggttcaagtgcggcgagcggagccggagaccggtagaggaaattaagaggcgtcgatcgggcatggggtgcgacgacaagaactgacttcagaagtcaccaacgcacccagcacagacataagaccctcgccggacgctcgctctcgccggggacaactcaatcacgaggccaggatggcccgctacgatcgcgcgatcaccgtgttctcacccgacggccacctcttccaggtcgagtacgccctcgaggccgtccgcaagggcaacgccgctgtcggcgtccgcggcgtcgacaccgtcgtcctcggcgtcgagaagaagtccacccccaagctccaggactccaggtccgtgcgcaagatcgcgagcctggacacccacatcgcgctggcgtgcgcggggctcaaggccgacgcgcgcgtgctcatcaaccgcgctcgcgtggagtgccagagccaccgcctcacagtcgaggaccccgtcaccgtcgagtacatcacgcgctacatcgccggcctgcagcagaagtacacgcagagcggaggggtgcgccccttcggcctctccacgctcatcgtcggcttcgatccctacacccagaagcccgcgctgtaccagactgacccctcggggaccttctccgcttggaaggccaacgcaaccggccgcaactccaactccatgcgcgagtttctcgagaagaattacaaggagacgtccggtaaggagaccatcaagctcgccatcagagcactccttgaggttgttgagagtggtggcaagaacatagagattgcagtgatgacacacgaggacggccttcatgaactcgaagaggctgagattgatgagtatgttgccgaaattgaagcagagaaggccgctgccgaggctgcaaagaagggtgcaccaaaggggaactgactccgcacaagcttagattccgcctcttgttccagagcatgtcttatgattcacctcttagatggatgcccggatgtttggatacaggaatatttat

SEQ ID NO: 21502 - DNA, 1293 bp, Zea mays
  Clone ID: LIB3354-003-E12_FLI
gcaaacacgaacatgttcaaaaatcgctcaaggttccagtcgttcttcgatagtacatgccaactaatcccactgtcgaacgattcatgcagggaactggcgaacaaactgtcgaacgagagcgaaaacatgcaggactctgacaatgtctcgatgctgacttccatgaacacaggaaacactgcaggcagcgtgtttccgttctcaaaacaaaacactgatcttttcgaagtgagcagctcaaggccagagtttggccttgttccatcggattcactgacaagttcacctcatagttccttgaagagtgtaaaaaatctgctcagctcacggagtctgagtgagcaccagagctccgcctccctgcaacactttgtggactggcccaggacgccacctgcccagggaggtctttcatggccccaggcagaggacatgcccagagctcagaggtcacaactctcagtatccgctccaatggcatcctccgagctatcatcggcctccacatctcccatccacgaccacgagaagctgattctgtcacctctcaagctgggccgcgaccgcgagtatagcccatctggcctcgtcagcgttgcaggagcaagcagagacaaggttagccagctggaagcgacctgggcgacgatgttccgcgactcttcgacgggcggcccattgggggaggttctggccaagaacagcagcaacgcggaagcaagaagttgcccgtcggcggcgccacctctaaccgactactactgctgggattcaggccacggcatgcagtcgtcccccgtgggagttctgcagaggacgaccgccttcggatcggtctccagcagcacgggcagcagccctagggtcgagagccacggcgcctgctgcgatggtaccagcaacctgatggatgatgatctcggctcagttgtagtgagccaccccagcatccgcctcttgtgagcccgctgggttctggccatggaaaaagcgtgagggggagcatttacgacgtagtttgtcatttgagactgatctcctgtttctgtcacctgagttcttctttcgttgcccttatacctggctttgtaactctcaccttcgttggatcgtgataggcgccgtgatgtgtggtgtggctgggtttttggtgcgccgttgatgcgtagtaccatcatataaactagtggactggcgcgctccatcgcgcgcgtttgaatttagcaatacaaagttttgaaataacgattagtattaaatacaaagttttgaaataacgattaatattag

SEQ ID NO: 21503 - DNA, 821 bp, Zea mays
  Clone ID: LIB3354-003-F12_FLI
caccaaatgaggtagggtttccgattgcttccgcggttcaatcaccgcctacgtagaacccctccgctccttccagctcgctctctacctgcaccagcctcgcccgcccttcgctcgccgccgccatggggaggggaaagttcaagggaaagcccaccggccgccgcaacttctccacaccggaggagatcgctgctggtacttcaggtcgccctcgcacctttaagaagaaggaggaagaggaagaggaggaagaagaaagagaagagtcagaggaggaagaatctgaagacgagtctgatgacaaacctaaacataaaggtactgagggtattattcagattgaaaatccgaacttagtaaaagtgaagaatataaaggccaaggaagttgatcttggaaagacaactgaactctcaaggcgtgaaagggaggagcttgagaaacaaaaagctcatgaacgttatatgaaacttcaggagcaaggaaaaacagaacaagcacggaaagatttggaacgtcttgctttaataagacagcaaagggctgatgctgcaaagaaacgcgatgaggagaaagctgccaaggagcagaggaagtcggaagcacggaagtaactgcaatatcatggacgatgagaccacgaaagcatgatctgcgttagttggatatttatttctaatgcatcagttatcttgttataaacctggtccctattctgtatccccataaaatatgcattgacaaaattagtaacagtcttgtgggcgtgtcttcctgtaaacttgagcttgacaaaattagaaagtagtattaaggtc

SEQ ID NO: 21504 - DNA, 1331 bp, Zea mays
  Clone ID: LIB3354-003-G12_FLI
ctccgtccaacgacggcgcgattcagatccaggcatacaggccatccttccgccgccgcggactgcacctaatcttccttctccagcagccgggcgttcccgtcgtcctcgatcgtcccctggactggatcgcaacggagatccagctggacctgcggtggtcccttccttttctcgcataatgagctcgccagtggagaggtgattcgtcaggctggtatcaagttcctagtccatggtgcctggatgagcagtagagatgctactggccgtggaaggaggagggttcttctcgtcttcagctacaggttacagccatggcctcgccctcttgctgctcggacgcaaagctgaggagaagcccgtaaaggtctcgccgtggaaccagtaccggctagtcgaccgggagaccgagcaggtgtaccacctgccctccgccaaggaccaggctcctgggaaatgtgctccctttgtctgcttcggatgcacggctaatggcctcgaggtggcgtctcctccaaaagcgacctccagcaatgcgcttggtaccggtacctcacaggaagaagcatcttgttcagcaaacaagacgttgaccactagtggttccatcagtggcagtgagagacgaggctgtcttaagagcaactccaaaagggattctttggagcaccgtatagtggtgagcgagggtgaagaaccgcgtgagtctttggaagaggtgcaaaccctgagatctagcatggaacggaggaaagttcagtggacagatacatgtggaaaggatctttttgagataagggagtttgaaacaagcgacgagagtctgtcagatgatgacccagaaaatgaaggtttccggaaatgtgagtgtgtgattcagtagatttcttgtgtgcacaacaagcctgacaggaacatctcctcatgggaagcccatgtcctgctgagaaggacatgccatatgttcttctgggaaggatatgccacacccagtgatttcattgcaactggaacgatcgatgacagtcgaaacaaagcaaacggtgatgaatcgatattgtgctagattatttgttggttctacgcttaactagtctgctcggcagggttatagtttcgatgcccacctgtacaataccaagatcccattcctttctttttgttgtcatgttttgtttctctgactttccatcacctttttcacgcccgctgtaccatatgaggctgccctgttacttctgccatggatggtggatccctgacttcatgctgttcccttttgttttgcccctaacgtgttgagtgatgtcttgttgacattttcgtcc

SEQ ID NO: 21505 - DNA, 1482 bp, Zea mays
  Clone ID: LIB3354-003-G5_FLI
gtgacgtcacgccgcgcctccaagagggagccagtgtggaggacacgaggctgccggagccgcaggtgttgctccggtcagcatcggcatggcggggcggatggtgcggagctgcgtgcagacggcgctcaaggcggccaactccgtcgtggggatcgccggcatggccgtcatcctctacgcgctctggatgctccgcgcttggtacagggaggtcgccgacctccaacaacacctcccggtcccctggtgcatctacacatttcttggcctggggatctttctgtgcctactgacttgctctgggcatattgctgccgaaactgcaaacggtcactgcctctcttgtgtatccttttagttgatagatacatggagttagatgttgcttcatataccagcttccgttgcttgtgtttgcttgctcactacctatggttaattgctaaatacatggagctacatattgtctgatataccagctgccatcacttggggtttgcttgttgactacttataatgaatcagtggttagcagcttctgctggtttatccaaggttttcagttaggtgcagaaactacacttcttttttctgggctatataattatttatacatgagatgcaagaaagaactgagttgatattgagagtcctgatctcaaattgcagttacgttctttgagttctgtgatcttttgtgcagtgagacctgacgttgatattgcgtctctttttccttaacctgacaacgtagtacatgaccatcgtatttgtgcttattatgctggaaggcgcaatcactatggatgtatttctgaatagcaactgggaagaggatttccccgctgacccatcaggcaagtttgaggatttcaagcacttcgtgagatcaaatttcgagatatgtgaatgggtaggcctctcagtggtggctgctcaggtgttatcgatcattcttgggatggtactcaggacccttgggcctgaccgtgagaccgactatgacagtgatgatgaagtgaccgtgcctgcaaggctacctcttttgataaatcagtcccagcatggttcatactatgctgaacctaacacgtctggaaggagtgattcatggaaactgcggattttagacaaggtcaacaactaagatcttaaggatctcatacaacagaccctccagtaaagactttctctccaaggggttcgggagaatgataagagtatacctttttcttcctctcatggagagatgattagcagcagcagcagtagaatagtttacacacatttgaatgcaatccaacatgcacaagtatttgagtagcatgtgacttgacccccccccccccctcctacaaaacctacacaatgtaggggaaggatgtttattgtaccaaaatgtttcagaaaagagataaagggccatgaacggtggtggtgccttcactgaccaaagacagaaatatttgttctcccccc

SEQ ID NO: 21506 - DNA, 1410 bp, Zea mays
  Clone ID: LIB3354-003-H7_FLI
gtcagccctgctctccatcgcacgccgcgcgccatggagaactccctgtgcgcactgcttcttctctgctcctccagtcgcgccctgcatttctctctccctcgcggcttctctttcccgctagctcctccctacgcgcccagtgccgtgcgcctgcgtcctgcgccgcgactcccgccgtggagcttcctcgccgccccagctcggatctcctctgccggcgcgccccaagcttctttccgcgcgccctggccttcctctgccggtgccctgtcccagtgtcgcggcgccctgctcgttcttcttggcgctcggccttgaagctcccatggctgcctgcgtcgcgccctgctccctctgtctgtttgccgcacgaagcttgctcctctgcgcccgtcttctccctcgccgtgctcctctgctgaacttggtgcccagcgcgtccctctgccccggcgtgtcgtgctctcttccatggatgccgcgccgctgcttgctctgctcggttcttcccatggcgctcggccctattcggatttcgccctcctcctctctacgtgctggagatcctcccatggagcccttgacgctagccatttctccttggtggccgagcccattttcttgctcgtgccccctctcttttcacctctacgcgcatcggctcgcccaaaccccatggtgttccttccctctcagctcccttgctgtggatttttcccagcgcgcttctctgttggccatcactgctccctgatgcccggactcgccggtcaccggtctttagctcccacgcgcgtcgctggctcactgccgtgcgctcgccccgctcggatttcgccaaccgtcattctctaacccgtgtgccggtcagcatcgtggaattttggtttgatcggctcgttattgaccttgccggtgtcgtcgaaccccttcctcagtcgcgtcgggtctccctgcctgttgtcgtcattccgcgcgttatcaagaaatctcaagagtcggatgaagacggagccagcagcgtggtgttcaccaagtgcacgacaaaaagctcgaacgtcctgcgcgactcaagttcgattcgtcaaaattattcagtcgaagaaaagatcttcagcaattgattaccgaagaaaagaaggcccctggatgacgtcaaccggaaaccgtcatcgtacttctgactattgcgtcgaagtagtcagggtaagcaaatttgttattcgtgtcagcggatggatggatggtttgactacgtataatatttattagattgcctgagtcgttttggtaatttggtcgatgtcgtaggatgaaagaggtctcaataggtctcagtgtttgcgggacagtaggtgttaaaaatgtgatgttttattaatatatgtgatacacaggttaatcggg

SEQ ID NO: 21507 - DNA, 826 bp, Zea mays
  Clone ID: LIB3354-004-C4_FLI
caaggatgagccgcgaggggaaggtcagcgtcaccagcaaccccggggagacgcccaccatgagcatgccccggagcaagcgccaggacctcgacctcaccgtcgacgacttcgaggaggacgagatcgaccctgagctgcgctactccttccagcggaacagcaggtttctgaagagagtttttagcgtggacacacttgtcaagcctctccctcctgtaatggcatacagcgtatcccgcaatataaacttcttcttccggatcttcacacagttttgggatgaagaaggaattgccaatgcccagaagtcccttggactggggaacgaggacggctcccgccgaatgcgctgatcgtggtcaaaccaagttttctgtaccgggttcagaactcttttgccctagacactggagacgtgttatacgcctcgaaagacatggcatgggacatttttagggaaatttggatccataccattaaaagatcaccactttggatccataccattactatatcacttacatgtggttccacatgagtcaatgacatgtggggtccatggtatatatctaaagtttggatcttttaatggtatagatccaattgttccacatttttaaggttggcttgcaattttgtttatcctagtgtgtctgtttcatgtatgtttgaagtccagatcttgtgcttgcaaaatagaggagtcgaggtggcacatcgaactccaggccaatggaacgaaatgcctacctgttcatttccacttcaacagttccattgtatactagtcaaagacgagcttgggcatatctttttctgcttc

SEQ ID NO: 21508 - DNA, 345 bp, Zea mays
  Clone ID: LIB3354-004-C5_FLI
tagatttccatgcaatagaagaacattggaaagcagcgaggagcgaagggccaagattgagcagtggaaccgtgaacgggagggaaaacagtgagctctccgtggctactgttcgccggacttgttgcttagctccggctctcatcgctatattctaagtatgcttgtgtggatggcattctgcctggctaagtaaaaccttttaagatcaggaattcaggattcctcggttcattttatggttaaaccagacatcatttgtttccatctgtgttgtgtcggatcctttgctattatgttattttgacaattggtgtcaaatcttttgtggtgtgctattagctt

SEQ ID NO: 21509 - DNA, 1648 bp, Zea mays
  Clone ID: LIB3354-004-G3_FLI
cagatatcttatgcaactgtggatatttataataacttttcagtctgaaccccaggccattataactaacgcaagcaaaaacatagagccttttgtattattattatgtgcatactgtatgcctcactggaaatatggtttcttttttgacttggtggaaacctcactaagacatcagcaaattagtattgtacttgcttcactggacatggaagtagcaaattactctgcacttttattggattaacatttgcatctttgagcagcttccaagcttcccctctacgcgttcaagttgactccggcaaagggctcgcaggaggatgctgcttcaaccaagttacttgttgatattctccttagtgagtgggaggacaggatgactcgaggcttattccgctacgatgtcactgcctgtgagaccaaggtcattcctggcaaccttgggtttgttgcacaactcaatgaagggcgccatcttaagaagcgccctactgagtttcgtgtggaccgtgtgctccagccgtttgaccctgccaaattcaatttcacaaaagttggccaggaagaggttctcttccaatttgagaatagtggtggtgatgacagctatttcctgaacaacgctccaatcattgctgttgatcgggctccaaatgttattgctatcaatgtaagcccaattgaatatggacatgtgcttctcattcctcgtgttctggaccgcctgcctcagaggattgatccagagagcttcttgcttgcactgcaaatggcagccgagggaggtagcccatacttcaggcttggttacaatagcttgggtgcgtttgccaccatcaatcacctccactttcaggcgtactacttgtcagtgcctttccctgttgagaaggcagctacccacaagatcccactctctgaggacacgaagaagaatggggtgaccgtgtccaagctgataaattatcctgtgagaggcctggtatttgagggagggaacaccctggacgacctggccactgtggtttctaatgcttgcatttggctgcaagacaacaatgtgccttacaatgtgctcatttctgactgtggcaagagggttttcctgttcccccagtgctacgcagagaagcaggctctgggtgaagtgagccaggagctgctggacactcaggtgaacccagctgtgtgggagatcagtggacacatggtgctgaaacggaggatggactatgaggaggcatctgaaacctccgcgtggaaactcctcgccgaggtctctctctccgaggagcgcttcgaggaagtgaaggcgtacatcttcagcgctgctggcctggttcagtatgatgaggaagaggaggaagccagcgacggtgagggccctacggcctatgttcctgtcaaggttacccctctgcccgtcgctgaagggtgcctcgtcctcccgtgagtccgtggtcggttaaataaagggccgtatatgattgcgagccctgtgctctgccgctattttcttctcgtttgtgtcttgctgctctcgtggtgaactcgctactccagtactctgcaatattaagcagaagctattgtattgtttgggtcgtttgtcagctaaattgaaatgcgatggacatttactagt

SEQ ID NO: 21510 - DNA, 833 bp, Zea mays
  Clone ID: LIB3354-004-G8_FLI
tttgcttccaaattaactgcgaaggcaaagccgtgccgaaggcctcgccgcgccgctcccacacactacaccctcgccgccgctgagactcggcaaactgcctcccgttccatgggctgcgtaggatccaccccggccaccaaagatgccgggggaagtagcgatgtcaatcatggcactaagagagtgaggaaacccaaagcttggaagcatccccaaccgataaccatggcccagctcaggcagatgcgtgaggagttttgggacaccgctcctcactacggtggtcagaaagaaatctgggatgcccttcgagttgcatcagagtctgaggtatcccatgcacaggctgttgtggaaagtgcaggcataattgtttctaatgccgatctgactctctgctacgatgaaaggggtgctaagtatgaattgcccaagtatgttttgagtgaaccaaccaacctgatccgagacagctgaacggcagccggccgtaggaagacccaccgatgtaaaaactgtaaatgactgcagatgccgccaaattggtcccttgcttgtggtaactggagtgcctcgagtaaccttcagatttgctttggcaactttcggcaatagggttttccagttctagtgttcagataaaaaaaaacttttgcgtaccctcgtctattgttcttggttctactgtaaacatgagtctgcttagaattctttggagcgagaatgctgctgagattgttctcgtccactatcatgatacaagctggagcatacgttttagaaacttgtcacatctcgtgcaactaattatattattatgtggtctggtc

SEQ ID NO: 21511 - DNA, 1664 bp, Zea mays
  Clone ID: LIB3354-005-A11_FLI
cagagcagaagagaaacgctgcagacacgcgccaggaagcacgcaaacgcaccaacgtactagcagctagctagctagctagcaagctagggcaaacaagcgcatggcaatggtggagctgttgtcgactgagctggtcgtcccagccgaggagacgccggcgggcgccgtgtggctgtccaacctcgacctggccgcgcggcgcgggtacacgcccacggtctacttctaccgaacgaacggcaagccggagttcttcgagaccgacgccgtgaaggacagcctggcccgggcgctggtgtcgttctacccgctggcgggccgcctggggctggacgccgccaccgggcgcgtgcagatagactgcacgggggagggcgcggtgttcgtgacggcgcggtgggagcagtacgcgctggacgagctggtgggcgagttcgtgccgtgcgacgagatgcgggcgctgctggtgccgcccacgcccgcgccgaacccgccgtgcccgctgctgttcgcgcaggtcacccgcctccgctgcgggggcgtcgtgctcggcctcgccctgcaccactcggtcgtggacgccaggagcgccgcccacttcgtggagacgtgggcgagcatcgcccgcggcggcgccggcgccggcgccggcacccccctgccgccctgcttcgaccacaggctgctgagcgcgcggccccccggcgcgcgcgcggtggcgtacgaccacccggagtacaaggccgaggcaccggcggcggcggatggcggtgctggtggcggcgccgccggctacgcgagcgccatcgtgacgctgagcaaggcgcaggtggcggcgctgaaggcgcggtgcgcgggctcgtccacgttccgcgccgtggtggcgctggtgtggcagtgcgcgtgccgcgcgcgggcgctcccggccgacgccgagacgcggctcttctccatggtggacatgcgcgcgcgcctggcgccgccgctccctccgggctacttcggcaacgcggtggtgcgcacgtcggcgctggccacggccggggaggtgacgggcaaccccgtggggtacgcggcccggcgcgcgctggcggcgaccagccccggggacgactacgcgcggtcgctggtggactacctggagggcgtggacgccatgaacctgccccgcagcggcatctcgcgcgcgcacctgcgcgccatcagctggatgggcatgtcgctgcacgactccgacttcggctggggcgcgcccgtcttcatggggcccgcgctcatgtactacagcggcttcgtgtacgtgatgcaggcgcccgggaaggagggcgccgtcgcgctcgcgctgtcgctggagcccgagaccatgccggagttcaggaaggtgttcgcacaggagctcgcgaggctccaggcgatatgatgaatgatgatgcacgtaaccgtgcatgcgtcgtatctacgcactactactactagatgctgaggggtgggttggtaggaggtgtactgtttgtggttgtgtacacaacacctggccatccgacacaggtgacatgggagtccttgtcgtcgtcgtcttcgtcgtgtcgtcggttgcagacagcagcagagtcattaccatgcataagctcatgtcacatcagcattacatttaatttggc

SEQ ID NO: 21512 - DNA, 1081 bp, Zea mays
  Clone ID: LIB3354-005-A12_FLI
cgtggccctagggttcatctcgccgcctccctcaacctcttgattccgcctccctgaaggcataccagcgagatcaagctattttgctggccagccgatcggtcaagccgacgatgacgctcggatcggcggcacacaagatcccgctggaggttgcgcacaccctcgtcgagatcgccgaggtcgcgcgctatgcctaccaccaccgccccggccgccctgcaacccacgagggggacccgactgcgccgcccgcaggggctgatagcagcgggggcaccaacgaggatgccgcgcggctgctggaggagaacgccatgctccgcgcccgactcgcagatgacttggcgctcctgcgtgagctccacggcgcgccctgcgtctccaaggagtgccctcctgatctatacaaccgattgatggcggcggtcaacaatgttagcttccttgctcatctcgagaaattacaggatgagtcagcacgtcaacataatgaactaacttctggcgacatgacagaggtggaagttgcagacattccgtacaaagcgggtaacgggaagaaaggattgtgggtcttggtcccttgtgatactgctggagctaatttggaggaaattagtgggattgatgatgaaaattatgtcatagtaaatgaagaagatatagtcgatggtattgccgcctttgttgctaggtgcattcttgaagatccaaaatccaagtcgttatcgccaatgcagctccaaaaggctgttgcaaaggcattagatagcatgaaagctcgatggagatggtcaaccttttgggaggctggacagattatatatatcttggctacttggggcatcacattagcagggttgtacaagagccgccatgtcctgaaggtggcagcaaagggtgctgctgtgtctgccagatttgttatgaaggccatttgagtgtaagaggcactcatgtgggatcagcaatttgcaaaatgtaaatacaaaactcgtcccgtcagttgtgcatatggttgtggcatgtttatcatgatgaagttatgatcatccagacatgaaaaactgtttcattt

SEQ ID NO: 21513 - DNA, 700 bp, Zea mays
  Clone ID: LIB3354-005-A8_FLI
ggttgctctagatccgttcatcctggtggttttgtgaggtcgaaagcggcgagcgaattagaagatgctggacaagctgtgggacgacgtggtggccgggcctcgcccggagacgggcctcgagaagctccgcaaggccaccaccgcccgtccgctcgtcatcaacaaagacgcggacggcggcagctacaagcgggcgcagtcgatgccgtcgaccccgacgacgccggtgacgccgtcgtcgtcgtcgtcgtcgacgacgccgcgcggcgccggcaacgtgtggcgcagcgtcttccacccggggagcaacctggccaccaagggcatgggcgccaacctcttcgaccggccgcagcccaactcccccaccgtctacgactggctctacagcgacgagaccaggagcaaccaccgctagatcgggcgagatggatggacagtgaagaggccatgtttgctggtccttgtggttatctaaaacgcacgcatgctctattatagctagtcatcactatatatatacttgtgtttgtgtattgttgttcttgttctgctggtgtctccgccgtttaatttgacctatgttatggagtgagtgatatatgtgccgtcactcctagtatatagtagtgagtgactagttggtatgtgtagtactgtactatcttttctccatatgcatgttttgccagcgcgt

SEQ ID NO: 21514 - DNA, 1094 bp, Zea mays
  Clone ID: LIB3354-005-F3_FLI
gccggatatgtcgtcgtcggttgggggcggcagcgcgggcggcggcggagtggacatggtcagcctgctggagaaggccaaggagttggaccagctaaagaaggaacaggacgaaatcgttgccgatatcaacaagattcacaagaagctcctcgcatccccagagatggttgataaaccagttgacaccattttgctcaagcttcgtggtttatatgcacgtgcaaaggagctctctgagaatgaaatcagtgcctcaaatgctttgattggattattagatggtttgttgcaatctggagcttcaactgcacaaaagaaaaagatagttgctttctacatttcagaagttggtgagcagaaaaagaagaggatcaagtctgatacagattctgcacgattttctgctgcatctatgaggaatcaacttgaccaagctgcaagccttaaaggagagcaggttgctgctagggtaaaatcagatgacgaaaaagacgagtggtttgtcgtgaaggtcatacatttcgataaggagacaaaagagtatgaagtacttgacgaagaaccaggtgatgacgaagagagcactcaaaagaagtacaagttgcctatgtcttacattattccatttccgaagaaaggggatccttcgagtgccccagattttgggcagggtcgacaagttttagctgtttatcctggcacaacagcattatacagagctaccgtagcttctcatcgtaagaggaagtctgatgattatattctggagttcgatgacgatgaggaggacggtgctctgccgcagagagccgtgccgttctacagggtggttgccctgccggagggccacaggcagtagtgacatttgacgcagttctgcattcctagtgtaacatatagcgcaaggtagggtgtcttcagtgtgacaatgtggtggtcatatctacgcgaaacgagagagaaaacaaggacgtgcatgtagcacttacatgtggggtccttgtataaaagacgatgatgttttttttttcaatctgctagagcacgtctatgtaattgcaatccagttttaatctcttatattatacttt

SEQ ID NO: 21515 - DNA, 1622 bp, Zea mays
  Clone ID: LIB3354-006-A6_FLI
gctgggaggtggcttcagctacggcgacctagctcaacatgggccactagagcagagaccaccagttgtactcttcatttaagtctcaccagaatgtacgagacgagttgttcatcatcaacaatcttctttgcaaataccatctcttctgcaagagagattatcttgacaatatattctagtgtcgatggactgtatatttatacaggcaggagccgactattacaagaagaattctactcgttacaacatactaaccaactaaataaactggacacatgcaattctgttttgttcttatttgtaatctataattagagctggttttttatctagcccaagagaatcctgggcaactaaggttgtagcctatgtatagcatattctaacagatggtttgcctgcaaatgcaattactcagcactttgcattcttttttggcgtttccatcttttttttcttctatcagtcatcttttctgatttatgcaggtaagatgcatagtaagaaatatcgtgagagattggggtgatgagggtcaaaaggaacgtgatgagtgctataagcccattcttgaggagcttaatcgcctttttcctaaccggagcgatcagaggcctccttcatgtcttgtccctggtgctgggcttgggagattggctcttgatatatcttctctgggttttgtaagccaagggaatgaattctcatattacatgctgatctgttcaaatttcatcctgaaccacactcaagaagctaatgagtggtccatatatccttggatacatagcaactgcaattctctttctgacaacgatcaacttcgtcctgtttcatttcctgacattcatccctcaagtgcaggtatcacagagggattttcaatgtgcgctggggactttgtagaggtctacagcgaggaaagccaagaatctgcatgggatgctgttgtaacttgctttttcctggatacggcacacaatatcgttgaatacatcgagatcatatcaaaagttctcaaggatggtggggtctggattaacttgggtccccttctgtatcactttgctgattcatatgggccagatgatgatatgtctattgaattaagtttggaagatgtgaaaaaggttgcttaccattatggatttacaatggaggtgagggtttctgcattaaatctatttttttaaagagttgttgtgatagcatacttcgatatgtgatttgcaggtggagaaaatgatcgagactacttacactgcaaacatgaaagcaatgatgcagaatcggtaccgtgcagcattctggacaatgaggaaagatgcgtctcggtcaaaagcttgtaagcctcgttgaagtgaagatcatccatggcggacgatcagttcgtgccatcattattcactgttgtattcaaactccacacaggccgtgccagaccaagttagatagatatatcagatgagctgcctgattcacagaatataattggcttaacataggaaaggaggtgctgagccccgctagctagctcacccttttctcctatatcacagatattcaaactgtactatgaactctgtaagaatgagcaataaactaagcagacagaagtt

SEQ ID NO: 21516 - DNA, 1476 bp, Zea mays
  Clone ID: LIB3354-006-G1_FLI
ggctctcagcttactggactggctttaagtcaccagagcaaatatcacgtgttcgcaacactggggtgaagcctgaaatactgaaacgtgtaggtcaggcaattactacactgcctgaaaacttcaaaccacacagagcagtgaagaagatttttgagctgcgtgcagctatgatagagagtggtcaaggaattgattgggctgttgccgaagccctggcctttgcaacacttatagtggaaggcaatcatgttaggctaagtggacaggatgtggaaagaggaactttcagccatcggcatgcagttctgcatgatcaggaaactggagcaaagtactgcccacttgaccatgttgcaatgaatcaaaatgaggagctatttactgttagcaacagttcactttcagagtttgctgttcttgggtttgaattgggttactccatggagaaccctaattcattggtactttgggaagcacaatttggcgattttgccaatggtgcacaagtgatgttcgaccaatttttgagcagtggcgaggcaaaatggttgcggcaaaccggccttgttgttctgttgcctcatggttatgatggccaaggtcctgagcattctagtgcccgcttggagcgcttccttcagatgagtgatgataatccttttgtcatacctgagatggaaccaacacttcgcaagcagatacaagagtgtaactggcaagttgtgaatgtgacaactcctgcaaattattttcatctgttgcgtcggcagatacatagggagttccggaagccgctgattgtaacagctcctaagaacctgcttaggcacaaggattgcaagtcaaatctttcagagtttgatgatgttgaaggccatctaggattcgataagcagggaacacgtttcaagcgactgataaaggaccgtaatgatcacaagcaagtcgaggagggtgtcaaccgtcttatcttatgttctgggaaagtttactatgaacttgacgaagagcgtaagaagtcggagcgtggcgatgttgcaatttgcagagttgagcaactttgcccgttcccctatgaccttatccaaagagagctgaagagatacccaaatgcggagattgtgtggtgccaggaggagcccatgaacatgggtgcatacagctatatctctcctcgtctgtttactgcgatgaaggctcttgggcggggttcgtttgaagacatcaagtatgttggcagagcaccttcagctgctacagcaacaggcttcctgtcggttcatgcgcaggagcagtcagagctagtgaagaaggcactgcaggcagagccgatcaaattcctctgatgtatgcaccgtatctacagcaacaacctgcctgcatggttgcaggaacatgccagggattttcttttccccggccagttttgaggcttttcagcgttggaactaatgacgacttccttccttgaag

SEQ ID NO: 21517 - DNA, 1512 bp, Zea mays
  Clone ID: LIB3354-007-B12_FLI
gaccaaataaacaatccactgtctcctacctccgcggaagcatcaaacaaatcaccctgccgatcgccatggacgaacagcaggcggaggagggcgaaagcgcgcgcgtcaagaggacgccggaggaggggtcgtcgccgctgtccgctctggcggatgacgtgctgctacagatcctgggacggctcgaggcggacccgcgggactgggcgcgggcctcctgcgcgtccccgcgcctcgccgctctgctccgggcggcctgcctcccgccgcgactgtcgcgggcgctccccgccgagctcctccccgcgccgtcaccggacggggcgcccgcggcctgggcggcgctccacaagctctccgtctgttgcccggggctcctccgcgccggggtgctcctcgagcccaccgacgatttcgggctcgatctcgacatcgggcctgacgtccccatctacgcccgcaccgacgcctcctccgccgaggggttcgaggccacggccacctcccgccacagcggaaccatcgtcgcggccgggagcgcgccccgcgccggcgaatctgccaacgtcgccgcgtggtcgctctacgacgacctgtacctggacgcggcatacgactgctcgtccgagctgcagatcccgcctgccgctgcggctgtggaacccgccccgcccgcgcccgtggcggcgatccgcgacgtggaggaagcaacgaccacaaatgctgtctcatgcggcgtcgcccggcgcggcgtggtggccgggagccgactgcatccgcggcggtggctgggcaccgtcggcgcgcacctggcatcggggtcctggacgctgagccgtgagcaggggaacaagctccttgccagccgcttccgcggcgaccggctatacctctgcgactggcccgggtgcgtgcacaaggaggagcgacgcaagtacatggtcttccgcggcgtgttccacaacttcgcccggtctcaggtccggcgcgcgctcagggacacgcgccgccccaccgtcgccatcgagtgcgccttctgcggctgcaaagagacctgggacctctactcggctttctgcctccgcagtttctacggctaccacgacgacggcgagcctgtggtgcgcgcctacgtctgcgagaacggccacgtcgcgggcgcctggaccgaccgcccactctactcctgatcttggagtggacactccgactgacatggtattgcatcaaagactgcaccctgccattgccagatgctcgctcctaccacttgagctgtttctagacataattatgcgtgcctgcatatagcaatccggattttcgtcatgttctgatacacgtgggatgtgtattctttatttctttcttcttgctgttgctgttgtttgtgagaatggttgagtagaataaggatgccggttgatttgcagcataggatataaagagatttgcttaaaattgtaaacctgatgctacgagaaattggaaccgctgttttattgccac

SEQ ID NO: 21518 - DNA, 1292 bp, Zea mays
  Clone ID: LIB3354-007-E5_FLI
ggagaagacacctcgtggatttcatggtattgcaacttaagagggaatgagttcttctgtgaagtcgatgatgactacattcaagacgacttcaacctttgtggcctcagcagccaagttccttattatgattatgctcttgatctcattttagatattgaatcatctcatggtgatatgttcactgaggaacaaaatgagctcgtagaatcagctgcagagatgctttatgggctgatccatgcacgatacattctgaccagtaaagggctggctgcaatggtacatgttctgctctaactggtgtattcacacttagatgtagttttatatattaaggttgctttcttgtacagctggagaagtataggaactatgacttcgggcggtgcccgcgtgtttactgctgtggtcaaccatgcctgccggttggacaatcagatattcatcgatctagtaccgtgaaaatatactgccccaagtgtgaagacatctactacccacggtccaagtaccaaggcagtatcctaaccatactcttattatactatctttatgcgtgcgtttcaaactttgatctcttcgtgagaactcaaacgtatggtatttttgtaccaagtctgacacagctaccaatgttctcatgtcttagcacccatttacctacagctctttgttggttgatacagaaaactattaaacatgaaaacagtccactgcgcccaccaatcaccatgttttttcaactcccatagatataatattgtttagtgcctgagatgcactagctcttttctgtgttactgtggttccttagttgtagaatgtttgtcattttgttatatgctgctattttcttaaccttgtttagacatcgatggcgcatattttgggacaacgttccctcacctgttcctgatgacatacgagcacctcaagctacagaagcccttgcagcgctatgttcctcgtgtctttggcttcaagctccacaagccatgagcctcatgtatttggcttttaagctctacaggatgtggctcactgggggaaaacccagagttttgcgagatcaaggtccttgaagactacatataagagcgccattggctacatataaaagcgctattgacagatcagtggattgataaaactccaccatgcagcggagcgcttttaccttacctggctggcacctaccaacatttgaatgtagctctaaggataacgatgttgttgtaacctaactgtaattgtttttttgattagtaaaccaggaccccgtacgatgt

SEQ ID NO: 21519 - DNA, 724 bp, Zea mays
  Clone ID: LIB3354-008-C7_FLI
gaagatgcatttcacaatatacggcttgaggaacttggtgattgcaggagccctagctggtggagggataaccatattgcctaatcaagctgaccttgtgaatatgagatactgaagggctcccgcaaggctcagatctttgcctaaggaaatctttgcctaagcatccactagagtggcacatagcttatagtcaaccatgccagcgcactcaagtcgtatattttgaagatgcatttcacaaacagtttcgtgagcgctcaggtcatccacacaccgacagccacggtcgcatgctctgcaagctctcaggagaaactcctgaggccaagcatggagtcgacacgggatgttgctgcggctgcaaagattgggaagttgcttggagagcgcttgctgttcaagggtatccctgcagtatctgtctccatgtcaagagaccagaagtaccatggcaaggtcaaggccgtgatagattctctaagaggtgttggtgtgaaattgctgtagggaaaactgactgttttatgagaggttatgttggggcctcatgtttacctccgaagctgcttggcggtccattagtttcgtgactgaattttcttatgggtgctgctgaacaatatcttgaaccatgtaagtccttgttcggttgttcctatacatcatggattggaaaagaaaatatgaaagattttgacttggaatggattgaaaaaaaaat

SEQ ID NO: 21520 - DNA, 1652 bp, Zea mays
  Clone ID: LIB3354-008-F8_FLI
gtcttcacaaacgccggcgcaaactcttgcccgagcccgacagatctctaattccccataccgtccaccgatcgaccttcacgccagtctcggtctcttccgaaggcgtcgcgcgcggttgtttgagaggagaggaggaagatgagggagtgcatctccgtccacatcgggcaagccggcatccaagtcggcaacgcgtgctgggaactttactgcctcgagcacggcatccagcctgatggccaagtgcctggagataagaccgcgggacatcacgatgatgccttcagcaccttcttcagccagactggtgctgggaagcacgttccccgtgcaatcttcgttgatctagaacccactgtgatcgatgaggtgcgcactggcacgtaccgccagctcttccaccctgagcagctcatcagtggcaaggaggatgccgctaacaatttcgcccgtggccactacacaattggcaaggagattgttgatctgtgccttgaccgtatccgcaagcttgctgacaactgcaccggcctccagggcttcctggtcttcaatgccgttggtggtggcaccggctctggccttggttctctcctccttgagcgcctgtctgtggagtacggcaagaaatccaagctgggcttcactgtgtacccatctccccaggtgtcaacctctgttgtggagccttacaacagcgtcctctccactcactcactcctggagcacactgatgtctctatcctgctcgacaacgaggccatctatgacatctgcaggcgctccctcgacattgagaggcccaactactccaacttgaatcgccttgtgtctcaggtgatctcatcgctgactgcttctctgaggttcgatggtgccctcaatgtggatgtgaacgagttccagaccaacctggttccttacccgaggatccacttcatgctgtcctcctacgcaccggtgatctcttctgcgaaggccttccacgagcagctgtctgtggcggagatcaccagcagcgcgtttgagccggcttccatgatggtcaagtgcgacccacggcacggcaagtacatggcttgctgcctgatgtaccgcggcgacgtggtgcccaaggacgtgaacgccgcggtggccaccatcaagacgaagcgcaccatccagttcgtggactggtgcccgacggggttcaagtgcggcatcaactaccaggcgccgacagtggtgccgggtgccgacctcgccaaggtgcagcgtgccgtgtgcatgatctccaactccaccagcgtcgtcgaggtgttctcccgcatcaacagcaagttcgacctcatgtacgccaagcgcgcgttcgtgcactggtacgtcggcgagggcatggaggagggggagttctccgaggcacgcgaggacctggccgccctggagaaggactacgaggaggtcgccgcagagggcggcagtgatgacggtgacgaggaggaggaatactgatctgcttgcatgaatctgtttggctgtcgagccaggttgtggtgttgaaaaacctttgtttgtgtcctggccccctgggtaatgtttgggtgtttccttccatcatcacttgctgaactgctctagtatttgcatttgtaattgaagtctgtcgcttt

SEQ ID NO: 21521 - DNA, 1419 bp, Zea mays
  Clone ID: LIB3354-009-A2_FLI
gcaaaactcttttattgtgtctcttgtcaaaagttggcttcttagtggtgattatgggaaatagggggagtttttgaaatctttgatcaatctcttttggaatgactctctttatgcttcaacatgtgtttttgacttagagatagagatttgagtttgatttgcaaaaacaaaccaagtggtggcaaaggatgatccatatatgccaaaattgaatcaaaatcaatttgagttttatttgaagtgattttgcacttgttctagttgctttatgttgtgttggcataaatcaccaaaaagggggagattgaaagggaaatgtgcccttgggccatttctaagtattttggtgattgagtgccaacacaagtgcttaaatgtaaatcaatgcccatggatgaacaaagtgcaaatctagagcaaaggtatgtttctaagtcttagtacattggttttgtgtactaatatacttgtctaagtattggaaacaggaagaaaaaagaaaagaaaaaaagttggctgtatacagccagaagactgcttcggtctggagcaccggactgtccggtggtgcaccggacagtgtccggtgcgccaggctgcctcggccgaagaggccgctctcgggaatttgctgacggcgtacggctaaaaatcaccggactgttcggtgtgcaccggactgtccggtgagccaacggtcgaccgggccaacggtcggccgcggattctgcgcgcgacacgtggccaagccaacggtcggaagggggcaccggactgtccggtgtgcaccggacatgtccggtgcgccaacggctcccagatctgcaacggtcggcttcgccatttaaggaaaggaatcgggcaccggacactgtccggtgtgcaccggactgtccggtgcgcccgatgacagaaggcaaggatggccttccagatttgttctcaacggctcctagctgccttggggctataaaagggacccctaggcgcatggaggagcacaccaagtattcctagaacattcctaagcaccaagacatcgatctcgcgcattcgtttcattgtgatagcatctagagctcttgttgagttgcgaactctttgagttgtgttgcgagctcttgttgcgacttgtgtgcgtgttgttgttctgatcttttgaagtcttgtgtgcgttgctcattcccccttttgctctgtgttctttgtgaacttcaattgtaagggcgagaggctccaagttgtggagattcctcgcaaacgggattgagaaaaagcaagcaaaacaccgtggtattcaagtgggtctttggaccgcttgagaggggttgattgcaaccctcgtccgttgggacgccacaacgtggagtaggcaagcgttggtcttggccgaaccacgggataaaccactgtgtc

SEQ ID NO: 21522 - DNA, 1179 bp, Zea mays
  Clone ID: LIB3354-009-B1_FLI
gaagggagaaggggcagagggaaaggtgtctgaggagggagaaggggcaggggggaaggtgtctgaggagggagaaggggcagagggaagggtgtctgaggagggacaaggggcagagggtaaggtgtctcaggagggacaaggggcagagaaaataggacatgaggatgagaagaagggagcagcagtgggcaccatgaaagtgaagacgggagaagaaggtaataagggtgcatcagagcaatcggaggcacagatatttgtgcagatggtagcggcatttggattgaaggataagttcgatgaggagttcttgagaaggctgtttgttgctaatggacggaagagggagcttgctaggattgcatgcgtgcttggatttgaggaaagccttggagatattgttgaggaactaataaagtcagggaatgctatagaggctatatatgttgcccatgaggctgatttgcttgggaaatttccacctgtgcctctcttcaaatcttatctgcagaattccactgataaggctcaggcagtgttgaaaagtggaagacattccagttctgcacttgaagaggcaaacagcttggagggcaatgcatacaggtccgtcataaggtgcgtcgagtcctgccagctacaatcggtgtttcctttagaggtcctgaggaagaagttagggaagttggagaaagagaagtctgataggaagaaggcagctggtccaagcagattcccgaacaagcgatcccgcggcgcagctggaccctatcccttccctgctgccaaggctgctaggggctcaagctttggtccgcgtttccagaacccagtctcacgttccttaaactacgcacctcatgctggatatataaacccagcagctgcatcaccattctctgtccctgggagcgtgtcggggagacgaggtggtgtaccatatggcggacctggagccacgtatggtggctcccctagctttgcaaccggtggtgggcagcaaccattccgtcgttaggtctagggctgtttgttgtaactgaatgctccttgttttctggctaatagggataatgtatgcctccagctattcaagcatacttgttcagttcttgatggatgctggatattgaacgtcgtgtagtacacattctatggtactgtgtttgctttgtt

SEQ ID NO: 21523 - DNA, 1078 bp, Zea mays
  Clone ID: LIB3354-009-E5_FLI
ctcgtcctcgtgcccatctctgtcccaatcaaactgattgatccgtcgcccgcagggccacagcagccgcggcgaggtcgtccgtcggattcggaggctcagttattactgaaaagataatacagtacctatggcttctctggacgccgtgcgaggagacctcgccctgctgattctgtacctgaacaaggccgaggcgcgggacaagatctgccgagcgatccagtacgggtccaagttcatcagcaacggggagccagggcctgcgcagaacgtcgacaagtccaccagcctggcccggaaagtgttccggctctgtaaggtgctgctgctgctgctgctgctttgctctcgcatcatggtgtggtttcgttaggactcagagcctgtcctcgttttacagttcgtcaacgacctgcacgctttgatcagccctcctgccaaggggactccgctcccgctgatcctactcgggaagtccaagaacgcgatgctgtcgactttcctcttcctggaccagatcgtgtgggcggggaggacaggaatatacaagaacaaggagcgggcggagtttctcgggaggatagcgttctactgcttcctcggctccaacacctgcacggccatcatcgagctagccgagctgcaacggctgtccacgtcgatgaagaagctggagaaggagctgaagcaccaagagctgtacaagaacgagcagtaccgcatgaagctgcacaagtcgaacgagcggctgctggcgctcgtcaagtcgagcctggacatcgtggtggccgtggggctcctgcagctggccccgaagaaggtgaccccccgcgtcacgggcgcgtttggcttcgccagctccctcatcgcttgctaccagctgcttccaagcccaccagcaaagcagagcaagtgaggactcccactccaagcactgtttaccaggaaaataatcccccccggataggtttgatttggttgccacatccccttgtatggcagactagactaatatatgtaatcatcatcataataattgataaaccatcccactatggataggtttggtcactcc

SEQ ID NO: 21524 - DNA, 1042 bp, Zea mays
  Clone ID: LIB3354-009-G8_FLI
gagagcccccccacggcgttggccttgagaagcctcgccgactacaccgtcggggccatccccaccctattctatgtccccgacttcatctcccactccgagcaatcacagctcctccaccatatttaccaggcaccggcgcccaagtggaaaaccctcaagaaccggaggctacaaaactggggtactctttgtcttcttcgcacttggtggttttggcttggagattgctttagcttcctcctttccttgacacggtgtcggattgagcaggaggagtggtgcatgagaaggggctcctgccgcaggcctccacaccaagatggtcctgcctactaccctgtcgttgctatcatatctcttgcttcacctgtcgtgattaatttcacaccccatcaaaagcttaaagagcagcaggacactgatccacaggacttactggcccatgagttgccttcgccagctgagacagagaacaacggctctggatcacaagaacgtggagccacaaatgaatctgatccttcatcttcatcacttatgctgatgccgtgcagcctgttgatatttaaggatcaggcttatacagactacttgcatggcatacaagatagtgagctacataatctggacaaggtggagaatgtgtctcagtgccaagaactgaagcatctacattcggactctatcctagggggcatgagcatggaagagcatgacacgttccgcaggtccgccacaagagtctcgcttacgtgtcggttggtgctgaaagtccacaaaaagctattcaaaatctagaaattctgattatagcttgtgatttagaatagggctgccattattctttgtaagatatatataggtgttgtgggagttgtttggccagcatggtgtccacaaaacaaaaaaacattttctggtcaaggatcccaaagagctgttgagcccagtttcttagaaatcgaccaggaagcatgggaaaggaacaataaaccattggttatgatgttcgagtaggagatgatgctgttttccgtgc

SEQ ID NO: 21525 - DNA, 956 bp, Zea mays
  Clone ID: LIB3354-010-D4_FLI
cagaaacggcggtggttactggaagccagcttggccggttcggttgccaccaacgcgccccgcaaaatctcgtcgccgaccgccatggcagccgccgacgcgtcgcgtacgctgcttgctgcagtatctctcgccttagctgcctgctgcctcgcgcagctggcggcgggggatacgaacggcgtctacgagccgtgcagcgacggacggatccagcgcggggacggcttcaccttcggggtcgtcttcgcgggatacaacgccttcttttccggcaacacacagctctccccctgcgaccgccgcctcaacctcgctgcctccgggcagctcgccgtcttccgccccaaggcttcagctggtggatttatggtagcatttgctggtaggaagtatgcagctagatcaatcccgatattcgtatccaacacctcagttacagtgtccagcttcaccctggtgctcgagttcaacaaaggcagacttgaaaacctgcactggaagaaggacggctgcggtgcctgctccggcaaatcaaacttcgtctgccttggcaaacagacatgcgccatccggacgcagagctgcaagagccaagggcctgtcgactgcagcgtcggcatccagctggctttctccggcacggacaagcacgagtcggttctgaactcgtggtacgaggtgtccaacctgaggcagtactccctctacgggctctactcaaacctcaagggcaccctgagcggccagttcaacaagatcttctaggctgttttggcgctgccattgtttattctcccccctcttctttctgtcggctgctccggttcctcatgttgtgcttgattcacattcttttagttgccgcccgcccaggttgcttgtatccagattccagacctgttataacgctgtctgagctctaccgtatgtaccgttggtgtcattttagcgcc

SEQ ID NO: 21526 - DNA, 1529 bp, Zea mays
  Clone ID: LIB3354-010-E10_FLI
ctcggaggagaggagacgagacgacccaagactttctcacccccctttgcttcctgcgcaattcctgcggcagcgcctttctctctttcaatggacagcgactacgttgccagcctgctcatgggcatgggctcatccgcccctgcgctcgacttcgccgcgctggacgccgggttcctcgaaacgctctgcggcggcggcggcggcctcttcggggtgtccggggtcgccgcgggggccgggtgtggcggcgtgtccccggaagggtcgtcggtgtccgacccggcgtgggcgcgcgccagggacgatgacaatgtcaggaagcgcaaggagccgcccacggggtccgccggcggcaaggaggcctgcccgggcaaggctgcggaggccaagggtccggacgggaagaggtgcagagtgggcggcagcgacagcccggtgaagccgaaggtagaggaggtggcggcgagcgacgcctcggttgaactcaaagcgcagaagaagggcaaggggaagaccgccaagccggcagtcgaaccgcccaaggactacgtccatgtccgggcgcggcgagggcaggcgactgacagccacagcctcgcagagagggttagaagagagaagatcagccagaggatgaagtttctgcaggacctagtgccaggatgcaacaaggtggttggcaaggcactcatgctcgatgagatcataaactacgtccagtcgctgcagcagcaagtcgagttcctgtccatgaagctcgccactgtgaacccacagcttgacttcagcaacctgtcgacactcctacacaaagacatgtaccaaccatgtggcccttcggcaaattcggtctttccactggaaagtgacggtgcagctttcccattctgtgaccaagcggatcttttccacagctttggttcgggttcggctgctatggaggatcagtgctctctaagcctgctagacacggctctgccccacgcggccaacccacagtttgcttttcaaaagcagagggacttctgggaggatggcctacagaacgccttgcctaccggtagtgagcaaagacaggaggaggatgggcttttagtacccaactttgatggccagttacatgctgaccagacaaaggttgagttctagtccctggtgatcctcccaaggttgatatttttgtatataggtgggtaccaagacctgtggcaagcaaagcgagcgctctctctctctctctgtgtgtccgaagctgaccatcattagagtctaggcctgcgaactgatttcgttccgtgataatgctgcatgtatggcatctcggttcttcccacagagatcatgtgatgtgatcgacctcgagaaattaaaagtagattgtgtactagatatggcgcaaatattacatgcgccatcttctaaagttgtactgattggtatgtaagggcgctgggtggtgttggaacggataccgtgtactgtttgttgcttttttttttcttctagtattaatgattatgatgacg

SEQ ID NO: 21527 - DNA, 1580 bp, Zea mays
  Clone ID: LIB3354-010-E4_FLI
gcggaggcgaagcggctgatgcggctggcggggccgatcgtcgccagctgcgtgctgcagaacgtggtgagcatggcgtccatcatattcgttggccacctcggcgagctccacctcgccggcgcttccctggccacctccctcgccaacgtcacgggctacagccttctcaccggaatggcgagcgcgctggacacgctgtgcgggcaggcgttcggcgcgcggcagcaccacctcctgggcgtgtacaagcagcgcgcgatggtagtgctcgggctcgcctgcgtcccgatcgcggtcgtgtgggcgtgcgccggccggatcctgctcctcctcggccaggacccgcagatcgcggcggaggccggcgcgtacgcgcggtggctcgtcccgtcgctggccgcctacgtgccgctgcagtgccacgtccgcttcctgcagacgcagagcgtggtcctgcccgtggcggccagctgcggcgccacggcgctctgccacgtgctcgtctgctgggcgctggtgtacaaggctggcatgggcagcaagggcgccgcgctcagcaacggcgtctcctacgccgtcaacctcgtggtactggcgctgtacgtgaggctgtcgggcgcgtgcagggagacatggaaaggcttctcgcgggaggcgtttaaggacctgtggcgattcgccgagcttgcctggccgtccgccatgatgatctgcttggagtggtggtcgtttgaagtccttgtgcttctatccggtcttctgccaaatcctcagctggaaacgtcagtcctgtcgatttgccttaacactggtgctctgctctacatgataccattggggcttacttactccataagcacacgcgtttccaacgagcttggcgctgggcagcctcaggccgcgaagatggcagcaaaggtagtcatgtacatggctttttctgaaggactcgttatatcgttgacgatgaccctgctacgcaacatttgggggtacgtgtacagcgacgaggaggagatcgtgacgtacatctctaagatgttgccgatcctcgggatatctttcttcatagatgggctgcatagctctctttcaggggtgctcacaggctgcggaaagcagaagatcggcgcggccgttaatctcggagcgttctacttgctaggcatcccagtggctgtactgcttgcattcgtcttccatctcaacggaatgggcctctggcttggcatcgtctgcggcagcgccaccaagctggggtttcttctgtttgtaacgtgttccgtagactgggacaaggaggcagtgaaggcaaggtacagagtgttagggtcatctctcccgttagcatgaaaaaaatgccagtgttacatggaaatcccatttgaaggcagttgaacagaacccggcaaagaaagtgtgggaacaaaaaactttctatagttggggacatctcaaagtcatagctatggggaaggcaagaagaaccagagccagtatttttggattcatctgtactgttaaattttgtagcactgcaatggtttttcaggaaatataattagctggattgagtc

SEQ ID NO: 21528 - DNA, 1054 bp, Zea mays
  Clone ID: LIB3354-011-C4_FLI
cgccccagcaaatctcacgcacagaaacaccaaagccccaaaggcccaaactcaccacctcccaatggagaacggcgacgaaaccctcgcctcccccacggccgccgccgagacggacgcgctcaacggcggcgtcgcggaggaggagcaggtccccatcacccaccccgcaaagtcctacgtcacgctcgccgacgacaaccccgctcctaacggcggcgtcgtgaaagaggaggagggcggtgcccacaccaccgcgaagtcctacgcagctgtcgccgcccaagccgagatcgaggacctccgcgccgccaagctcgacctggaggagaagctcgctgaggcccgccgtgagaacaagtccctcgccgaggagacgcaccgcagcgaggggatcttcacgcaggcccgggaggaggtcaccatcgccgagttcgccgccacctctgccgagaaggaggtcgcctcgctccgcgcggaggtcgaacgcctcgatgctgttctcaggatcgagaagggcgagcacgagctggacaagcagagacacgagaaggtcgccaaggaggtggatgccgtgcgccaggagaagctcaagctagaggagatcagagccctgaaggcttccgccaccgccgccgccaccaccaaggagagggaagctgcgccggcttctgaggccccgaaggaaggggaagtcgcgtggctggggatggcggtggctgcggctgccggcgccgccggcacggctgccatcatgctagtttatctccgccttaagaggtaggtgttctggtgctcggttgcgtagcagtaaagggagttttcgtcgtgatgctgctattactgaactgggaggtatgcgacttctatgagtagttgcttattagcctacagaaaatatagggatctggagactggttatgtttcatggctgttcttctttcaccggtaccattttatgacgaacgttgtatgactgattatcttcttgtttacgttactgctacggcatggcctcatgacccttttttgatctaataatggtccgtgttct

SEQ ID NO: 21529 - DNA, 1508 bp, Zea mays
  Clone ID: LIB3354-011-D6_FLI
cgccgccgccgccgccgcccgtagccaagaccaagatcccgtctcgcccggcgtcgcacctgacctaaccctgagccctgtgatatgccggttcaggtcggaggcagcaaggtggcggacccgaggccggccagggtggtggacctatcgcccgtaggcgacaggtcccgcgcctcctccaagaagaaccgccgccgccacaagaaggccgacgccgcctcttccatctcgcccatgcagaggctcttcgacaccagcagggaggtcttcgccaactcctacccgggcttcgtcccgccgccggacgccgtcgcccgcctctcgggcctcctcaatgagctgaagcctcgtgacgtcagggttgccccaagcatgtccgtcttcaagcatgccgatcctacaagcccccctccagttacctatttgcacttctacggttcctccgagttttcgtttggtatcttctgtttaccgaaatcggcaattattcccctccacaaccatcctgggatgacagtgtttagcaagatactgtttggttccatgcacctcaagtcctatgattgggctaaaagtctgccggcgggtagcaacgataatgcacttgagaactctgatggagcaggagctcgtctggccaaggtgaacacagatgccgtttttgacgcttcatctgagaccgtagttctgtaccctgaaaatggagggaacttgcactgctttacggcgctgaccccttgtgccgtgctggatgtgatgggccctccctacaaccgtgctcaaggaagggattgcgcgtattacagcgaatcgccctactcgtgtgctggagatgcacaatattcttggctcaaagaggttcacagcacatttgagatggaaggcataaagatggagcccaacttcatcgtctaataattaagcaggcatggcatggcatgtcatcgtaatgctgctagtttcatgtagataatctctagctgcgggggtgtagtacaactggaagacggccagatgctcttttgacattcgtttgccttaatttcatatgcctccctttatgtatgttaacaattcgaatcttgggtcatggtcactttttttctgttttccctgtagacagcaggtgctactttttgaagtgatcatggaccaaattctgtgggtcgtttggttggtttttgttgagcagcagaacagtcttcaactttctgcctgccatcgtgtttcagtttcagggcccatgccttgtgttttctctttgaatgaacaaagaactgtctctagcatagttataaatggatatggtccaggcttccaaatcaggagctgtgaggtgatggggacggacgtagttgtgtagtacgggggtcaggtcaggtccggccggacgatgttcttcgttgcagcgtactctctgttggctgcaccgcattagcgcaatgattcggtctgatttgtcatactttttaacctacaaatgttatgcattagcaatggttttagat

SEQ ID NO: 21530 - DNA, 929 bp, Zea mays
  Clone ID: LIB3354-012-B1_FLI
aggaggtagcaagagtagcctgtacgcggcgctgggcgtggccagcgactgctccgacgccgagctgcgcagcgcctaccgcaagctcgccatggtcggtgacggtgacctcgccacccctgattctgttactgactgcttcccctgtccgccggttgctctgtttcggtcgtaaacccgacgacccggctgctctgctgagtgctgactggtgttgttaccgccccgtgctggtgggcagaaatggcacccggacaagtgcgccggcgcagggagctccggcggcggcgcggacgccgccaaggccaggttccagaagatccagggagcgtacgccgtcctgtcggaccccaacaagcggatcctgtatgacgtcggggcctacgacggcgaaggcgacgatgacggcgccggggagatcctcggagacattctcgaggccatgagccaggcaggccctgccgccgacaacggcaagggggagagcctggaggacctgcagcggcagttcgaggagctgttcctgaggccgtcgccgtcgtccttctcgccgaacgacgcagctgggaagtcggcttccaagagtaggcctgctgggaggaaatagacaggacactgcggcgaataggtcggtccagctactcctgttccagataagctacgacctacgaggtaccgatacctggccaggagcccaggacagcgacctgcgacggcgacgaggctgccagtgctgcacgctcaagtacatgctccgagttgtagctactactgtagatcggcacggcagtcgccagaatggtaccataaggcggccgtacgcacacacgcatgaacgctgtttttaccatctcaggttcgctgcaaaatttccagcgtgttctctgtaaaatccctgcatgattgctataaagaaattcttcgtgggt

SEQ ID NO: 21531 - DNA, 727 bp, Zea mays
  Clone ID: LIB3354-012-D11_FLI
gttttgcagcttccagagcttgagaccagcgcggtagttctttcttggtcgatggcgctgaggaggatcatcaaggagctcaaggacctgcagagggatccacccacgtcctgcagcgcagggcctgtgtccgacgacatgttccactggcaagcgacgatcatggggcccagcgacagcccctactcggggggcgtgttcctggtcgccatccacttccctccggactacccgttcaagcctcccaaggtggcgttcaagacgaaggtgttccaccccaacatcaacagcaacggcagcatctgcctggacatcctcaaggagcagtggagccccgcgctgacggtctccaaggtgctgctctccgtctgctccctgctcaccgaccccaacccggacgacccgctcgtcccggagatcgcccacatgtgcaagaccgaccgcctcaggtacgagtccaccgccaggggatggacgcacaagtacgccatgggataacctgatgtgagccgtaacaacaacgacgctttggccgagtggttaaggcgtgtgcctgctaagtacatggggtttccccgcgagagttcgaatctctcaggcgtcgtttatttttttttcttttttatttcttttttgcctacccacatggacacatggttccctccttcacaagctctggttctggtactgtaacattcagaaatgcaaatggttatcatatcgtgag

SEQ ID NO: 21532 - DNA, 632 bp, Zea mays
  Clone ID: LIB3354-012-E12_FLI
caccaatcaagttttcatgtctgatctcgacattcagatcccaactgccttcgatcccttcgctgaggccaatgctggggactctggtgcggcagcagggtcaaaggactacgtacacgtgcgcatccagcagcgtaatggtcgcaagagcctgactaccgtccagggattgaagaaggagttcagctacagcaagatcctcaaagatctcaagaaagagttctgctgcaatggtacagtggtccaggacccagaacttggacaggtcattcagctccagggtgatcagaggaagaacgtctcgaatttcctcgtccaggccggcattgtgaagaaggagcacatcaagattcatggtttctgagcaaccgccgggtccatagcaaaccaaccctgcatgcagggccagcttattatatataatatctgaggtggagcatatctatctggctgtgtactacaagcaggcctagtacgccgcctgcgcgttcctcctattacacataacacatatagccccctccctgcgtgtatgcttgttgccgtcgtgtcgaatcttgtactacgaggctccgtcgaacctcgatggcttgcttctttatcagaacatgtttgaataaacgctatttggt

SEQ ID NO: 21533 - DNA, 1899 bp, Zea mays
  Clone ID: LIB3354-014-B11_FLI
cctagtcctcttctagtcgcctctacccagttacttgcatcgccccgtcaagcacgccgccggcacgcggccctcggtctccccgccgcgccctctgcctccgcccgaacaaagccgtctcgccgtcgcgttgccttccttaccgtccaccgcgggcagccgtcctagtactcggttggtcctcccctgctgcccttctacggtggaggagcggagatcctgccgttttccggctgatttcttctaattgcggggcaagttccgtggatagtcaatactgcttgtgctgttgagctaatattaagttcctgctgggagaacttctgcagttcctatggcaaagcctctcaatggcagtggccgtagcatgccaagatcgaatgagggaatgcggctcatattttcggcagttgtaggtgtcatgctgggttacctgtttgggatctccttccctacagtcaacataaccaagcttcacttcccttcgagtatcatctcttatatcgaagataggaactctggcatcacaacccagacattgttgaaccatgcttgggcatctgcaaacaatcataaaaagaatagttctgaatctaacactgatgaaattcccgagatttatgttcctacaaacccaaaaggtgctgagagacttccaccaggcattgtagtgtctgaaacagatctttatccccgaagactatggggtgatcctagtgaggaccttactagcgagccgaggtatcttgttacttttactgttggtattgggcaaaaggcaaatattgatgcagcggtcagaaagtttcttttatagttttcagacaaattcaccattatgttgttccattatgatggtcggactacagagtgggatgaatttgagtggtctaaaagagcaatccatgtgagtgccaggaagcagacaaaatggtggtatgcaaaacgatttttgcatcccgatgttgttgccagatatgattacattttcatctgggatgaggatctaggtgtagagcatttcaacgcagagaagtacattgagcttgttagaaagcatgggttggaaatctctcagcctggtttgcaacctgatagaggactaacatggcaaatgactaaacggcgtggtgaccaggaagttcacaaagtaactgaggagagaccaggctggtgcactgatccacatctaccaccatgtgcagcatttgttgagattatggcaacagtgttctccagaaatgcatggcgctgtgtatggcatatgattcaggtgaggtaacatggcatgcaagtcattagtttgtctgaagtggagtatgcttatgcacttctatatgcagaatgacttggtccatggatggggtcttgactttgctcttagaaaatgtgtggagccggctcatgagaaaattggagttgttgatgctcaatggattgttcatcaatcagttccttcacttggcaaccagggcaagtcagataatggaagaccaccatgggaaggggtaagagcacgctgcagaaaagaatgggggatatttcagacaaggctggctgatgcggagaaggcttattacttggagcgaggcatcacacccccgaactcaacatcagtttagatgaacacatgctcctcagatgccacggcaaggtttctgttgggggaacctgctgcaaactggcatgttcatcgaagctgctgcagcccagggcaaatccatatatttgtacattagaggtcccacgaatcgccatgattaatctttagtgtcgctcacctggttttaatgtcatttcttttgttagtgatactagctgcgatgtaagtaggaggatacagcagagaccgtgatgatacccatttgtgtattaatgacctgatgcaatatggatgtt

SEQ ID NO: 21534 - DNA, 1266 bp, Zea mays
  Clone ID: LIB3354-014-B2_FLI
cccagccccaaatacacagcctaggcccacctattcggacacaccagagaagagagagaggaaaggaacccaacacgctctctcgcgcggcaagagcttcccggcccgaaaccgaaagcaccaccaccaccaatctctgcgttttcgtctgcggcggcggcggcagcagcggaggaggtagacgagatgctgtccgccgacatccccccaaaccagaccatctacctcaacaatctcaacgagaaggtcaagaaagaagagttgaagagatcgctttatgccctgtgctcgcagtatggaaggatactggatgtggtggccctgaaaacacagaaactgagagggcaagcatgggtggtgtttagcgagattacagctgctaccaatgctttccgtggattgcaagactttgatttctacggcaaaaaaatgcgagtacaatatgcaaaaacaaaatcagactgtattgcaaaagaagatggtacttatgcacctaaggagaaaaggaagaagcaagaggagaaagctgctgagaaaaaacgacgagcagaagaggcacaacaagctggccccaatgctgctgctgctcaaagcaatggaactggctatcaagcgtctcgtatgggcaaggcttcgcaggagccacctgctcctccgaacaacatcctcttcatccagaacttgccagaccagaccacgagcatgatgctccagatcctgttccagcagtatccgggcttccgggaagtccggatgatcgaagccaaaccaggcattgcctttgtggagttcgaggacgacggccagtccatggtcgcgatgcaggctctccagggcttcaagatcaccccggagaaccccatggctatatcctatgccaaaaaatgagaaccctcggggaatacctgtaactgcccacaagattttccgctccaccttccggaatcgagccacagtatctactttccggccatgtattttttggaaagcacttgcttaatttagaagttagactcttgccacttttaaaccgtgtttggtgctcagtctttatgttgtgcctgcttttgctcttgtcaagtctggtattgtgcctatatatagggctgtctcgattatctgctgcctacagactacagtggtagaagttgggctgggcgggtcatggccgtatctctcgcttgaaggcgaggcgaaaatcatggccccatatccttccacctggtcaatggtcatggtgtatatatgcctatagtatattgccgg

SEQ ID NO: 21535 - DNA, 842 bp, Zea mays
  Clone ID: LIB3354-014-G4_FLI
ggagggatggcggagaacccgcagctgtttgggaatgggatgccggtgccgttctacagtgagatgttcgtcctcgcccgggatggcgtcgagttccacgtcgacaagatcccatcagctcctggtggtcatgtgaaaacaaaaggcacaatttacctgtctaatataaggatggtgtttgttgccaacaagcatgttggcaacttctttgcttttgatatgccactgaagttcaatcagccaatatttcactgcaacaacatctctggattcgttgagccagttgttccagacaaccagaacagggccctgtactcaactcacaccttcaaggtcttgttcaaggacggcggctgtggtactttcgttcctctgttcctcaacctgactgcatctgtgcggcgctacaaccagtttgaaacccagtctgctgctagcatggcacctcgtgtggaccctctgcaagctgtgcagactcctgttgatgacatgatgcgtcatgcgtatgttgacccaaacgatcctaccaagatcttccttcagcaacctgcgccagaatcgcagctgaggaggaggaactaccacggcccagctgatgcaaattagcgcttggctggattggcagaactcatgctcaattaagtgctgtgtccatttgagcatttcacctatccttgtcgtttaccacaactgacttcaatattcgggtacccctgggtcctgtgaccttacatatatagtacataatgttgcgagttctcgcaatatgtaatgtacataagtggcgtgttcatatattattgctggagcctggagggtcaacttggatgtgggttgcttgg

SEQ ID NO: 21536 - DNA, 1102 bp, Zea mays
  Clone ID: LIB3354-014-H3_FLI
cacacgccgccgcgccgccagtcgccgcacgagggggcccgtgatgccgaagaagatgggtgtcaactccaaggcggaggcggcccgcgaccgccgctccgccgcggaggccgaccgccgcgaccgccaggagcgcgccaaggaggagcagtactgggccgaggctgagggccccaagtcccgcgctgcgcgccgccgggaggaggacgccgagaagcgcgccgaggccgcggctcgcaaggccgagaaccgccgcctcgccgaggcagaggccgccgccgtcgccgcttccgcatcggcgccgtccaaggccgccgcgcgcaaggcgtcccgcgttgccgctccgccccccaaggttaccgaggccgagctcgtgcgcctccgcgaggaggagcggctccgcctcgagcgggaggcagaggccgccaagaagcgcgccgcgcgggtcgccgaggaggaggagtacgagcgcgtagtcctcgtcgaaaacactaacagggatgattccctcatcgaggccaggtcggttgaggaggctatcgcgcggatgtcggtcgtggatccgcaggcgtccctgcccgctgacaagcatcctgagcgtcgcctcaagtcgacctttaaggcatttgaagaggcagagctccctaagctgaaggaagaaaagccaggtctaacgctgcaccaatacaaagacatgatatggaaactgtggaagaagtccccagacaaccctcttaaccaggctgctgactgaattttgcaaccctactgaatcttatgtgtaattaaaggccaaccttcaaacagcactggattggtgaattgtgttggtacctttttcttggagtggatgcacactaaaccttgaatcagaaaggtgttccagtctcgaccaataatttccaaatcgctggagtgtatactgtgggaggtgctcttgtttagactcgactagtcgaggttccttttttgtgttaagtatgatggttgggcacgtgctggtaccgagcgtgcttcactcattatagtattttgattcttgaacaaatcgtgtgttgggctaaaccatgacattttgattctacttatgccggatttcgtg

SEQ ID NO: 21537 - DNA, 1365 bp, Zea mays
  Clone ID: LIB3354-015-B2_FLI
gcgctccctgtttctctacagatccttctctcctcctctcgtccttcgtcgtcgtcgtcgtcgtcgcgtgatctcggcctcctgcgacctccatggctggcaaagctgctgcagacactgggagcaacgaccgagtcgttgaggttgaggggtcctcctcctcctccatggcggacgtgtacaaaggcgagctcacgccgctgcagaggcacgtctccttcttcgaccgcaacaaggacggcgtcatctacccctccgagacataccaagggttccgagctatcgggtgtggcgtcgccctgtctgctgctgctgccgtcttcgtcaacggtggacttggacccaagaccgtactggtaccagagcttgagtcactttgatttctgcattgaaaaaaaaaaatctgaatcatccttagagcatgcctgcctgcctgcttggttcggtttggtttggtttcgccggccagcgtctgcagtagacggaagacgtaaccgtattctcaaaacctcagaagatcgaatgaagtgatattaacagcatcatctagaattctagagtcgtaaacaatataatggcaccctgatcagataaccaacccataacacaccttgaaagttgaaagagagatgccactacaccacctttgtcttcggaaaagaaaaaaaaggcaggcgtaaaagctacctgccgtgtcgtatggcgtatagcagtatagctacgtgcattcatccacgcgagattctttttttttggtggggcatcttttcaataattaatgtcacatttgatatttctctatcgtctccccctgatggagctgactctggctcgttcgtgtccgtgcatgccttctctggcgtcgcgcgctgaaggagaacgagaagcctgcgcctttcaagttccccatctacgtgaagaacatccacaggggcaagcacggcagcgattcgggcgtctacgattccaacggaagatttgtacctgaaaagtttgaggagattttcaagaagtatgcccacacgaggcctgatgcccttacaggcaaagagctacaggagatgatgaaagcaaacagagaacccaaggacttgaaaggatggctgggtggcttcacagagtggaaggtgctgtactccctgtgcaaagacaaggacgggtttctccacaaagacactgtcagggcggtctacgatggcagcctgtttgaaaggttggagcaagagaggaactcaaagaaagagtcgagtaagaagaaatgatgagaaatccagacgctcttatgtggacgagtttgcaagtcacgctgtgcgtgtggttgggtactatcataatttgatttattctatatgtttgtcgattcat

SEQ ID NO: 21538 - DNA, 1064 bp, Zea mays
  Clone ID: LIB3354-015-E6_FLI
gctgtctcgtctcgccgtcgatccatactctctcgtcgtcgtcgtcgatttctccagctcctctcatccctcctttttttttgttttggtttccgacggaaatatgctgctaaatgattagcggccggaagatccattggcccatgccatgccgtagtccatgctccatgatggagaggaggagctagctgccctgctgcctccatctctctctctctctcggctcacatgcgtcgcgcgcgtcaatgcgtgcatgcaccaccaaacaaaaaacctaaagcgaccacccaagccctgaggcgaggcgaggcgaggcgagatctatctttatatatagccttgaagcccttggaacacttcatctccaaattaagtcgccgagctctgaagaatctagctaggagcaggccgcctacgccatcggccgtccacagcaacatgtgctccggctcctggttctggagcagcagcggcagcggcaaggagcacccgtctcttgtcgtcgtcaacctcgagcggcagctaaagaagacgctggccgtcaggagaaggaggaggttgaggctgaggaggttgcgagacggaggagcagaggccatggagatggtgaacctgaagctgtatctggagaaccggtgcatcatcgcagagaacgagaggctccgggagagggccagcgcgctccgccgcgagaacctcgcgctgctccagaacctgtcgtccaggacggcggccgtgccagagccaggagcgggagctgcgtgaggttgctgcttcgatcctctgcctgcctgcctgctgaacatgaagtagcgagctcgcgtcaccctcgtcgttggtgcttgtgctacttgtgtggacaggagacaggccagtgaactcgtagccctaggaggccatctgcttggctgctccgccatgtctgtgtggctctgtgctcaactgctcatacataaaccgccaggttcctggagctctcttggggtgctctgcgccatggtgtctgtacattataagtgcgcggattaactagattttgttggcaagaactaactcttttggtc

SEQ ID NO: 21539 - DNA, 1607 bp, Zea mays
  Clone ID: LIB3354-015-E9_FLI
tttcggcctctgtcccttgcaagttcaatctcacctccaaccatgggtaaagagaagtcccacatcaacattgtggttattggccatgtcgactctggcaagtcgaccaccacaggacaccttatctacaagcttggaggcattgacaagcgtgtgatcgagaggtttgagaaggaggctgctgaaatgaataagcggtccttcaagtacgcgtgggtgctcgacaagctcaaggctgagcgtgagagaggtatcaccattgatattgctctgtggaagtttgagaccaccaagtactactgcacggtcattgatgcccctggacaccgtgacttcatcaagaacatgatcactggtacctcccaggctgactgtgctgtccttatcattgactccaccactggtggttttgaggctggtatctccaaggatggccagacccgtgaacatgctctccttgcgttcacccttggagtgaagcagatgatttgctgctgcaacaagatggatgcaaccactcccaaatactccaaggcacgttatgaagagattgtgaaggaagtctcatcctacctcaagaaagttgggtacaaccctgataagattgcctttgttcccatttctggttttgagggtgacaacatgattgagaggtccaccaaccttgactggtacaaaggcccaaccctgcttgaggctcttgaccagatcaccgagcccaagaggccttcagacaagcccctgcgtctgcccctccaggatgtgtacaagattggtggtattggaactgtaccggttggtcgtgtggagactggtgtcatcaagcctggtatggttgtcacctttggtccaactggcctgactaccgaggtgaagtctgttgagatgcaccacgaggcgcttcaggaggctcttccgggtgacaatgttggcttcaacgtgaagaacgttgctgtcaaggatctcaagcgtgggtttgtggcctccaactccaaggatgaccctgccaaggaggctgccagcttcacctcccaggtcatcatcatgaaccaccctgggcagattggcaacggctatgccccagtgctggactgccacacctcccacattgctgtcaagtttgctgagctcattaccaagatcgacaggcggtctggcaaggagcttgagaaggagccaaagttcctgaagaacggtgatgctggtatggtgaagatgataccgaccaagcccatggtggtggagacgttctcagcgtatcctccccttggtaggtttgctgtccgtgacatgaggcagacggttgctgttggagttatcaagagtgtggagaagaaggacccgaccggcgccaaggtgaccaaggcggctgccaagaagaaatgatgcgatcctgcgcctgctttagcaatacctagttttcatcatcacaagttttgtttgtgatcgttgctgttatcgtgtgaactgttgagatctgttagcatgtgcacttttatctatttatttggtaccatcttgctatttcaccttttccaatacaagaatgctctaagacctatatgttaaccttttggcattgttaaattgattttaggaagtcgtat

SEQ ID NO: 21540 - DNA, 1527 bp, Zea mays
  Clone ID: LIB3354-015-G6_FLI
aaacaaaataagttaacctaaatatctttcaggggttcacaagctgaatcagtcctaaacatgactacatactcgaagacacttcgtgtttcactatagatatctgtgaggcgtccaccagacgcggagcggacggcatgggagttgtttcgttgcggatctgctgcgggcgacggtgaaaggagaaaaagataaatggggaggaaaaggagacgtgcagtttgctgtggatgggctctattcagctaggaggtagcggagggaggagcacgccgccagcagtagggatgtacaagaaccagctccaagaactggcgcagaggagctgcttcagcctgccgtcgtacgtgtgcacgcgcgagggccccgaccacgcgccgcgcttccgggcggccgtcaccttcaacggcgagaccttcgagggccccagcggctgcaccacgctccgccaggccgagcacgccgctgccgaagtcgccctcgcccgcctctccctccgcggcccgtccactaccctcgccgcccgggtcatcgtaagtcaccgcccatcatcttcacgtgctctgcttcttgctggcgccgagcttgatgtggaagtgaaaccgtgcccgttatgtcaggatgagacgggggtgtacaagaacctgctgcaggagacggcccaccgggcggggctgaagctgccggcgtacaccacggtgcgatcgggcccgggccactcgccggtgttctcctccaccgtcgagctcgccggcttgagcttcgcgggcgaccccgccaggaccaagaagcaggcggagaagaacgccgccatggccgcctggtcgtcgctcaaacagagtacgtcatcggcccaatcccgaaaacacaaaccttgcgcatatctttacgcgtcacggggcatcattaatggcccccgccatggtctttgcagtgccggaggctcgcaaggagcccggcgccggcgacgagcaggagcacgtggctgtcgccagagcgctcgcggcgctgaagccgcgagacggcggcgacggaaaggcggcgccgcctctgcagaagcacagcagcaacggctcttcttcctccgctcttccgaacccgtcgctgtacagacaccaatggcggcctcggaccagtacccctgcccagcccctgccgccgaggacgggggccctgcccctgcagccgccggccggcccaaggatcctgcccccgctgcatctgctacaacagccggcgtgcggctccagggacgccgcggcggcagagctggtgcggatgctggagcgcgccatggtgcgcgaccgggaggcaacgccgccttcaccgtgctactacgcggcgcctgccgcctcggcgtaccgccacggcagcgcgccgaggaccttcgccgcgggcgggttccacgccccggctgtgagcgtgcggtcggtgatcccggtgtgcgccgccccgccgccgccgcagaccccggtcaaggaggaaaggaatggcccggcgacaccctcaggcgcatgcaagagggcg

SEQ ID NO: 21541 - DNA, 760 bp, Zea mays
  Clone ID: LIB3354-016-E7_FLI
ctgggatcacaattctgccgttgctatcaaagaccaggccgtccgtcaccttcacagatgaggaagctgaggagctgacaaagaggatacagaatgccgggacagaggtggtggaggcaaaggctggtgctgggtctgctaccctgtccatggcctacgctgctgccagattcgtcgagtcgtctctccgcgccctggccggtgaccctgatgtttacgagtgcacatttatccagtccgaggcaaccgatctgccattcttcgcatcaagagtcaagctcggcaagagtggtgtcgaatccatcgtttctgccgacctcgagggagtgaccgagtgcgaggccaaggcgcttgacgcccttaaggccgagttgaagggaagcattgagaagggtgtcgccttcgccagcaaacagcaggaggctgctgcatctgtttgaagtgaagcaagtgaaatgtatgtccacaagagaataaagggacaatggcttgaatggcttttaagttttgcagcctagagttttttttttgttttggtgtcaacgtgtaggaggaagacgcagagatggttgctgttgctgttagtttctaattactacatggggactggacatccatccccccacaagttatcgcatgtttctaaaccaggccctgcttaacaccacatatctattttttctactcttgtattgtggttctgtttgtagcttgttcgagtttacgaactacaaagaagctaataaaaacacttgtattg

SEQ ID NO: 21542 - DNA, 1684 bp, Zea mays
  Clone ID: LIB3354-017-C10_FLI
cccactgccaccgctaccgctaaccatggcctcctcagcgtccctgcagcggttcctcctgccctcctcgcacgcggcggcgacggcggcctcgccgtcctcccggctgcgccgcacagggcgcgcccgcgcggccgtctccgtgccgccgccggcggcggcgggggagcaggtcccgacggagcggctggagccgagggtcgaggagcgggcgggcgggtactgggtcctcaaggagaagtaccgggcggggctgaacccgcaggagaaggtgaagctggagaaggagcccatggcgctgttcatggagggcggcatccaggacctggccagggtccccatggagcagatcgacgccgccaagctcaccaaggacgacgtcgacgtccgcctcaagtggctcggcctcttccaccgccgcaagcaccagtacgggcggttcatgatgcggctgaagctgcccaacggcgtgacgacgagcgagcagacgcggtacctggcgagcgtcatcgaggcgtacggcgccgacgggtgcgcggacgtgaccacccggcagaactggcagatccgcggggtgacgctcccggacgtcccggccatcctggacggcctccgcgccgtcggcctcaccagcctgcagagcggcatggacaacgtgcgcaaccccgtcggcaacccgctcgccggcgtcgacccccacgagatcgtcgacacgcgcccctacaccaaccttctctcctcctacgtcaccaacaactcccaggggaaccccacaatcaccaacctgccgaggaaatggaacgtctgcgtcatcggctcgcatgacctgtacgagcacccgcacatcaacgacctcgcgtacatgccggccgtcaaggacggcgagttcggcttcaaccttctggtgggcgggttcatcagccccaagaggtgggccgaggcgttgccgctcgacgcctgggtcgccggggacgacgtcgtccccgtgtgcaaggccatcctcgaggcgtaccgggacctcggctccaggggcaaccggcagaagacgcgcatgatgtggctcatcgacgagctcgggatggaggtgttccggtcggaggtggagaagaggatgccgaacggggtgctggagcgcgccgcgccggaggacctcgtcgacaagcgctgggagcggcgggactacctcggcgtgcacccgcagaagcaggaaggcctgtcgtacgtgggcctccacgtgccggtgggccggctgcaggccgcggacatgttcgagctggcgcggctcgccgacgagtacggcaccggcgagctccggctcacggtggagcagaacatcgtgctccccaacgtcagcaacgagaggctcgacgcgctgctggcggagccgctgctgcaggagcagcggctctcgccgcggccgtcgatgctgctcagggggctggtggcgtgcacgggcaaccagttctgcgggcaggccatcatcgagaccaaggcgcgggcgctgcaggtggcgcgggaggtggagaagcgcgtggccgtgccgcggccggtccgcatgcactggaccggatgccccaacagctgcggccaggtgcaggtggcggacatcggcttcatgggctgcctcaccaaggacagcgacggcaagatcgtcgaggccgcggacatcttcgtgggcggccgc

SEQ ID NO: 21543 - DNA, 918 bp, Zea mays
  Clone ID: LIB3354-017-D10_FLI
gctatctggttctggaaccatccagtgacggccggcggacgtatcacgtggtcatcataaaccggccggcggccccctccatccgacattgttcccgccgtcttccccaattcgccgccaggccagggtaaaaaaaaaaaagaggaagaaaacctcctgcaattcccattccatcgatccagctccggtccaagccaaagctttcttcgccccaaaccttgttcaactccaatgtcggacttcttcttcgggagcccgttccgccgcctcttccacgcgcgccccttccatgccgtcgactggtcctccgccgcggcggcggccatggactgggtggagaccccgtcctcccacgtgctgcgcgtcaacgtgccgggactcggcaaggacgacgtcaaggtccaggtcgacgagggcaaagtgctcaccatcaggggcgccccgcccgcggccaaggagaaggggaaggaggacgaggaggaggggacggtgtggcacgtggcggagcgcggcaagccggagttcgcgcgggccgtggcgctgccggagaacgtgcgcgtggacgggatcagggccggcttggagaacggggttctcaccgtcgttgtgcccaaggaagtcgccccggcccggcccaagcccaggtccatcgccgtctccagcaagctctgatgagtctgaggcgatgagtggcagagtgtacggtgcagtgttaaaccatgccgcaaatggcgggtacgtctgaattctggtcgtgtgtgtgtccgtgtcacctagaaaacgcgcacctcgtgtaaattgtgatacaatttcatgcaagtaatccgagtgagtgaaaatggctgctagccaaaaacggtcgattctgaatatgcagtttgcaataaactaaattaaaaggaaaaggcatgtttgaat

SEQ ID NO: 21544 - DNA, 758 bp, Zea mays
  Clone ID: LIB3354-018-A4_FLI
caacactcaccgatagcaagtagcgccgccgacgtttcgagagcagagtatccaagctagccaagcgcgcacctcggtgacctagctagttcaggcgacgatatggcgtcaggtcaggaaagcaggaaggagctggaccgcaaggcccgcgagggcgagaccgtcgtccccggcgggaccggcggcaagagcgtcgaggcccaggagcacctcgccgaagggcgcagccgcggaggccagactcgcagggagcagctggggcagcaggggtacagcgagatggggaagaagggcggtctgagcaccacggacgagtccggcggcgagcgcgccgccagggagggcgtcagcatcgacgagtccaagttcaccaagtagtcctatcgcgtgcgtgcgtacgcagcgttcgtagctgtctgcgtagtgtaccttggccgtagctagtgctactctctactttggagtagctgaatgataataatgtagctagcagcatgcatgtaggcgatcatacatacgtacgtacacaggtacgtgtgtgtgatcatgtatgcttccagaagggtatcctagcttaatcagtcacgtcgtcaagtcgtcaatatggcaggttcgcgtcagggctttgtagtttgatagcctgtttcacgactcctcaataatcaagtagtgtaatgaaagtttggcggttccttgttattatctgcttgttgtatctcctgctctgcactggttaatttctcccatattgtggtagt

SEQ ID NO: 21545 - DNA, 785 bp, Zea mays
  Clone ID: LIB3354-019-F4_FLI
cacagaaaaccctagccgccgccaccgaagcggcctcccaggtaagcaagagcgtccaccccgccgccgccatgaagcgcaatccccgcgtcacgagctctcgccggaagtgccgcaaggcgcacttcacggccccgtcctccgtccgccgcgttctcatgtccgccgggctgtcgacggagctccgccacaagtacaacgtgcgctccatcccgatccgcaaggacgacgaggtgcaggtcgtgcgcggcacctacaagggccgtgaggggaaggtggtgcaggtgtaccgccgccgctgggtcatccacgtcgagcggatcacccgcgagaaggtgaacggctccaccgtgaacgtgggcatccacccctccaaagtgatcgtcaccaagctgaagctcgacaaggaccgtaaggctctcctcgaccgcaaggcccggggccgcgccgccgacaaggctaagggcaagtttactgccgacgacgtcgctgcagccgccgctggtggcgccgccaccggcgcctctctccaggagatcgactagactcttcacggtcatctgatggttgtcgtaccgccttttcctcatctcttttgtttttgctaccaatgattatgtgatagaggttttatgttatttgaaaactgctctgtgcctggatgagagtttttggaacataatgtgaacctgtgtgtctgtgacctgagctttgaagatctcattatgtggttaatgtctccttgtagtatcttctaaatggttgctgtgatttgtcttcactct

SEQ ID NO: 21546 - DNA, 350 bp, Zea mays
  Clone ID: LIB3354-020-B12_FLI
cagatagtgatacagcaggtagctcgagcgagaatgagccaggagcagccgaggaggccgtccggccatgaggagacgagcggcggcggagagcagggcgccgtccgctacggcgacgtgttcccggcggtgagcgggggcctcgcggagaagcccgtggcgccgcaggacgcggccacgatgcagtcggcggagaacctggtgttcggccagacgctcaagggcggcccggcggcggccatgcagtccgcggccaccgccaacgagcgcatgggcgccgtcgggcacgaccaggccacggacgccaccgccgtgcagggcgtcaccgtctccgagacccgcgtcccggg

SEQ ID NO: 21547 - DNA, 1273 bp, Zea mays
  Clone ID: LIB3354-020-H11_FLI
gtaccttcttcttcctcgtcctcctcccgtgagccatgaatgagctctgcgacctcgaggtgcacatcaatggccatcacacgcttcatctccaccagagcgtcatgtgcgccttctcggggaggctgaggacactggtgaagcaggagaagaagaagaagggcggcggcaggaaggaagccgtgtccatcaatctcgccggcggcttcccgggcggcgccgacggcttcgagctcgtggccaggttctgctacaacgacggccgcgtcctgctctgcccttccaacctcccgctcctgcactgcgccgccgtgtccctggagatgaccgaggaggtgtgcgcctgcaacctgctggcgcaggcggaggccttcgtgaacgggctctactactggacctgggccgacgtgctggccgcggtccggagctgcgagcccttcgccgcggcggccgacgcctcgggactcctggacaggctcatctccgcgctcttctccaagatcaccggcgccaccccgggcccgggcccggggacgccgaaccgctcctcgtcgtcgtgctcgtcgtcgcccgacaccgcgggcttgcgccggtcgtcgtcgtccgccaacaagacgccggagtcgatgcggccctgcgccggcagggagtggtggttcgacgacatgacgtcgctgtccccgccgaccgtcgagaagatgatgcgcgtgctcggctgctacggcgtcgagaacaagaacctgatcctcacgcggttcctgctgcactacctccgcgccgccacgcgcaggccgccggcgcttgagcgggagggcgccgcgctcgccggcctcgcggacacggccgtccacggcgtggcgctcgtcgggggcacggcgttctcgtgccggggcctcttctgggtgctacggatcgtgtcggcggtggggctgagcagggagtgccggcacaagctggagcggctcatggggctcatgctggaccaggccacgctcgacgacctcctcgtctccggcgacgacggcggcggtgtgtacgacgtcaacctggtcatgaggctggtcagggtgttcgtggcctccgaagaggaggcagacgcgccgtcggagaggatgcggaaggtggggcgcctggtcgacaagtacctcggcgaaatctcgccggaccaaggactgaaggtgtccaagttcctcgccgtcgccgagagcctgccggactcggccagggactgctacgacggcgtgtaccgggcgctggacatctacctcgaggt

SEQ ID NO: 21548 - DNA, 1226 bp, Zea mays
  Clone ID: LIB3354-023-D4_FLI
tcatcccccttgcaagtatagtctcggcggctctagaagacgatgggcaaggacgacgtgatcgagagcggcgctggcggcggcgagttcgctgccaaggactacacggaccctcccccggcgccgctgatcgacgcggctgagctggggtcctggtcgctgtaccgcgccgtgatcgccgagttcatcgccacgctgctgttcctgtacatcacggtggccaccgtgatcgggtacaagcaccagacggacgcgtcggcgtcgggtgccgacgcggcgtgcggcggcgtgggggtgctgggcatcgcctgggccttcggcggcatgatcttcgtcctcgtctactgcaccgccggcatctcggggggccacatcaaccccgccgtcaccttcggcctcttcctggcgcgcaaggtctccctggtgcgcgcgctgctctacatcgtggcgcagtgcctcggcgccatctgcggcgtcggcctcgtcaaggcgttccagagcgcctacttcgacaggtacggcggcggcgccaactcgctcgcctccggctactcccgcggcaccggcctcggcgccgagatcatcggcaccttcgtgctcgtctacaccgtcttctccgccaccgaccccaagcgcaacgcccgcgactcccacgtcccggttctggctcccctccccatcggcttcgccgtgttcatggtgcacctggccaccatccccgtcaccggcaccggcatcaacccggccaggagcctgggcgccgccgtcatctacaacaaggacaagccctgggacgaccactggatcttctgggtgggccctctcgtgggcgctgccatcgcggccttctaccaccagtacatcctccgggctggcgccatcaaggccctcggctccttcaggagcaacgcgtgatgagcggggcttggctgtggagcaatggcgggcgacctacgggcgggggaagtcgtgagcgaggagaatgacatcatcgatcgacttgggtgccggtggttggttcgggtcgccttttttgtttcagcagctgctgcgttgcgcgcgtgcgtgagatttggtttggtttcgttcccctgcaatgtaatcatgtcgtgactctcaagggattattccgctctgctcttatggtctctgttttctatttaatgattgttattaccatgtagcagtaaccatcgtcatcagtgagaaccttgttgcttctgtct

SEQ ID NO: 21549 - DNA, 1022 bp, Zea mays
  Clone ID: LIB3354-023-G11_FLI
gtagaccgctgcagcaaaaccgcgccccaccgctttcccgttccccaccccgaccgactgctccccctcccccgcaccagcctcaagccctcaaggcctcaaggcatcgccggcgccgcaacttcgctgaggaagcccgcacccctgcccggatccgatggccaacagcaacctcccgcggcggatcatcaaggagactcagcggctgctcagcgagccaggtggagtttttaagcttgaactctttttacctgaggaatatccaatggctgccccaaaggttaggtttctgacaaagatttatcatcccaacatcgacaagcttggtaggatatgcctcgacattctcaaggacaaatggagcccagcacttcagattcgaacagttcttttgagtatacaggctctactgagtgcgccaaatccagacgaccctctttcggataacattgcaaagcactggaaagccaatgaagtagaagctgtcgaaacagctaaggagtggactcgcctgtatgcgagcggtgcatgagaacgcagtgatgttcttgatgtaataacccatcatacttcagtcctcatctattgccatttgcttgataaaaaataggctggagatatttgccatggaatgaagtctctacatgactatcactctgaattgtttggttgtacacctgtggtcggttccctttaccttggggcacctttgacaaatcagtatctgtggtagaacttgctgatactgtaatatatttgttacttcatgtagaagagcttctcaactgtccatattgttgaaactgaagcttggttgcacctttttttctttgcccgtcgactgtcatcggagaatgcaaattgccaaaactaatgtgcacctggtcagctttgctgcgaggtgctttcctacgaagtgatcacagggtcgttttatcacaatacttaagcagctttacaggaatttgtattgttgcagtacatttttgacagtcataatcaggtggaacgtgagaatccat

SEQ ID NO: 21550 - DNA, 1137 bp, Zea mays
  Clone ID: LIB3354-024-A5_FLI
attttttagaaatgcgcggcacacgacaggaattttgatccgccttcctatgttggccgggcgcaaactcgtaggataacgcctactatacggaaccccgtcgggaattaatgcgcccgtcctcgccagtcgccacgaccgcagcaatccgccgcccttggccgtgccccgtgctgccgtactcgtaatccgtgagggaaagcgtccgcgctccgggccccgccgccgatagttccttcaagggagcgacgagcgcgcggtcgatggagacggtggaggaggacgtggaggagtacagctggcgggaggtggtgctgccgcacctcgtccccgtggttcccggcgcgcaaccggagctcgagcgggagaccggggagcggcgccgcggcagggacctcctcgtcgccgtcgacttcggcccgaactccaagcacgcctttgactgggcgctcgggcacatcgcgcgcatggccgacacggtccacctcgtccatgccgtctccatcctgctctgtctgaatgcgaattgtcatctgtttaggtgtgcaaaatgagattgtgtatgataaaagtcgggagctcatggaggatttagcagtcgaggcattcaagacgttactggtccggaccaaggccagaattgttgaaggagacgctggaaaagttatttgccgagaagcagatcgactgaagcctgccgctgtcattcttggtacacgtggtagaggccttattcaaagtgtgttgcagggaagtgtcagtgagtattgcttccacaactgtaaagcagccccaattatcattgtgcctgggaaagaagctggtgaacagtctgtgctttgaaggaagatgagtaggagagttgttcctgttcgttgtactgtcagtttaggtgataaagtgttgtatattggtgctggtttgttgtgggaacatgtccttaagtgctttgctttgcttgtaatctgaagctctgaaccctctgtctggcttggttatgaaggaatgcttagaaaccgggagagtagcagacaaacatataacacaagaaatgtacttgtattgccattgctgacagaatacttcattagtacagttgatatgaataaagaatcttcagccacaagttttttttcc

SEQ ID NO: 21551 - DNA, 1977 bp, Zea mays
  Clone ID: LIB3354-024-C2_FLI
cctcctccgcctttctttccttcctccctcggggctccgcgcgcgcagcagccaggaacatctccgctgcctgcccccttcaagaacagcggcggtcggctcttctccaatcctgcttcaaggctgcagtgctgcaccgaccggcaaccgctacggcaattagtttcgtaacctcgggtcgccgccggccttcttcctggcctgagctatatctcagctgcaggaaagctcagttcggatccattcactcatgggctcatcctcaagccatcagagaagcaaaacgcgcagcaggaacaggaagcccttgggaattcagctcttggagcgggtccgtggcagccccatctccttcagatcatgccaggctctcgtgctagtgctcacgttcctatcctacgccagctaccacgccaccaggaaaaccacgagcgtcgtcaagagcgtcctcgacccaaagacgaagacgaacctaggcacgtcgtcggcgcattactggccccccagccacctcttctatctccacaatctcaaaggtgcggacaacaacagcagcagcggcggcggctgggctccgttcaacgcggcggaagacggcacggcgttgctgggcgagatcgacctggcgttcctcggcgcgtacgcggccggcatgttcttcgcgggccacctgggcgacagggtggacctgagggtcctcctcaccgtagggatggtggggaccgggctcttcaccgccgccttcggagcgggctactggctcgacgtgcacagcttctactacttcctggccgtgcagatggtggccggcctgttccagtcgtccgggtggccgtcggtggtcgcggtggtcggcaactggttcgggaagagcaagaggggcctcatcatgggggtgtggaacgcccacacctccgtggggaacatttcggggtcgctgatcgccgctgccatgttgaggaggaggatctctgtttggaggacgatgagaagaagccgagcgacatggacgctccattgcttgaacgagaacgacgacgcgcagatgtagaggaaaaggcggttgggtttattgaggcgtggaggatccctggtgtggcctctttcgccctctgccttttcttctgcaagcttgtggcgtatacgttcctgtattggcttcccttctatatcagccacacagctatcggtggagaatacttgtcggactccgcagccggggtactgtcgacgctgttcgacgtgggcggcgtcgtgggcggcatcctcgcgggccacatctccgaccacctggacgcccgggcgctgacggccgcgagcttcaccttctcggcgataccggcgctcttcttctaccgcgtctacgggaacgtctcgctggcctggaacatcgccctcatgttcgtcacggggatgctggtgaacggcccctacgcgctgatcacgacggccgtgtccgcggacctcggcacgcacagctcgctcaacggcaactcccgcgcgctggccaccgtgacggcgatcatcgacggcaccgggtcgatcggcgccgccgtcggcccgctcctcacgggctacatctccgccaggagctggagcgccgtgttcacgatgctgatggcgtcggcgctcgtcgcggggctgctgctgtccaggctcgtggcggcggaggtggtcgccaagatggagtcccggaggacgcccgcccctgctgatagcgacctgcccgtgtcctccatggacgaaccgtagatcgcttctagctgcgccccggctgtggtctcctggtgacatagaatggtggcgggagggtagatcacctgtgattttaggcctggtgggactgtgggagcaggtgcgcagtgcgcttctgtcccggaactgtgggatcttgctcctgccgtgccgtgcttcaccgcttcagcttctggttcgtcatggtatatatgtatatggaatgtcttctggttgccgacg

SEQ ID NO: 21552 - DNA, 680 bp, Zea mays
  Clone ID: LIB3354-024-D8_FLI
gcgccgccgacgtttcgagagcagagtatccaagctagccaagcgcgcacctcggtgacctagctagttcaggcgacgatatggcgtcaggtcaggaaagcaggaaggagctggaccgcaaggcccgcgagggcgagaccgtcgtccccggcgggaccggcggcaagagcgtcgaggcccaggagcacctcgccgaagggcgcagccgcggaggccagactcgcagggagcagctggggcagcaggggtacagcgagatggggaagaagggcggtctgagcaccacggacgagtccggcggcgagcgcgccgccagggagggcgtcagcatcgacgagtccaagttcaccaagtagtcctatcgcgtgcgtgcgtacgcagcgttcgtagctgtctgcgtagtgtaccttggccgtagctagtgctactctctactttggagtagctgaatgataataatgtagctagcagcatgcatgtaggcgatcatacatacgtacgtacacaggtacgtgtgtgtgatcatgtatgcttccagaagggtatcctagcttaatcagtcacgtcgtcaagtcgtcaatatggcaggttcgcgtcagggctttgtagtttgatagcctgtttcacgactcctcaataatcaagtagtgtaatgaaagtttggcggttccttgtttttt

SEQ ID NO: 21553 - DNA, 900 bp, Zea mays
  Clone ID: LIB3354-024-E12_FLI
tacaaattgacaatacaaactcaggtaaaaaacctgcatatattgccatttcataggtcatggttagttctaaattgtgtgctactgacttgttgccttaatgaacaatagtttatgacaaatgagatgagatgaacttgttgttcttgcagacttaacttcgatcctgttcctatcctctgattattttctttgcctttttacatatccagccatagcatgtttgcatacagtttcaccattgttcttccttttgcgcatattcaggcaaagaatgattacacacttatgtatcatctgtgtgtagcatgagattcagtatggaggtgacaatgcatcagcctctccaaggtcacaataccctagccaaagcactgcaccgacaatgcacattcccaacacaagcaaccagcaaccatcgccaagcttatttgctccaggaaaccctgggttgacacagtccaagaattccatggtcttttcaagcgcattatccagccccatccggcggagcctgcaaccttaccacctagagcaggacggggatgcagggtacttcgcgaacggtgcaagccgcgatgtgaaccccacggcttcgaatgattcgtccatggacatgcactcggacagcccagctcatgactcctactgagcagctcccaccatggaaccagcctcaagaacagcacttcaagtggaagaagtctgctgtcacagccttcccaggcctagtagtaatattcaatttaacaccttccatagcctctcttacactaagcgtgtgatgtcttgtgttgttactactacttaccacttgttgctttgcgagaattatgtaatttgcatgtactatactatactgtaccatttgatttatctgtgcatattactgctgttggt

SEQ ID NO: 21554 - DNA, 896 bp, Zea mays; identical to SEQ ID NO: 19486
  Clone ID: LIB3354-024-H1_FLI

SEQ ID NO: 21555 - DNA, 867 bp, Zea mays
  Clone ID: LIB3354-025-C8_FLI
gcgggggcggcaagcaaccacgggcggagctcggagcgtcctcctcctcccgtctataaattcccctctttttcttcctccatatataggggccatcagatccaagaagagggaagagcaccaaggaccttcggcgcccgttcaggatccacatcttcccgagcgagttcttggttggcctcttcctcttcggaccacctccaaggctcttggtgtagcttgccactctcaccaatcaagttttcatgtctgatctcgacattcagatcccaactgccttcgatcccttcgctgaggccaatgctggggactctggtgcagcagcagggtcaaaggactacgttcacgtgcgcatccagcagcgtaatggtcgcaagagcctgaccaccgtccagggattgaagaaggagttcagctacagcaagatcctcaaagatctcaagaaagagttctgctgcaatggtacagtggtccaggacccagaacttggacaggctgcccgctataggtcattcagctccagggtgatcagaggaagaacgtctcgaatttcctcgtccaggccggcattgtgaagaaggagcacatcaagattcatggtttctgagcaaccgccgggtccatatcaaaccaaccctgcatgcagggcatcttattatatataatatctgaggtggagcatatctatctggctgtgtactgcaagcaggcctagtacgccgcctgcgcgttcctcctattacacatataggcccctccctgcgtgtatgcttgttaccgtcgtgtcgaaccttgtactacgaggctccatcgaacatcgatggcttgcttctttatcagaacatgtttgaataaacgctatttggt

SEQ ID NO: 21556 - DNA, 1176 bp, Zea mays
  Clone ID: LIB3354-025-E10_FLI
cgcgagtccccttcccgatccgccggccgatccacccaccgccgccatgccggcgttcaaggccccggcgccgggcttcgccgtgcgcttcagccccttccacgagaaccgcctcctcgccgccacgtcccagcacttcggtctcgtgggtaacggtcacctcatcgtcctcgacctagccggcggcgggcctggggccgccccggcgccggtcttctccttcccgacctccgatgcgctcttcgactgcgcgtggtccgagtcccacgactccctctgcgccgccgcctccggggacggctccgtgcgccttttcgacgccgctctcccgccggcgcagaaccccgtgcggctcctccgggagcacgcacgggaggtgcacggcctcgactggaaccccgtccgccgggacgccttcatctccgcctcctgggacgacacgctcaagctctggtcccccgaccgcccagcctccgtccgcaccttccggggccacgagtactgcgtgtacgccgccgcctggtccgcgcgccacccggacgtcttcgcgtcggcctccggggaccgaaccgcgcgcgtctgggacgtccgggatcccgcgcccacgctcatcctgcccgcgcacgaccacgaggtgctctcgctcgactgggacaagtacgacccctccatcctcgccaccgcctccgtcgacaagtccatccgcgtctgggacgtgcgcgcgccgcgggcgcccatcgcgcagctcgccggacacagctacgccgttaagcgggtccgtttctcgccgcaccgccagggcatgctcatgtcatgctcctacgacatgactgtctgcatgtgggactaccgcgccgaggatgctctgctcgccaggtacaatcaccacacggagttcgttgccggcatcgacatgagcgtcctcgtcgacggcttgctcgctagccccggatgggacgagatggtctacatctggccatttgggacggatccaagagccatgtagcacgcagatgcaatagaccaggtgatttgtactattggttttcagctttgcattgggcggtggtaatactaattacatgctcctacatgttcagttactatctcttcaaatgagttgaagaagttggaataatgtcaaaaaattgttcagttactatcccattgagctct

SEQ ID NO: 21557 - DNA, 703 bp, Zea mays
  Clone ID: LIB3354-025-F7_FLI
gtcagatttttaactggccactccagaaatggtgggacagatccactatatgtagctggaaatgcggctgatccagacactactttggttgtgtatatgggtttgtcaacacttccatcacttgctccaaagttaatgaagcacggcctgccaccagatacccctgctgttgcagtagagcgcgggactacaccccaacaacgaacggtgttcgcctcgttgaaggatcttgtggatgaagtcaagtcagccgatctagtttctccaactctaataattattgggaaagtggtatccttgtcacccttctgggttgagtcatctgaacatgatgcactgaaagttcagagctcgtatgcaaatgaggccagatgacaacagattttcttggtttttagtgactggacaatacttgagaaatgcaagatcccagatatgggagcacaggttcgacctggtgtacacagaaacatctcaggaagcatggatcctgaatggcggatggtagcttaagcttataacagacttggggcagaagcgcacttggactgatcatgcttgattctttggcctaatctacatgagattcacaatttttcgatttagttgagttcgacaatagttgtgtgcttctttgttactagtagccatgtacgtgcggcgcacgcgtgtttacgattctatgccctagcatagtaaggct

SEQ ID NO: 21558 - DNA, 890 bp, Zea mays
  Clone ID: LIB3354-026-B1_FLI
gcaaaaaagaccgccggttgaggagcaagatagatcaggtaaacggaggaagggagaaaatgaacccgatttgagtgaacaccatgtagacaaggaaaagagtttggactcacgtggtggagataagtttcgttcagtggatcatgagaagagtgctaatgaggaacaaaatttaagagcgggcaaaataaaagaaaaatctgatgataaatatgacagagatcctagggaaaaattagatcggggtgaaaggcgtcgtggggaagatgccattgagagatcaacagatagattgtcggacaggagagaacgttccattgaaaggatgcaagagagaggtacagataaagcccttgaaaaaggtagagaggatagaaataaggatgagaggaataaagttaaatatgctgaaccttcggtggaccggacacattcttctgatgaacgattccgagggcaaagtttgccaccgcccccacctcttcccgcaagttttgtaccccaatcagttggcgccaaccgacgtgaagaagatgctgaccgaaggggtgggagctccaggcatgttcaaaggtcatctcctaggcacgatgagaaagaaaggaggcagtcagaggagaatatttcgtcatttcaggatgatgggaagcacagaagagaggaagatattcgtgatagaaagcgtgaggacagggatactttatcaaacaaggtagatgacagggatagggaaaaggggacttctttgaaagaagacagtgatcctagtaatgtttctaaacggagaaagatcaagcgagaacagactttagaagctggggaatatgcaccttctgctccacagcctccctcccatggatctggcagctcacaattgtctgacatacgag

SEQ ID NO: 21559 - DNA, 1306 bp, Zea mays
  Clone ID: LIB3354-026-H10_FLI
gcacttctcgcgtcacgttgttttgcaggtacaattcaattgattaccccaccaccactagcacccaccgtcccggcgcggagaccgcttccctccctccgcctccgcaaccctctcccgcctcgcccgcgcctccctccatttgtccgcggctcccctccctcccgatcttaaccacccgccacccggcttcctctcccccttcttcctccctcaaaccagacgctcgccccctttcctccacctatcttcttcagacgaccagcaggaggtacgagcaagaccacctaggaggcctctctctcccccccagccacccccgtagcgagagggagggcggaagaggatgagcgcgtccaggttcataaagtgcgtcacggtcggggacggcgccgtcggcaagacctgcatgctcatctcctacacctccaacaccttccccaccgactatgttccgacagtgtttgataacttcagtgccaacgttgtggttgatggtaatactgtcaacctcggcctctgggacactgcaggtcaagaggattacaacagactgagaccactgagctatcgtggagctgatgtttttcttctggctttctcactgatcagtaaggccagctatgagaatgtttcgaagaagtggatacctgaactgaagcattatgcacctggtgtgccaattattctcgtagggacaaagcttgatctccgagacgacaagcagttctttgtggaccatcctggtgctgtccctatcactactgctcagggagaggagctaagaaagcaaataggcgctccatactacatcgaatgcagctcgaagacccaactaaacgtgaagggcgtcttcgatgcggcgataaaggttgtgctgcagccacctaaggcgaagaagaagaaaaaggtgcagaggggggcgtgctccattttgtgatctaatcatcggtagatgaagaaacaagggcgaaggtgccatggctttatcatcgtcgcgtcttgcttcagtggaacggcatggatggtccccacccccctaggtttactggcggctcggctgcagcgagttctcatctctttgtcgaggcattaagcgatatgtttgtttcattttcctccttcctgccttgtgattatctggtgtgtgtgtgtgtgtgactgacgaagtcgcggcgattaggtaactcgcttagaaggtatttcccgtgtttgagcaaaagaaagtatccctgttatctctgttccataagttagacatgatgtaatcgtactaagtttatttttacttatttcacttgaatgg

SEQ ID NO: 21560 - DNA, 797 bp, Zea mays
  Clone ID: LIB3354-027-G7_FLI
gaacaggcaacgcactactcgttcgtatctttaagcttgctgctgcagcgtaagaaaaagcagtctgcactcggtcggtcggtcgctctgttcagctagctgcatgctcggccaccatatctcctccagtacgttcgtcgttctccacgccgctatctggtctgcggtaagcagcagctagaggccgttgtgtaggctacacagaagatcatcgaggaggatgctggtgaagaagaacaacagcacggcgatggcggcgggcgtgctgccgctggcgtcgctgaaccacatcagcatcgtgtgccggtcggtggaggcgtcgctgcgcttctacgcggacgtgctcggcttcgtgcccatccgccgccccggctctttcgacttcgacggcgcctggctgttcaactacgggatcggcgtccacctgctgcagtcggaggaccccggcagcctcccggagaataagggcgagatcaaccccaaggacaaccacatctccttccagtgcgagagcatggtggcggtggagcggcggctcaaggagatgggcatcccgtacgtgcagcgctgcgtggaggagggcggcatcaacgtggaccagatcttcttccacgacccggacgccttcatgatcgaggtctgcaactgcgacaacctccccgtcgtcccgctcgccgccgccgccgaccagcgcgcgcctgccgtcctcggggcctgcaagcgggccgcggcggtcggcgtcaagcagcagcagcagcaaagcagcgccggcggcgtgccttcttccgccgccccag

SEQ ID NO: 21561 - DNA, 1126 bp, Zea mays
  Clone ID: LIB3354-028-C10_FLI
gaagtagcaacaagcaaaagcccagatcgataatacgatggggcggtcgccgtgctgcgagaaggcgcacaccaacaggggcgcgtggaccaaggaggaggacgagcggctggtggcctacgtccgcgcgcacggcgaagggtgctggcgctcgctgcccagggcggcgggcctgctgcgctgcggcaagagctgccgcctgcgctggatcaactacctccgcccggacctcaagcgaggcaacttcaccgccgacgaggacgacctcatcgtcaagctgcacagcctcctcgggaacaaccaaaccaagcaagcaagcaagctgaagaacgtcctccggttgttgccttgcctctgcctgcaggtggtcgctcatcgccgcgcggctcccggggcggacggacaacgagatcaagaactactggaacacgcacatccggcgcaagctgctgggcagcggcatcgaccccgtcacgcaccgccgcgtcgcggggggcgccgcgaccaccatctcgttccagcccagccccaacaccgccgtcgccgccgccgcagaaacagcagcgcaggcgccgatcaaggccgaggagacggcggccgtcaaggcgcccaggtgccccgacctcaacctggacctctgcatcagcccgccgtgccagcatgaggacgacggcgaggaggaggaggaggagctggacctcatcaagcccgccgtcgtcaagcgggaggcgctgcaggccggccacggccacggccacggcctctgcctcggctgcggcctgggcggacagaagggagcggccgggtgcagctgcagcaacggccaccacttcctggggctcaggaccagcgtgctcgacttcagaggcctggagatgaagtgaacgaaacgaagcccacacgtcctttcttctccttttgttgtcggttgtagtcttggcttgttggatttggatagagctagttggttactagttgttagttagaagatagtgcaggatgatcactagctactggctacctcgacacagtagctgctcccttctcttccattctatgtaaaaaagaaacaaaaatacttagggggtgtttggtttctagggactaatgtttagtccctacattt

SEQ ID NO: 21562 - DNA, 1193 bp, Zea mays
  Clone ID: LIB3354-028-C2_FLI
cttttttagcaagtacctcagctccattgtaccatcatctggatcatcacatgacactgcactaacccaggagaatcgacatttatactcagaggtcagagcatgccactaacctgactaacagcaaggcagcgaaacagatcgaacatggcatgtacaacatgaacaccagttcgatcaatgcagcttccagttggagcattatgaaggaggagttcacatttcaagcacatgatcgccctttcaataattgtcatgcttccaccattgtagaggttgagaaagaaatttttttggtttcatattttggtggatccatagaaggggctcctgatgtcaaaatctggacacagagatacagtgatggctattggcatcctccagtagtagctgatgaagaaaatgcgacagcaatgtggaatcctgttttatttcagctcccctctcatgagttgcttctcttctacaagattggtgaacaccctcaaaactggagcggtgccatgaaaagatctctcaatggtggtatgtcctggttagagagggagcaattaccacctggtattcttggccctattaagaataagccctttttgcttgatgatggccgtttactatgtgggacatctgttgaaagttggaactcttggggtgcatggcttgaggtaacagaagatgctggccggacatggagcaaatatggtcctatatttatccaaggcgagaaacttggtgtcattcagccagtaccttatcagaccaccaatgggagtatacgtatgttgctgaggtctcaccaaacaatcggttcggtatgcatggctgattcctacgatggaggattaagatggagttttgcgcgcaagagtgtgcttccaaaccctaattcagggatcgatggaatcaagatgaaagatgggagagtggcacttgcctacaacaccgtctccagaggcacgctcaaagtggccgtctccacagacgacggcctctcatggcaagaggtggtgacgctggagaacgcggaaggctgggagttctcgtatcctgcagtgatccaaacccagggccggccctgagggtatgcaggatatacgaccgctcaggaccctcaaggtttatagggcccccgtttattcaacttatatccaaatacatatacattacagataaatctatattctcgttctttt

SEQ ID NO: 21563 - DNA, 1045 bp, Zea mays
  Clone ID: LIB3354-029-G11_FLI
ccccaacgccagtagacagcgtcttcggatctacgccatcttcaccagcgaaggcatcaacgccgatgacccctcgaagcccaaggtggcacaagacttgattcagaggtggcagaaccaaaattcagaaacaggaaggccactaaacgctgaggtgatggaacttgacctactctccctcgactcggtcgcaaattttgctgacgcttggaatgctcgtatggcacccctacacgtgctgatcaacaacgctggcatcttcgctataggagaaccccagcgtttctcaaaggacggacatgaagaacacatgcaagtgaaccatcttgcacctgcgttactggcgatgctgcttataccttcccttctccgaggttctcccagcagaattgttaacgttaattcgatcatgcacactgtaggttttgtcgacgctgaagatatgaacttgagaaaacataaatatagaagttggttaggatactcaaatagcaagctggcacaggtaaaattcagtagcatgcttcacaagaaaattcctgcagaggctggcatcggtgtagtttgcgcttctcctggaattgtcgacacgaacgttgcaagagatcttcctaagattgtcgtagccgcgtaccatttgattccctacttcatatttgacgctcaagaaggttctaggagtgcactgtttgcagcatccgatccccaagtcccggaatactgcgagacgctcaagtcggaggactggccagtttgtgcctgcattaactatgactgtagtccgatgaatgcgtctgaagaagcgcacaatcttgagacctcgcagctggtctgggagaagacactggagatggtcggccttccgccggatgccctggagaagctcatcgccggagaatcagttcagtgccgttacggacaacaggatacaactttttagttagcagtttagaggtggtttgttcggttgttatgtcattttgatcctaaatttgcagggaggaaaacacagggaagggagaaaaagaatttgttgacagctacc

SEQ ID NO: 21564 - DNA, 2072 bp, Zea mays
  Clone ID: LIB3354-029-H11_FLI
gagagagaaagagagagagagagagagagagagggaggcagagagcttgccatcccaagcaaaggttccctccttccccacctcgcgctcaacccccctcatcctcgcacatccgattgtgccctgtgctctgccgttctcttatccaagatttcgctggcggcggctcagggagcgaacaaagattgttttttttttcgggctatggagacgaggcctgattcattcaggcccgggcggtggagtggcttcctgaccgggtctgattcgtattggttcaaatgatctgggcggcttaattggttgcatccgcttccgccggggaatcggagctagggctgtggtttgttggccggctggtggatttgtcggcttgggtctggtgagatctggagggtttctggttcagcgcacgggccgcaggtctgcgtagatcccctcttcgattccgtggcggatttgtttagggttttggtttgagtctggtggaacatgattaagcagatccttggcaggctgccgaggaagccggggaaggctggggatagccgggaagctgctgctgcggggaatggaactgagccgtcgaattcctacagtgttgtgaggggcatggacccagggaacaagagggctggaaatggagactatccagttccatctggtctaacttctaacccagtgatgaatggggctgtggtgtatcactccagtgagccgttaccggcattcaaggatgtgccggcatcagagaagcagaatttgtttgtcaagaaggtgaacctatgctgtgctgtgtatgacttcgcggatccaactaagaacctcaaggagaaggaggtgaagcgtcagacacttatggagcttgttgattacatcacttctgcgaatggcaagttctcagaggttgtcatgctggagatcacaaagatggtgtcgattaatttgttccggagctccagccccacccctcgtgagaacaaggccattgaaggggttgatctggaggaggacgagcctctcatggatcctgcatggtcgcacctgcagatcgtgtatgaggttttcttgagatttgtagcatcacaggagacagatgcaaagctggccaagaggtttatattcgaaacagagaaacataatggtgttgcagagttgttggagatcctgggcagtattatcaatgggtttgcccttccgcttaaggaagagcacaaattattccttgttcgtgcattgatccctcttcacaagccaaaatgtgtatctatgtaccatcagcagctatcatattgcatcacacagtttgttgagaaggattgcaaacttgctgacacagttattagaggcttacttaaatattggcctgtgacaaacagctcaaaggaggtgatgttcttgggtgagttagaagaggttttagaggcaacacagcttgcagagttccaaagatgcatggttccactcttccgtcagattgcccgtagcatgaacagctctcatttccaggtggcagagcgggccttgtttctctggaacaatgaccatatcgaaaacctaatcaagcaaaactacaaggtgctattacctatcatctatccagcactcgagagaaactccagagatcactggaaccaagctgtccgtagcctgacgctgaatgtccgcaagatcttctctgatcacgattctgcattttttggggagtgcgatcagaggttcagtgacgaggagctcaagcaggaggaatctgattcgaagcgagaagccctatggatgcgcttggaggaaatggccgcctcaaaacctcgcgaaaacagtcccttaggcgcaccgaatggcaaacccagccaagctgctggctagaatagcccaccatatcagccgcagccgtgtaactctgactctgggttgtgattttagctttgggacttttttttgtcgttggtttgcctctggccctgttgtaggtgggtaggatgtgtttggttttgtcaggactgtatgttcaaagtgtacacatacagaggaatttgagagatttggcatgtgtagtaacattactcaggatt

SEQ ID NO: 21565 - DNA, 1181 bp, Zea mays
  Clone ID: LIB3354-030-A6_FLI
gctgtgcgagccacaccgcccgcacaccccaccggccggccacataggccccgacggcgactcgaagatgacggccgggcagcttctgcgcaccgagccatcagcccagccccagcgggtgcgccacagcaccccgccggcggcactccaagcagacatcgtgccgtcgtacccgccgcccgagtcggacggtgacgagtcgtgggtctggtcccagatcaaggcggaggcgcggcgcgacgcggacgcggagccggcgctggcctccttcctctacgcgacggtgctgtcgcacgcgtccctggaccggtccctggccttccacctggccaacaagctgtgctcctccacgctgctgtcgacgctcctctacgacctcttcgtggcgtcgctcgcggagcacccgtccgtccgcgcggcggcggtggccgacctgatcgccgcgcggtcgcgggacccggcctgcgcgggcttcgcgcactgcctcctcaactacaaggggttcctggccgtgcaggcgcaccgcgtggcgcacgtgctgtgggcgcagggccggcgcgcgctggcgctggcgctccagtcccgcgtcgccgaggtcttcgccgtggacatccacccggccgccaccgtcggcaggggcatcctgctcgaccacgccacgggcgtcgtcgtcggggagacggccgtcgtgggcgacaacgtctccatactccaccacgtgacgctgggcggcaccggcaaggcggtgggcgaccggcaccccaagatcggggacggcgtgctcatcggcgccggcgcgaccgtcctcggaaacgtcaggatcggcgccggcgccaaggtcggcgccgggtccgtcgtgctcatcgacgtgccgcccaggagcaccgccgtggggaaccccgccaggctgatcggcgggaagaagggcgaggaggtgatgccgggggagtccatggaccacacctccttcatacagcagtggtcggactacatcatttgagcccgcaagctagaaaaaaaaagagctcgtcttgctactgttgttatactgctgttgcgttttctgtgtatgtgcgtggatgtgttagctgtatgctcttgttccagtgaggtgaaccgtggacatgctggtgtggtgtccagaaagatatgctcaaagttcgctctgtaattttcgaagc

SEQ ID NO: 21566 - DNA, 662 bp, Zea mays
  Clone ID: LIB3354-030-E3_FLI
atcaaccctacctaggcgccgccgccgccgcaggcggcccccgcatcgtcggcaagatgcagatctttgtgaagactctgacggggaagaccatcactttggaggtggagtcctcggacaccatcgacaatgtgaaggccaagatccaggacaaggagggcatccccccggaccagcagcggctcatcttcgccggcaagcagctcgaggacggtcgcaccctcgccgactacaacatccagaaggagtccaccctccacctggtgctccgcctccgcggcggcgccaagaagcgtaagaagaagacgtacaccaagcccaagaagatcaagcacaagcacaagaaggtgaagctctccgtgctgcagttctataaggtggacgacaccactagcaaggtgacccgcctccgcaaggagtgccccaactcagagtgcggcgcgggcgtcttcatggccaaccacttcgaccgccactactgcggcaagtgcggcctcacctatgtctacaaccagaaggcgtaattgcttgccccgatttgctttatccgcctaccctatcgagcatccagctgttggttactcgaactgtatctcatgtagatctgtctgaggttgaaacttaaatggagcagtagtatctgacatattggtacccctgtt

SEQ ID NO: 21567 - DNA, 1175 bp, Zea mays
  Clone ID: LIB3354-031-A12_FLI
gattggccccccgtactcgttctcgtgatttagaatatctcttcggcaaatatggaagaatacgagaagtggagttgaagcgcgactatgcatttattgagttcagtgaacatcgtgatgccgatgaagctcggtaccaactagatggcagggatgtcgatggaagtcgcattgttgttgagtttgctaaaggggtcccacgtggtccaggtggctcacgtgaatatatgggaagaggccctccaccaggcacaggtcgttgtttcaactgtggaatggatggtcactgggcaagagactgtaaggctggtgactggaaaaataaatgctaccgttgtggagaaagagggcatatagaaagaaattgccagaacagtcctaggagcgtcaggcgtgaaagaagttactcacgctccccatctccacgccgtggaagaggtcgcagtccaagctatagcaggagcaggagccggagccggagccggagctatagccgatcgaggtccctatctggatctcctaggggaggccgccgtgaccgtgatgataggagatcgaggagtcttagctacagcaggagccccatgcggtcgccacctgcaaaggaaaaggagcgcagtcccacacctggcggaagcaggagcccaaggagccgcagcccacaggatcaggtgatgagcccaccacctaaggataacggcgacaggaatggttcagaccgtggcgacagccccagagggagggaaaacagcaggagccgcagccgcagccgcagcccatccggtggtaaccgcagccctgcagctaatgggcgtagcccgagccccagaggtgaccgtaccccgagccccatggctgaccgtagcccgagcccaaagggcaatggtaacaacgatggtggtgatgatgatactggccgtggtggttcccccacaggaagcaagtcaccctgaacgctgcaccgtctcagttcttaggtgcttcgtgatgcagtgggcaaacataccaaagacgtgatagctgtatcgtttccctatctgagacgtggacttatttagcttgctttgatattggtgtcttatttctcttatgaataatgtggacacgcatgttgtgtcgccctatgttggtatttacctgcaatgctatagcgtcagtcttgttgaggcctgagc

SEQ ID NO: 21568 - DNA, 959 bp, Zea mays
  Clone ID: LIB3354-049-A10_FLI
gttcatctcccaggttttcccctccaatcacccccaggtcttcctctcgcgagttgcggtctcgcgcccccctccgccgaccgccgcctcctcacaaccgcggaagctgcttccctctccattggacgcggccagcttccatctctcggtcacctccctctacatcccacggccgctaccacctttcctctacctcacacggccgccggcctctccaaggtctgcacacgcattcagcgacgcatttgcctatatcagcactgtggtcataactctagtagagaaaggagaagatgcaggcatctagggcaaggcttttcaaggagtacaaggaggtacaacgagagaagtcagctgaccctgatatccagttaatatgtgatgattccaacatattcaagtggactgctcttatcaagggcccttctgaaacaccttatgaaggtggtgtgtttcaacttgcgttcgcaattccagagcagtatcctctactgcctcctcaagttcgatttttaaccaaaattttccacccaaatgtgcatttcaagacaggtgaaatttgtcttgatatattgaagaatgcatggagccctgcatggacccttcagtctgtttgtagagcgataattgctctgatggcccatcctgaaccagacagcccacttaactgtgattcaggcaatctcctgcggtcgggtgacatcagaggctatcaatcaatggcccgcatgtatacaaggctggctgccatgccaaagaaaggttagatgtagaacatgtgccaagccaagagcctatgtcagtccatatgttgtcaggtttgctgtgtgctgtctgtctgtgaacttggtggttcttgtttcctaataagtcctaaccattcatgtgtgtgtattctgtattctgtatcccggattcccgatgcttggtctgtgatgtaataaatcctggaattcaac

SEQ ID NO: 21569 - DNA, 1217 bp, Zea mays
  Clone ID: LIB3354-052-C8_FLI
gttcaaaaccagactccgagcgaatccccaatccgttcggcggcgagccgaccggcgatgcgtccgccggcgccgaaggtcccatccgccgcttcctcgtcctcccacagccagcgcgagccccgcccggagaaccctctcctcctcctcccctcctctcgcttcaccaagctctcactcggctgtcccctcctcgaccgcctcctctgcggcggcctccccgccgcctccgttaccgagatagccggcgagtctgcctctggaaagactcagctctgtcttcagctcgccctcctggcgcccctgtccccgctctccgcctcctccctcttcctccactccgacctcccattcccccttcaccgcctccgccgcctagcccccaaatcccgccccgatatcctcgaccacgtcctcgtcgccgccgcgcactcccccaccgaccttctgtccctcctcgcccgcgcccagcgactgctcgccaaccccggccgctccccgcaccgcctccccatccgcctcatcctcctcgactccatcgcttccctctttcgtggcgacttcgacgcctcccccgctgacctcaggcgccggtccgcgctcttcttccagatatcggcgaagctcaaggagctcgcttacaggcaccagtgtgtggtggtggtgaccaaccaggtggtggacgtggtggagggggacgccgggaacaccgtggcgtggtcgtcggggcgccgtctgagcccggcgctcgggatcgcctgggccaactgcgtcaacacgcgcctgttcctgacgcgggaggtggaagggaatggcaccagcgggagcgcaaggaggtggatgaaagtggcgtttgcgccgcacctgccagagcaatcgtgcgagtttgtgatacggagggacggcgtctttggcgtcgagccggagaggtaggcgctcctcttggtcttttgtcaggactttacagaggaagtgtgtgaccataacctgtttgatgaaatgtccccgttggtagttagatttcacacaccctgtaaaagattcaaaatattttactattttacttcaattgttaagaatggatgtgaagccatgcatgtaaattagacgtgtcacaacacaacggacaagtgattgaacctttctggggaaagagttattgtagaaatcatcatggctagttttgaagtctgaaatcagaacctaagttctgtctt

SEQ ID NO: 21570 - DNA, 1508 bp, Zea mays
  Clone ID: LIB3354-060-C7_FLI
ccacatcctcccctccttcctccttgggttcccagcccgtgcgccccgcctgtcgcagtcgcagtcgcgccgcagccgccggccatggcctgcctcaccgacctcgtcaacctcaacctctcggacaccacagagaagatcatcgccgagtacatatggatcggtggatctggcatggatctcaggagcaaagccaggaccctcccgggcccggtaaccgatcccagcaagctgcccaagtggaactacgacggctccagcaccggccaggcccccggcgaggacagcgaggtcatcctgtacccgcaggccatcttcaaggacccattcaggaggggcaacaacatccttgtcatgtgcgattgctacaccccagctggcgagccaattcccaccaacaagaggtacagcgccgccaagatcttcagcagccctgaggtcgctgccgaggagccctggtatggtatcgagcaggagtacaccctccttcagaaggacaccaactggcccctcgggtggcctattggcggcttccctggccctcagggtccttactactgtggaatcggcgcggagaaatcgttcgggcgtgacatagtcgacgcccactacaaggcatgcctgtacgcaggcatcaacatcagtggcatcaacggggaggtcatgccggggcagtgggagttccaggtcggaccgtccgtcggcatctcttcgggcgatcaggtgtgggttgctcgctacattcttgagaggatcaccgagatcgccggcgtggtggtgacgttcgacccgaagccgatcccgggcgactggaacggcgcgggcgcccacaccaactacagcaccgagtccatgaggaaggagggcgggtacgaggtgatcaaggcggccatcgagaagctgaagctgcggcacaaggagcacatcgcggcctacggcgagggcaacgagcgccggctcaccggcaggcacgagaccgccgacatcaacaccttcagctggggagtcgccaaccgtggcgcgtcggtgcgcgtgggtcgcgagacggagcagaacggcaagggctacttcgaggaccgccggccggcgtccaacatggatccctacgtggtcacctccatgatcgccgagaccaccatcgtctggaagccctgaggcatcccgtggccgtgtcgtgtcggtttgctccgcgtacggcgctggccgttgcatcgcagggcccagcggttgcgcaactattttcccttccccgttctgtttgcttgtactactactctaccgctagtcctgcatagcattttagctagaacacaacaacagcccaaaaaaaaacattgttgcttgcttcggcttcgacgcttcccaccacttccattccatgccgtccgtccgcttccttcctgtgtaatcctcctccaataatagacgtgtcatgctgcatcctctgcattgtataaaagtggcgtaattcttttgctacgcctccaatgtctgttgcttttagctgc

SEQ ID NO: 21571 - DNA, 1679 bp, Zea mays
  Clone ID: LIB3354-061-A12_FLI
cgacagcgccccagggttcgtcctcccgctggaatagtaagtgaccggagaaaagcagcacaagagagatgtggtacctatgcgtcttctaccacaggctcctggactaccggcgaccggaggtggagtccctcgccgagctctttgccggtccaggcgcccgtgaatccgtcgagtggcgcatgccggagaaccaccacgtagactcccccttccacctcgttcgcctccctggagacgagcgcctcgccgctcaggtcgccaaccgcagcttgttggtgaaggggatctacgagctctggggctatggcactacctacgaggagctggagaagtcggtcagggagtaccccgacgagaggaagcttccgttcctggtcccggaaagcagcttcaagatcgttatcgacagcttcggcaaggtgatcagctcccaagagcagaacgagatcatacagagcctcacttacataccattcaagggacgtgttaatttgaagaagcctgatcacagattctttgtcatggagaccgatgactatgggtcgaacaatggtctcccaccggttgtcaagaggtcgatattctttggccgggaggttggagcagctgataggcatctcttgccaacataccagctcaagagtaggaagtacattggccccactgcaatggatgctgaaatggctttcctcatggccaatcagggtctggcctcgcctgggaagcttgtctatgacccttttgttgggaccgggagcattttggttgcagctgcacattttggagctatgacgatgggtgcagatatcgatataagggttgtacgggatggtcgtggccccgattgcaacgtttggagcaactttgagcagtataagttaccagagcctttgtgtttgctaagggcagacaacaatctcccaccctggcgtcctggattgaaggagatgttcgatgcaataatttgtgacccaccatatggagtccgggccggtggccggaagtctggtggtcggaagctcataaaaggcgtcaaaggcccttacacagtgcctgatgagaaacgggacaatcacatcccatcaaccgccccatatagcctcgcagagtgcgtccatgacctcctccaccttgccgcaaggatggtagtcatgggtggcaggctcgtcttcttctaccctgtactgcgaggtgaagatggcactgcgaacccgcagttccctgagcacccctgcttcaagttaatcacctcctctgagcagatcctgagctttcggtacagccgggttctgctgaccatggtgaaggttgcaccttacaccgaggagatcgagaagttggccgcagagcggcaccgggagttcagggagaaccaccagaagtggatggaggagggcaacctccattccgccgtgttcgagccagcccaggatgggaagcctgatagagactccaagcccaaatacagaggcaagtatgtgtagcagcgcagatactaacttgttgaatttagtggaaacacatttttggtggtttcctgttctgcatcctgtaccaaattttatgagctagtgtgttggcaggcgctgcgagatgtaccactgttccagagtaccattcaaatcttgtcagtccatttgatggatgaggaagtgtaattgcagcttaattgactg

SEQ ID NO: 21572 - DNA, 1222 bp, Zea mays
  Clone ID: LIB3354-061-B1_FLI
gcccagcgttccatactcctggagatagaaaatatatagacagagctcgttactagtcgtagctagccagggctagctgtagctgaagtcatcatcagataaatatattcatcagcctgtaattaatagctagttttcagtggattagctagcttggcaatatatatttaactaataaggcggcggtggcatggacgcgatcagcagcctgctgctgcaggagggctggaggaagggcccgtggacggcgctggaggacaggctgctcaccgagtacgtgcagcagcacggcgagggcagctggaactccgtcgccaagctcacagggctgcgccggagcgggaagagctgccggctgcggtgggtgaactacctccggccggacctcaagcgggggaagatcaccccggacgaggagaccgtcatcctccagctgcacgccatgctcggcaacaggtggtcggcgatcgcgcggtgcctgccagggaggacggacaacgagatcaagaactactggcggacgcacttcaagaaggcccggccgtcgcggcgcgcccgggcacagctgctgcaccagtaccagcagcagcaggaggaggagcgccgacagtacctccagagcctgcagctcctgcagcaggagcagcaacaacagcagctgctcctccagcagcagagtcagcagctggtggtgaaacaacagcagctggagcagcaaagcccgccggagcctgatcaccaggccgtgatggcgatgttggacagccagcagagcacggcggaatgctactgcagcccggtgccggtggtgccagagcagtgctgcgcgctcccggccgacgacgacgacgccatgctgtgggatagcctgtggaggctggtggacggggacgggcgcggctgcggcgacggcgacgactccagcggagtcgcatactagccggctagtacgtacgtgtgcgtgtctataccagtgtaaaaaaacaaagcgggatgaagaggaggttcttcaggtttcagctgctgcaaggcaaggatactgctagtggtagtagagacatgctaattttccaacgagaatagttgatcatgtttcatgttttttttattttacccatgaaccatgagcaagtggcattgtatcaaaaggccctctgtttacaaggtcgaaataccttcatgtaactttggtttcaagaataaagaccgtgttttagcatgg

SEQ ID NO: 21573 - DNA, 1766 bp, Zea mays
  Clone ID: LIB3354-092-B4_FLI
gtcaaccccaggcagaccgatcctcctcgtctgaccacgacggccatctcgcacgcctacttccactcaaccacataagtcttttctgccaggcggccaggcctaacctctcccctgcgccgcctctactggttttgcacagtgccgtgacgtggagatccagctaaaattagatttatttcttccttcttcggtgaggaactcaaaaccacccttctaggtccaacaggttcctcagcttgcgcaagatccgtctgggttgtccgccctccattggactacccaaggtgcggcgcgtccaccagtggcaggtggaagatatctgcgtaagtcaaaacatagaataagagtggactgctattagttttccataggatggaatccttgtggaagctgacctacttgctcgacccggcatcaattgccctcattgctacagccatttctgtggcctatgcatcagcatcacgagctctggactatggcaaagagatggagagaaacttggatttttcagaggcttccattacattggatcgttcgcaggctctaatgattccccttgcaagctcgtgcagtctgttgctgatgttctacttgttctcgtctgtttcacatctcgtgacagcttttactgctgtggcctcagcattggcactgttcttttgcctgtctccacacatcacctatctcaaggcacgattcaatctaatggacccattcatgtccagatgttgttcgaagtcatttacacggttgcaaggtttgctgatgctcttctgcatagccacagtcttagcttggttggtttcagggcattggatgctaaataacctactggggatttccatatgtatagcgtttgtcagccatgtgaggcttcccaacataaagatctgtgcactgcttcttgcctgcttgtttgtgtatgatattttctgggtgttcttctcagaaaggttctttggagcaaatgtcatggtttctgttgccactcagaaggcatctaatcctgttcacacagtagcaaataagctcagcctgcctgggttgcaattgattacaaagaagctggagcttccagtcaagcttgtatttcctaggaatttgttgggtgggattgttccaggaagcaatcctggtgattacatgatgcttggccttggagacatggccattccagggatgcttctagctctggtactcttttttgataaccggaagttaaaggatgtgaacgttgttccatcagacgtgtctcccctgagacggcggaattatgtgtggtatgctctaacagggtatggtattggtttggtagctgcactagctgccgggatcttgtctcagtctccccaaccagccttactgtacctggtgccgtcaacactggggcctgtcatgtacttgtcatggttacggaatgagctgtgggagctatgggaagggtctggaactattctgaacgagaaagctcgtttgttggaggtctgagatccaagtggacaataagaaggatctgagctcaccgggattgaatcttaattagttattaaacattacttgagctcatactgaaagggagtatttataagctgagtgttctattcatgcatgtgagctactttctccgttctcgaatatttgttgcccactagttcatttttaaactagactgcgacaaataaaaaagaacggagagagtactaagcagttgccctcgcgaatcatgtaactgtttgtaatagaaaggttcagttcagtgc

SEQ ID NO: 21574 - DNA, 948 bp, Zea mays
  Clone ID: LIB3354-092-C10_FLI
tctccccttctctctcctcgcgccgttttcctctctacctctttgatccggcaatggccgcgcccgcccctgccaccaccggcgacctcctacgcgtcgaccccctcgagctacgcttccccttcgagttgaagaagcagatctcgtgctccatgcagctgtcgaatcacaccgacgactacatcgccttcaaggtgaaaactacaagtccaaagaagtattcggtgcgacccaacactggggttgtcttgccacggtctacctgtgatgttgttggtttgtggatcttagcacttaccaaagtgtatgtgtttgggcaagccatcatccattttgtcgtttttatgtatttatctgtactgttgcagttacgatgcaagcacagcgggaagccccgcctgacatgcagtgcaaggataagttcctagtccaaagcgtcgttgcccctgctggtataactgtgaaggatgtcactggggatatgtttacgaaggagtctgggtataagatggaagaggtcaaattgcgagtgacctatgttgctcctccacagccaccctctccagttccagaggaatctgaagaaggttctccacctagggcttctgaatcagaaaacggagatggaccttctggaggattcaccagagcactaagagagcgcattgagcctcaagacaaatctacagaggctggagctttggtttccaagttgactgaagagaagaattccgcgattcaacagaatcatagacttagacaggaacttgacttggtgaggcaggagatcagcaagaggcgtggagggggcttctccttcatcgtcgtcataattgttgctctgatcggcgccatcctcggctacctgatgaagtcgtaattctttcaggctgtcctctgctggccataccagaggcagtcgtgcaagttgtgtttgggaagaactcg

SEQ ID NO: 21575 - DNA, 1132 bp, Zea mays
  Clone ID: LIB3354-093-F11_FLI
cccaaacacgcacagcacacgaacacacaccgcgcccagctccgaggtgatcttccggcggccggcgagatgagccgtggcacaggcgcgggctatgaccgccacatcaccatcttctccccggagggacgcctgtaccaagtcgagtacgcgttcaaggcggtgaagtcggcgggtgtcacgtcgatcggcgtccgcggcgcggactccgtctgcgttgttacgcagaagaaagtcccggataagttgctggatcagacgagcgtgacacacctgttcccgatcaccaagtacgtcggattgcttgccactggccttacagctgatgctaggtcattggtttcccaagcaaggaacgaagcagctgagtttcgtttcaaatggggctacgagatgccagttgatgtgttagcaaaatggattgctgacaaagctcaagtttacacgcagcatgcatacatgagaccccttggagtaggttagtatcatcacacaataaagtttggcattccattaagcttctgtcattttactgtgatgtagtgttgagttagcctatggcttattgccaccatgttcttcttcggtatcattcttcagttgctatggtcttgggctacgatgaagagaaaaatgcccaactattcaagtgcgaccctgctggtcacttctttggacataaggcaactagtgccgggctcaaggagcaggaagcaataaattttctggagaagaaaatgaaggatgacccgaaattcacctatgacgaaactgtgcagattgcaatatctgcgttgcaatcagttctccaggaagatttcaaggccactgagatcgaagttggtgttgtgagaaaagatgaccgcgttttcagagctctcacgacagaggagatcgatcagcacctgacggcaattagtgaacgtgactgagatgtcatatgctgcacatttcagcgctgcacacactgcgccgtgccattgtgcttcggcagtcattaagtttcatagtcatcaaaggaactgagtgtaccatttcacgtttaagaccgaaaacaagccccctctcgatgtactcgtttcatatcgttctgtggttgattgaaattggcacggtttggttttgggttgct

SEQ ID NO: 21576 - DNA, 1678 bp, Zea mays
  Clone ID: LIB3354-097-E2_FLI
gaagaaaatgcggcggcgtgtggtataaaccccgcccgtcacgccgggccgtccgtgcgtttccttttgtcttcgcttgcttcctttcgaaagtccttgcgtcacactcgccgatcgatcgagtctctccggattccagagaggcccaactgccgaagccatcgatcgccgccacctcttcgagcagaatagttgagaatggctgacgaggatatccagcctatcgtatgtgacaatggcactggaatggtcaaggccggtttcgctggtgatgatgcgccaagagctgtcttccccagcattgtgggaagaccacgccacaccggtgtcatggtcggcatgggccaaaaggatgcctacgtaggtgatgaggctcaggccaagagaggcatcctgacactgaagtacccgattgagcatggcattgtcaacaactgggatgacatggagaaaatctggcatcacaccttctacaacgagctccgtgtttcgcctgaagatcaccctgtgctgctgaccgaggcccctctcaaccccaaggccaacagagagaaaatgacgcagattatgtttgaaaccttcgaatgcccagcaatgtatgttgctatccaggctgttctttcgttgtacgctagtgggcgaacaactggtattgtgatggattccggtgatggtgtgagccacacggttccaatctatgaaggatacacacttcctcatgctattctccgtttggatcttgcggggcgtgacctcaccgaccacctaatgaagatcctcacagagagagggtactccctcactacgagcgctgagcgggagattgtcagggacataaaggagaagcttgcctacgttgcccttgattatgaacaggagctggagactgccaggagcagctcctctgtcgagaagagctacgagatgcctgatggtcaggtcatcaccattgggtcagaaaggtttaggtgccccgaggtgctgttccaaccatcccttgttggcatggaatcgcctggcgtccatgaggccacgtacaactccatcatgaagtgtgatgttgatatcaggaaggatttgtatggtaacgttgtcctcagtgggggatctaccatgttccctgggattgccgatcgtatgagcaaggagatcacgtccctggctcctagcagcatgaaggttaaagtgattgcgccacctgaaaggaagtacagtgtctggatcggtggctctattttggcttctctcagcacttttcagcagatgtggatctccaagggagagtatgacgaaactggtccgggcattgtccacatgaagtgcttctaagtttttttgggaaatttttccaaaaaaaaaaagaagtttctggggaagttcgacatggtacgtcaggcgttaccggctcattgtgaaccaatacatgaactgccatgataaggttataagcagaaataacagtagcactggctccaattcctgaagatgagtctggtgctccctgctgtatgaaatggatcccactcgtatattcgtcaccgcgccgcactggtgtaacgtgttgcctcagagtttgcttttagctggttccttttttaaaaataagtactgtttttggttggctaccagtcattttgaacttcagtagcaaattatcttatttaatgcttgctttttc

SEQ ID NO: 21577 - DNA, 1173 bp, Zea mays
  Clone ID: LIB3355-032-B7_FLI
cccgcgcggcaccctcgcctccgccgcacgcccccactctctcaccgccaccgccgagaatggcctgctcccacctcgccgccgcgggtggctcttcccctgccgccgccgcagtggttcgttccccgacgcattccccagccgccgccttcgcgcgcctccggtcgacgccgcgtttctcgagcgccggcctgtcggttaagggaagcagggcggctttcccgtgggtcgccgccgcggggccggccgcggcggcgccggtggccgacctggacggccgcccggccacggagaagcagcccatcattgtcatcgataactacgacagcttcacctacaacctatgccagtatatgggggagcttggattgaacttcgaagtataccgcaatgatgaactgaccatagaagatgtaaagaggaagaacccaagaggaatacttatttctccaggtcctggtgaaccacaagattcagggatatcattgcagactgttcttgaattaggcccaaccatcccaattttcggagtttgcatgggcctgcagtgcattggggaggcatttggaggaaagattatccgtgctccttctggagtgatgcacgggaaaagctctccagtttattacgacgaggaattaggaaaggccttattcaatggcttgccaaacccttttacagcggctaggtaccacagcttggtcattgagaaagaaaccttcccacatgatgctttggaggctaccgcatggactgaagatggactcatcatggctgctcgccacaagaagtacaaacacatccagggtgtccagttccacccggagagcatcatcacccctgatggcaagaaaatcatcctcaacttcgtcagattcattgaggagctggagaagcagcgttcctaatctacgggaggtagatgcgacgggtggtttcatagatcaggcggaagcagagacataagccactgtgaagttccggcactggcagtggaagtttagctaggaatcaacgtttccctctcataattcgttgttctcgtggtaacataatctgtgtggaccgaatgtcgaataaagtccaggcgtccagctgatgaaataagcaccggtgttggtgcgctctaggtggatatatatccggtaattttcggcaaggggaggccttggc

SEQ ID NO: 21578 - DNA, 514 bp, Zea mays
  Clone ID: LIB3355-032-H5_FLI
gccgaatgttttcttacgggaggggcgaccatggccgtctaggctacggcaggaaggtgacgacgggccaccccatggaattgcccatcaacctgccgccgctcagcagcagccgcgacggtcggtggcaggcgaaatacgtggcttgtggcgggcggcacaccctcgctattgcggagtggacagaggccactgattgatcaccgtttgtggaataagcacaaggccggtgccaacgggcgtaggtggggctgcagtcgatggcgctgccggccgccgcggtcggtacttaccagaagtagttcagtaccgactgccattgccatgtgtcgtcttttaattagttgatgtccaataaattcataagttttttttaaaaaagtctaagtaatctgaaaaggtatttatgaattatgtaacttttttactttttggtattatgtattttttatgttttatgagttatgtaaattttatttatgatttataaattacatactgtgtatttatattc

SEQ ID NO: 21579 - DNA, 695 bp, Zea mays
  Clone ID: LIB3356-011-E9_FLI
tccggcagcagccaaaccctacataggcgccgccgcaggcggcccccccgcatcgtcgccaaagatgcagatctttgtgaagactctgacggggaagaccatcactttggaggtggagtcctcggacaccatcgacaatgtgaaggccaagatccaggacaaggagggcatccccccggaccagcagcggctcatcttcgccggcaagcagctcgaggacggtcgcaccctcgccgactacaacatccagaaggagtccacactccacctggtgctccgcctccgcggcggcgccaagaagcgtaagaagaagacgtacaccaagcccaagaagatcaaacacaagcacaagaaggttaagctctccgtgctgcagttctataaggtggacgacaccactagcaaggtgacccgcctccgcaaggagtgccccaacacagagtgcggcgcgggcgtcttcatggccaaccacttcgaccgccactactgcggcaagtgcggcctcacctatgtctacaaccagaaggcgtaattgcttgccccgatttgctttatccgcctaccctatcgaacatccagctgttggttactcgaattgtatctcatgtagatctgtctgaggttgaaacttaaatggagcagtagtatctgtcatattggtacccctgttactgaattgatgtgatgctgagttt

SEQ ID NO: 21580 - DNA, 858 bp, Zea mays
  Clone ID: LIB3354-031-F3_FLI
ggggcggcaagcaaccacgggcggagctcggagcgtcctcctcctcccgtctataaattcccctccttttcttcctccatatataggggccatcagatccaagaagagggaagagcaccaaggaccttcggcgcccgttcaggatccacatcttcccgagcgagttcttggttgacctcttcctcttcggaccacctccaaggctcttggtgtagcttgccactctcaccaatcaagttttcatgtctgatctcgacattcagatcccaactgccttcgatcccttcgctgaggccaatgctggggactctggtgcggcagcagggtcaaaggactacgtacacgtgcgcatccagcagcgtaatggtcgcaagagcctgactaccgtccagggattgaagaaggagttcagctacagcaagatcctcaaagatctcaagaaagagttctgctgcaatggtacagtggtccaggacccagaacttggacaggtcattcagctccagggtgatcagaggaagaacgtctcgaatttcctcgtccaggccggcattgtgaagaaggagcacatcaagattcatggtttctgagcaaccgccgggtccatagcaaaccaaccctgcatgcagggccagcttattatatataatatctgaggtggagcatatctatctggctgtgtactacaagcaggcctagtacgccgcctgcgcgttcctcctattacacataacacatatagccccctccctgcgtgtatgcttgttgccgtcgtgtcgaatcttgtactacgaggctccgtcgaacctcgatggcttgcttctttatcagaacatgtttgaataaacgctatttggt

SEQ ID NO: 21581 - DNA, 1475 bp, Zea mays
  Clone ID: LIB3354-032-B9_FLI
tcaaacaaatcaccctgccgatcgccatggacgaacagcaggcggaggagggcgaaagcgcgcgcgtcaagaggacgccggaggaggggtcgtcgccgctgtccgctctggcggatgacgtgctgctacagatcctgggacggctcgaggcggacccgcgggactgggcgcgggcctcctgcgcgtccccgcgcctcgccgctctgctccgggcggcctgcctcccgccgcgactgtcgcgggcgctccccgccgagctcctccccgcgccgtcaccggacggggcgcccgcggcctgggcggcgctccacaagctctccgtctgttgcccggggctcctccgcgccggggtgctcctcgagcccaccgacgatttcgggctcgatctcgacatcgggcctgacgtccccatctacgcccgcaccgacgcctcctccgccgaggggttcgaggccacggccacctcccgccacagcggaaccatcgtcgcggccgggagcgcgccccgcgccggcgaatctgccaacgtcgccgcgtggtcgctctacgacgacctgtacctggacgcggcatacgactgctcgtccgagctgcagatcccgcctgccgctgcggctgtggaacccgccccgcccgcgcccgtggcggcgatccgcgacgtggaggaagcaacgaccacaaatgctgtctcatgcggcgtcgcccggcgcggcgtggtggccgggagccgactgcatccgcggcggtggctgggcaccgtcggcgcgcacctggcatcggggtcctggacgctgagccgtgagcaggggaacaagctccttgccagccgcttccgcggcgaccggctatacctctgcgactggcccgggtgcgtgcacaaggaggagcgacgcaagtacatggtcttccgcggcgtgttccacaacttcgcccggtctcaggtccggcgcgcgctcagggacacgcgccgccccaccgtcgccgtcgaatgcgccttctgcggctgcaaagagacctgggacctctactcggctttctgcctccgcagtttctacggctaccacgacgacggcgagcctgtggtgcgcgcctacgtctgcgagaacggccacgtcgcgggcgcctggaccgaccgcccactctactcctgatcttggagtggacactccgactgacatggtattgcatcaaagactgcaccctgccattgccagatgctcgctcctaccacttgagctgtttctagacataattatgcgtgcctgcatatagcaatccggattttcgtcatgttctgatacacgtgggatgtgtattctttatttctttcttcttgctgttgctgttgtttgtgagaaactgagaatggttgagtagaataaggatgccggttgatttgcagcataggatataaagagatttgcttaaaattgtaaacctgatgctacgagaaattggaaccgctgttttattgc

SEQ ID NO: 21582 - DNA, 1511 bp, Zea mays
  Clone ID: LIB3354-032-D11_FLI
tcaagctaggatagagaatcgaatccgatccacaatccaaatcccaccgaggctctggcgcagcgcagtaggccatcgttcactgttggcacacacgggacacggcacgccgcaggccacagcgcgcgcgagaaggagccggagccggctgcctgcttgaacgcctggtaacgcggcctctcgcttcccctcccaaactttccctaccccgaccgccgatcctcctcgccttgacgtccaagagccccggtccgatgggtcgtccgccgagcgccggtgctccggcgttccgcttcctcccgtccgaggtggcggagatggaggcgcgcctgctgcagctcaacaacggcatccccacccgcgccgtgctgcagaccctcgcggataaattctccgcttcgcccgagcgcgctggcaaggtggccatccagcccaagcaggtgtggaactggtttcagaacagacggtactcacaccgggccaaaactcccagggccacgtcgtcaccgccggctaagatgacgccctcgggagctgatcaccagcagcatgccgctaacgcctccgccttcagggctgctcagctctcttctgtcgctgctgcgcaccacggttcctcctctacagggaagaatcctgtggaaagtgtctcagttgagtttgaggccaagtcagctcgtgatggtgcatggtatgatgttgctgcctttctttcacataggttgtttgaatccggtgacccggaggtgcgggttcgtttttctggatttggggcagaggaggatgaatggataaatgttcgcaaatgtgtgcgacaacgttctcttccatgcgaggccacagaatgtgttgctgtgcttcctggggacctgattctttgttttcaggaaggtaaagatcaggctctctattatgatgctcatgtccttgatgctcaaaggagaaggcatgatgttagaggttgccgttgtagatttcttgttcgctacgaccatgattcttctgaggaaattgttccactgaggaaggtgtgccgccgaccggaaactgactacaggcttcagattctgcatgcggctagagcggcagccacgaatgcagatgttcacactccacccaaagaggttaaggtggagttggcgtccactgataaaagcccagccgagcagaaaccccagaagcagcacaagatgatggacgtgaacactgatgaggtgaccatggtctccaccttggagcaagatgagacaccaggcaagactgtagcccccgtaccgtcagccactgcagaaacccgcaattcaagttcggacacagtgatgaaaggtgctgaggcttcctcggtcgttgaagatgacgatgaagtgcaggcagttgacaagatgaaagaggggtaggttttttttctgtcaccttttgttatctaggtcagtgcctgtcttaattaccatgtagcatcttaatggcctcagaagcttgtttgaaggcctatgtgagcctttgccttgcct

SEQ ID NO: 21583 - DNA, 2027 bp, Zea mays
  Clone ID: LIB3354-032-G12_FLI
gggatgaaggttgagagcctgctctgaaacgacgtacgtaaagggagcaaggaaccggagagcgtgcggcgggcttctggattttagcagagtaggcacctgtcgcttggacgtgcttcggagaagtaggtgtccaaaagttgcttacagtggatccagatccttcgaacaacattgctcaagctcatgatatagactgtcatggaggcagctgcagatgaggagaggccactgattcagtacctggctccagaggatgatgaagcttcctcacgatacactagcgacggaacgctcgatatcaacaagcagcgtgctctgaagaagagcaccgggaactggagagcatgcttcatgattctgggtaccgagttcgccgaatgcctggcattttacgcgaccgcaaagaacctggtcacctacctcacggctgagcttggtgagaccaacatcgatgccgcgacgaacgtgtccacctggattggcagctgctacctcacgccgctcatcggcgccttcttggccgacacgtactggggaagatacaagacgatgatagtcttcctcttgctctacatcgttgggatgcttactctgacagcgtcggcgtggctccccttggccatggaggacgactcacctgacaacagcggacttcggcgtgccacagcgtacctggggctctacctcgtttccctaggcacaggaggcatcaagccctgcacggcggccctcggggccgaccagttcgacggcggcgacgcggcggagcgggtcaccaaggcctccttcttcaactggtactacttctgcaccaacatcggctccctgctgtcggggaccgtgctcgtctgggtgcaggaaaatattggatggggagtcgggtttacggtgcagacggtgttcatgctgttcggcctcgccgtgttcgtcgccggtcgcaaggtgtataggtacaagaagctgggcgggagccctctcacaagggtagcccaggtggttgtcgcagctgtgaggaactgccatctcgtgctgcctgatgatacgtcagccctgtaccacgataagcttctaccaactgaaccaaatttcaggattgagtctgccagacaattcagattctttgacaaggctgccataatcaccggcgagaagggtgcagcagcgccgacgagcccgtggagactgtgcacggtgtcccaggtggaggagctgaagatgctgctccggttgctgccggtctgggcatccatggtgctcttcttcgccgtcagtgcgcagacggtaaccacgttcattgagcaggctagggtgatggacaaccgcatcggcccgttcaccattcctccggcgtcgatagcgaccttcgacgtgatcagcgtcatggtctgcgtccccgtctacgacgccgtgctggtgcctctggcccggcgtgccactggcaacgaccgcggcctgtcgcagctgcaccggctctccatcgggatcgcgctgtccgtggtcgtcatggtgtacgcggcgctgctcgagggcaggcgcctggccctcgcgcgggccaacatgcccgccatgaacatcgcgtggcaggcacccatgttcgccgtgcacggcgcggcggcggtcttcgccaccgtcggcgtgctcgagttcttctacgaccagtcgccggacgggatgaagagcctcggcaacgcgctcgcgctgctctccatggcggccgggagctatttcaactcgcttgcgctcagcgctgtcgggtcgatcacggcgcgcggcggggaacgcgggtggctcccggacgacctgaacaagggtcatatggactatttcttctggatgatggccgctcttggaacgctcaacctgctgcacttcttgcactactgcaacagacgatacagaggcaacaacaacaacacttcttgacgtgtgctgtcatgctgtgtgcaccatgtttctcaaaatcatagtttgataatactatattttgtaattatcataataatactatagttttagccagctcc

SEQ ID NO: 21584 - DNA, 717 bp, Zea mays
  Clone ID: LIB3354-032-G2_FLI
caacgacagccccagacaacactcaccgatagcaagtagcgccgccgacgtttcgagagcagagtatccaagctagccaagcgcgcacctcggtgacctagctagttcaggcgacgatatggcgtcaggtcaggaaagcaggaaggagctggaccgcaaggcccgcgagggcgagaccgtcgtccccggcgggaccggcggcaagagcgtcgaggcccaggagcacctcgccgaagggcgcagccgcggaggccagactcgcagggagcagctggggcagcaggggtacagcgagatggggaagaagggcggtctgagcaccacggacgagtccggcggcgagcgcgccgccagggagggcgtcagcatcgacgagtccaagttcaccaagtagtcctatcgcgtgcgtgcgtacgcagcgttcgtagctgtctgcgtagtgtaccttggccgtagctagtgctactctctactttggagtagctgaatgataataatgtagctagcagcatgcatgtaggcgatcatacatacgtacgtacacaggtacgtgtgtgtgatcatgtatgcttccagaagggtatcctagcttaatcagtcacgtcgtcaagtcgtcaatatggcaggttcgcgtcagggctttgtagtttgatagcctgtttcacgactcctcaataatcaagtagtgtaatgaaagtttggcggttccttgttatt

SEQ ID NO: 21585 - DNA, 1827 bp, Zea mays
  Clone ID: LIB3354-032-G5_FLI
catcatcagatcaccacccagtgcagcaaaagaaagaaagaaagaaagaaaagaaaaaggcaggcgcgccaaaatggacaacggcggcagcaacggctccgccaccgcctccgcctgctgcaacggcaaaattaaccgcgggccgcacgtggcgatgctggcgacgcccgggatggggcacctgatcccgctggcggagctggcgaagcggctggcgtcgcggcacggcgccacggccacgctcatcacgttcgcgtccacggcgtcgcccacgcagcgcgcgttcctggcctcgctcccgcccgcggtgtcctcgctgtccctcccgcccgtcgacctctccgacctgccccgcgccgccgccatcgagacgcgcatgtcggaggagtgcgcgcgctcggtgccggcgctgacggccgtcctcgccgacctcaggcggagcacggccgggcgcctggcggcgttcgtggccgacctcttcggcgccgactcgctggacgcggcccgcgccgcgggggtccgccgcaggtgcatcttcttcccatccaacctgcacgtgctcacgctcatcctccacctgccggacctggacgccgccgtgcccggcgcgttccgggacatgccggagccgctgcgcctgcccgggtgcgtgcccgtcccggggcccgacgtgctcatgccgctgcaggacaaggccgacccctgctaccgctggatggtgcaccacggcgccaagtaccgggacgcgcacgccatcctcgtcaactcgttccacgccgtcgagccgggccccgccaaggtcctgcgccagccggagtcgggcggccccagccgccggtggcccgcggtgtacccgatcggcccgctcatccacgccgacgccgggcggaaggacggcgcgtcgtcgtcgccgtgcctggagtggctggaccggcagccgccccggtcggtggtgttcgtctcgttcgggtccggcggcgcgctgccggcggagcagatgcgggagctggcgctggggctggagctcagcggccagcggttcctgtgggtggtgcggagccccagcgacgggggcgccgtcaacgacaactactacgacgcggagagcaagcgcgaccccttcgcctacctccccgagggcttcgtggaccgcacctgcgccgccggcgtggggctggtggtcccgtcctgggcgccgcagacccaggtgctggcgcacgccgccacgggcgccttcctcacccactgcggctggaactccgtgctcgagagcctcgtctacggcgtgcccatggtggcgtggccgctctacgccgagcagaggcagaacgccgtgctgctctccgacggcgtcggcgctgcgctccgggtgcccgagtcgtccaagcggagggagattatcgcggacacggtgcgcgaggtgatgcgcggggaagggaagggcgccgcggtcagggccaaggtggccgagctgcagaaggccgccgccgaggggctccgcgacgggggcgccgccgccgccgcgctggccgaggtggtacaggggtggacgacgacgacaggtggaggagagaaggactaggtggtggtgactggtgatgccgacgcgattggcgcctgccacctgccgcctgccgcctggtgccacagcgatcgtcctcatccagaccaactccaacttgggccgggccaaacgattcgtttgttccttgtccttgtgtataactttggttcacatgctttgcttgctgtatgtaatgtgacctacagtcctgcactttggcacgtagttaattagtagagtactcctagatagctgaagaaaat

SEQ ID NO: 21586 - DNA, 1377 bp, Zea mays
  Clone ID: LIB3354-033-B3_FLI
ccggagccccaaaggcggcggtgagccggagcccggagacgacggcgcggcgcgactcccccctaagcgacagcggcggcgtcgacgtaagcggctgcgtggcgccaccgacggaggctacgagcggttgtggaggcagatatgagaggtggaggtggctacaacgggtcggcggctgtgagatactgaaatccgcactgcagttctcttcttcccccaatcagtaccacctctccaagtggcaatcaccatgggagatcaatctggctctagaaatggaccacaacagaagtacgtttcaggagcccagaatgcctgggatatgttctctgatgagctgtcacagaaacacatcactactggttctggtgacctcaatgacatacttggtggcgggattcactgcaaagaagttactgagatcggtggcgtcccaggggttggtaaaactcaactggggattcaactagcaatcaatgtacaaatcccagtggaatgtggtggccttggtgggaaagcagtttatatagatacagagggcagtttcatggttgaacgtgtctaccagattgctgaagggtgtattagggacatactggagcactttccgcacagccatgagaagtcctcttctgtccaaaaacaattacagcctgagcgtttcctggcggatatctattacttccggatatgcagttacaccgaacaaattgcagtcataaactacatggagaagttcctcagagagcataaagatgtgcgtatagttattattgatagtgttactttccactttcgacaagattttgaagatctggcactgaggaccagagtgctaagtggattatcattgaagttaatgaagattgcaaagacatataacttggcagttgtcttgttgaaccaagtcactactaaatttacagaagggtcatttcaattgactcttgctctaggtgacagctggtcccactcatgcacgaaccggttgattctgcactggaatgggaacgaacgatacgcacatcttgataagtctccttcacttccagtagcctcagcaccgtatgcagtgacaggcaaagggattagagatgctgtgagctcaaaccacaagcgagcccgagtaacgtagcattcttggtgtcaagcacttgtatgtccactacgctcctgcagctttcttcgccatggatcttttggactagtgaggtgagactggagaatagtaccattttgttgattctcagttgctttgtgccgttggctaccaaccaaccttaagagagaagtaaatacaacagaacaggctaatatagtgttttgtatctgaacatctggcccatcgtacattcagtaaagcctataatagcgggc

SEQ ID NO: 21587 - DNA, 1231 bp, Zea mays
  Clone ID: LIB3354-033-D8_FLI
ccgacgacaaatttatccggcaggtgacgacgcaaggtacccgcgccggcgcgggcccgggtctgctcccggaggcgcagttcgcagcgttcgtgaggcggcacgggcggcggtactccgggcccaaggagtatgcgcgtcggctgcgcgtgttcgcggccaacctggcccgcgcggcggcgcaccaggcgctggacccgacggcgcgccacggggtcacgcccttctccgacctcacgcgggaggagttcgaggcgcgcctcacgggcctgcgcgccggcggggacgtccagcggctcatgagtggcgtgccggccgccccgccggcctcgcaggaggaggtggcccggctgccggccagcttcgactggcgcgacaagggcgccgtcacgggcgtcaagacgcagggcgcgtgcgggtcgtgctgggcgttcagcacgacgggcgcggtggagggcgccaacttcgtcgccacgggggagctcgtcgacctcagcgagcagcagctggtcgactgcgaccacacgtgcagcgcggtggcgcagaacgagtgcaacaacggctgcgccggcgggctgatgacgaacgcgtacgcgtacctgatggagtccggcggcctgatggagcagagcgcgtacccgtacacgggcgcggcggggccctgccgcttcgacccgacccaggtcgccgtccgcgtggccaacttcaccgccgtgccggccggcgacgaggcccagatccgcgcgacgctcgtccgccgcgggcccctcgcggtggggctcaacgcggcgttcatgcagacgtacgtgggcggggtgtcgtgccctctcatctgcccgcgcgcgtgggtcaaccacggcgtgctcctcgtcggctacggcgcgcgcggcttcgcggcgctgcggctgggctaccgcccctactggatcatcaagaactcgtggggaaagcagtggggtgagcaagggtactaccgcctgtgccgcggaagcaacgtatgcggcgtcgacagcatggtctccgccgtcgccgtggcaccggcgctgtgaacgaatccagtgtactcctgaaacggaagtcctggacggggcatggtattgtctgcacgtggtagtgtaggcttggatacaagtgataaaggaataacaaatcccgatacgtacagccgtacagaccccacccatgtgctctttgctactcgttccgttccattctaatataaattatatat

SEQ ID NO: 21588 - DNA, 1812 bp, Zea mays
  Clone ID: LIB3354-033-F8_FLI
ctgatgcaaagggagagaaaacagaccgtcttggatgcttttttgatggtttatgcaaatatgcccggcacaataggtttgaagtacgaggaattttgaagaatgcagatgtacttagctctccaaatgtcatctgttcattgagttttgatagggatgaagaatattttgctgctgctggagtttcaaagaaaataaaaatatttgaatttgatgcactcttaaatgatcgtgttgatattcattacccactggtagaaatgcctagcaagtccaagctgagctgtgtctgttggaacagctatataaagaactacctggcatcaacagactatgatggtactgttcagctatgggatgctggctctggtcaaggattcacacagtttacagagcaccgcaaaagggcttggtctgtgagtttttcacaagtcgaccctactaagttggcaagtggcagtgatgattgttgcgtgaaagtatggagtattaatcagaaaaactctattgatacaatccgaaacgtggccaatgtatgctgtgtacaattctctccatactcctcccgcatgctagcttttggttcagctgattacaaaatatactgttatgatctgaggaacacaaggataccttggtgtactatttcgggacatggaaaggctgtcagttatgtaaggttcttggatccagaaacacttatctctgcatcaaccgacaacacattgaagatatgggatcttaaccagactaattgcagtggattatctgctgattcttgcagcctgactctgaatggtcatagcaacgagaagaattttgtagggctatctgttcatgatggatacataacttgtggctctgaaaccaatgaagtgttttcttactacaaagatttccccatgccaataacttctcataggtttggttccattgacccgataactggacaagtgacaaatgaagacaaccagcagtttgtgtcgagtgtttgctggagagggaagtcaaacatggtagtggctgccaactccagtggcagcatcaaagtgcttgagcttgtgtgaatgatccaacgagagtgtcatattggagagaagaaggttctagggttgccatgcgggcctgtgatgctctcgtgccctcggtgatgctccaatggccctgcttatccggtgtctgcatcctcaatggaagcactaagcgaactgggtacctcttctaggtctgcatttcactgttttgccagggcactaaaagatgcgactgctctgtgcaagcaacctacagcaccgatcattggtcattattggaagctttgcttgaaactcccaagcgaaccaaagaaaaataaaataaaatcaagagtatgttgtgtttggaaatctctggcattttggcacggtaccttattcatcatcgtaaggagggccccaggtctgtacagaattagggggccatggggctgatgaaatagaacatgtgatgcatgcaaacttcttttgggctagagaggctgacggacgccgtggcgccttactgaatcagttgggaatttaactcagttttgatgtgcgccggacttgccatgactgttaagagcgaacgatggagagaaagaaatgatcctgtagctcgaagaagttaatcgtgccgtgtgaatgtttcaaggagaatgtgtgtagtaattttctttctacctcccttcattattgtacatatgtttagggctgcctaatggaaggccttgtaactagagtagagatgctcaaaagactcggtcatgagttcagtataatgaatgatcttctc

SEQ ID NO: 21589 - DNA, 909 bp, Zea mays
  Clone ID: LIB3354-034-B4_FLI
cttttggatttcttttctagcgtttctttttcttctgcaaggtacttgtgcagcctgatgcagctagaccttacaatttctataaacagaacacattgatagctatttttgtacttgaattccaaaaacactatatatagttatgcggttatgcttttgaaagtatttactcctaggccaagatagaaattagattcctattgcttgatctgctacatggatttggttctgcacagtttacaatgccacaatgcaataaaacctttgtctctcgatttgaactgagaattgtacagatgtccttgccagaatcgtgtctttggtacctagtttttttccttttctttttgtccttggaatatattttgtagtatttcagttctcagcaacttaactatgcatggtcctcaatctaatcacaatctctgtccaatcgtgccatgtcgttgttctatatgatgattatggtcatgtgagagtagttgtttcgttgctattcaggaattatgttattaaattaagtgaaatttcctaagctgatgaaatgctctatcgtaatttcaattaatatctggggttgaagtaaaataatgaaaaaacccttccatgcagttggttttttttatgtattgtacttgacctgttgtgctttatgagtgattacctaatgggtctgaactgaactgtttgttttgttctatttaggtcaagtcatcaccggcagctgggataaaactgtaaaatgctgggatccaagaggagttagtggaccagagcgcacccttgttgggacatatgctcaacctgaacgtgtatattctctttcgttagtaggaaataggttggttgttgcaacagctggaagacatgtaaatatttatgatctgcgcaatatgtctcaacctgagc

SEQ ID NO: 21590 - DNA, 852 bp, Zea mays
  Clone ID: LIB3354-034-F2_FLI
gagagaaacgcgtatacccaggcggcggttgaggaagaggaggagaagaagaagaagatggcttcctccgcatacgcctcatggtccaagcggtggatccgtcccgaggtacgtacgccgttgctgtttcccatctgatcgttcattcggtttctatcgatcggagaattgggtcatcggggatggatggatggatctgacgggatttgccgatcccggtgtcgcgcgcgtccatggatcaggtgtacccgctgttcgtgccgatggccgtggccttgggcatctgctcgtaccagcttgtgcgcaacatcacgggcaaccccgaggtgcgggtgaccaagaagaaatcctggatatgagagaggacgagagcgaagaagcatgatgcggtggagcctgccccccttttttactactactactgagggggactaaaagccacatgctctaagcccgtgcaattgaggcttggctaactggctgcatacaatacaaggactcgaaggatcattggccaactccgggtgcaatcgaagaacctgcaatgagtttgatggagcggggtttatgatcgttggcctcggatttgaactgttatgtatattcagtcgacccgttcgatttctgactcgggtttggtttgttcagtgagcttttaaggcgtcttgcgatgcgcatctacttgatcattaagatggctatgacgccagcctctaatatatactactagtggtagtaataggtatagcgtccgtatagtaccattgtacttgtacctcagaagtcagcaagactgcgacaataattgcatcgcgtctgtagacagcggaatgcatgagtagctactgtagt

SEQ ID NO: 21591 - DNA, 1663 bp, Zea mays
  Clone ID: LIB3354-034-H10_FLI
ggaatccctcctacgcggaagcgaagagattcgtcgcctcagccgcctctctgctcagatctgcggcggagcctcgccggcggcctgcgccccgcggcgccgccgatccaagatgccttcgtgcgtgcagggatgctgctgctgctcgtccctgcgccttctcccccgcgacgacgcgctctcgtccccctccgcctgcgcgcaccgcctgaagccttggtcttggcgtgcccaatcccccacctcgtcctcctaacgcttgtccccgcccgctccccaccctgatctacctgtctctacccttccctcctccatttctacatctccccgttgctgctctgctcctgctgccacaagagtattcgccttcaatcgttgctcgcgcctgtcatttcgtgccgcacgccgacttgtttgccgttttcgctgccgtcttctgttggatcggatttgtctggatcgattccaaggtcggatctacgctgctgcgggtcagcatcagtagcgcagcgtggttgtacgtttgcggtgttgctgtatcactctgcgtctctgcaagtgctaaaccagtcactttatggacggtggttcctgtggtctcgagggagcgtcggtagtgacatctactaccagcactggtattccgcttctgccagagaagcactgcgccttgtttgatgaagcttgtggagccatggcgggcagtaatggtcctgaaggagtgccagtagtgacttctgctgatgaccctccgacccgtgccgatattccatttgtctgcaattcagttgatgaaacctgtgaagccacagggggcggcagtgctcccttggagggtcagatatgtacgggtttctccaagttgatcagcttggaggtgaagaaaggcctccagaagtgtgcgacgttcccaccctcatctggtcagcctcagcaggaggattgttcatgctgccatgtaggtgacgagctcacgtgtgctcctgcctatgggcgatctgtgtccttacctcagccaactttgaagctggtctctgccatgaaaggaggtcgtgaaaagaacggagtggcatcatcaccaagtgaaaaccgccatgtcaagtgggctcctgatgtgtacgacccccctgtgacatcggtatgccattcagtgaccaacagctatcagcgccggtcaaagcaccgcaagaaggagaagaacaaacagaagaagaggcagaaggggaagtcgaagaagaaccaacaacagagttctgcccagaatccatctgcaccgcaggttcctggtatcgggccgaaaggcgttagcaccactggtggccagtctccagcagacgatctcagcgaacatgaggccgggatcatggactacagcatgggtagccaggaagccaactgtggaagcagcttcttgcgcgagtctgttgctaagatgcacttctcgaccgccgaagcttcctgagaggcgtgcctcagttctgtaaatatgatggacgggatgtgtataaataaacccagcatgctgttttttttcgtcgtcgttgtgtgcgtttgagagctcgcctagtgttttggaacaataatttttggacagactatgtgttctgtatgttttggtcgtcagacatatctatcctcagtccatggctttgcttaacggttt

SEQ ID NO: 21592 - DNA, 1072 bp, Zea mays
  Clone ID: LIB3354-034-H12_FLI
ctctcccatatcgggttctcccttcctcttcctgtttccgcgcgcgagatcgccgccccgggtgggccctagatcccgatggcctcgcgccgccgcaccctgctcaaggtcatcatcctcggcgacagcggggttgggaagacgtctttgatgaaccaatatgtgaacaagaagttcagcaaccagtacaaggctacgattggggcggatttcctcaccaaggaggtgcagttcgaggacaggctcttcactctgcaaatatgggacactgctggtcaggaaaggtttcagagtcttggcgttgcattctaccggggagcagattgttgtgtcctagtctatgatgttaattctatgaaatcgtttgataatcttcacaactggcgtgaagagtttctaattcaggcgagcccatcagatcctgacaatttcccttttgttctgttgggtaacaaagttgatgtagatggtgggaacagccgtgtggtgtcggagaaaaaggcaaaggcatggtgcgcctctaaagggaacatcccgtactttgagacgtctgctaaggatggaacgaacgtggaagatgccttccagtgtattgtaaagaatgctctgaagaatgaaccggaggaagaattgtttgtttgtagatccatctagcacactgtaagcgtcaccctgcgaatttgccagttttagaggcagctggaacaatgtagagggcataacatgcatgctaaggtgaatggatgcatagatgaagcatatttagacattttgttgaggaaatggaagttgcttgtaagcatacgcagcaccggaaaatgttttttcatgttaactcaacaagaggacaagatacaaatactgaggataggctactaatattgatgactgtgacatggagttcataccaggcggagagtgtcggcaccaggggtgttgtgggcttctgatggcgtctgcacgttaggcgaagcagggataatttcttttcctagcagtaggttgtctccctgatgtggggttgtctatatcatacaatgcaaacaaaagacatgtgtagagcttgtttctc

SEQ ID NO: 21593 - DNA, 1027 bp, Zea mays
  Clone ID: LIB3354-036-B8_FLI
cgctctctaccgtccgagaccccaagcaccagcgcggcggcgggggcggcggcgaccatggctgtcggaaagaacaagaggatctccaagggaaagaagggtggcaagaaaaagaccgtcgaccctttctctaagaaggattggtatgacatcaaggcaccgtcggtgttcagtgtgcgcaacatcgggaagactctcgtatccaggacacagggtaccaggattgcttctgagggtctgaagcacagagtctttgaggtttgcctagctgatcttcagggcgacgaggatcaagcttacaggaaaatcaggctccgtgctgaagatgtgcagggcaggaatgtgctcacaaacttttggggcatgaattttaccactgataaactcagatccctagtgaagaagtggcagacattaatcgaagcccatgttgatgtcaagacaaccgacaactacatgttgcgtttgttctgcatcggcttcaccaagaggcgcccaaaccaagtcaagagaacctgctatgctcaggcatcccagatccgtcagatccgccgtaagatggttgagattatgatcaaccaggcttctacatgtgacctgaaagaacttgtttcgaagttcattccagaagttattggtaaggagattgagaagtctacctccagcatcttcccacttcaaaacgtcttcatccgcaaggtgaagatactcaaggcccccaagttcgatcttgggaaactcatggaggttcatggcgactacaaagaggatgttggtgtgaagcttgagaggcctgtcgagggagatgaggctgggcaggaggttgctgctgccgagtagtttgtttgctacttctgtatctaggcgagtctggacatgaggttgcttatgacgtgaacttatagagttgtcttggctacgtgttttcatctggccctaagattttgtcttgaaacaagtttaaaattaagattactcgtggcgatcttctgtgttcgagtactgatgtactaagttcctttgcatc

SEQ ID NO: 21594 - DNA, 572 bp, Zea mays
  Clone ID: LIB3354-036-C8_FLI
ggtaacgccgtcgccgccctacggttcagatcttcgtcgtcatcttctccggcaacgagcacccaaagatggtggtccttcaaccagatcggttcctgagcgagctgacgtgcatgtacgagcggagcacggagaagggctccgtctgggtcaccatgaagcgatcaactctcaagggcaaggcacagttgcggaagatggagaataaggggcaggaggtagagcacaggtgcctcatccgcgcctccaatggcaagaagaacatctccacctcggtttctctaaaggagtacacaaagttccaagcttcatacgcaacagttcttaaggcccatatgcatgctctgaagaaaagggagaggaaagacaagaagaaggctgcagatgctgagaaggcaattgagaccgcacccaagaagcagaagaaagcatcttcaaagaaatcttcagggtccaagtcataaggcgctcacagaactcagtgtgtcttctcctttatgttgtttaccgccagactaattagagtgtcgtgaagttttacttatctggtttttattcgaattcgtgtctgg

SEQ ID NO: 21595 - DNA, 814 bp, Zea mays
  Clone ID: LIB3354-037-A7_FLI
gacaacactcaccgatagcaagtagcgccgccgacgtttcgagagcagagtatccaagctagccaagcgcgcacctcggtgacctagctagttcaggcgacgatatggcgtcaggtcaggaaagcaggaaggagctggaccgcaaggcccgcgagggcgagaccgtcgtccccggcgggaccggcggcaagagcgtcgaggcccaggagcacctcgccgaagggcgcagccgcggaggccagactcgcagggagcagctggggcagcaggggtacagcgagatggggaagaagggcggtctgagcaccacggacgagtccggcggcgagcgcgccgccagggagggcgtcagcatcgacgagtccaagttcaccaagtagtcctatcgcgtgcgtgcgtacgcagcgttcgtagctgtctgcgtagtgtaccttggccgtagctagtgctactctctactttggagtagctgaatgataataatgtagctagcagcatgcatgtaggcgatcatacatacgtacgtacacaggtacgtgtgtgtgatcatgtatgcttccagaagggtatcctagcttaatcagtcacgtcgtcaagtcgtcaatatggcaggttcgcgtcagggctttgtagtttgatagcctgtttcacgactcctcaataatcaagtagtgtaatgaaagtttggcggttccttgttattatctgcttgttgtatctcctgctctgcactagttaatttctcccatattgtggtagtaattatcatgtcgtcatcctcaacttttaggactagtttagttctggaggaaat

SEQ ID NO: 21596 - DNA, 2041 bp, Zea mays
  Clone ID: LIB3354-037-B3_FLI
gcagatagcctaatgccaaaatagcaaatttctcagccgtgacaacacagcctgcgctccccttctttcccgttcggctcacagcgaagaaggaagccggttagggtttccacctcctttcccctcctctccttcagcgacgaccgcgggccacaccctcgatatccttcccctcggacccggaggcgagcagcagcctccagcgcctgccacgcctgcccgtctcgttattgggaggattcgccatgtctgacatggagtccgtcgcagctcttatgaactcgacaagctccaagatacagcagcttcaggaggcatttgctgagcttgagagccagagcacggtttccatgaacctcaagtggaagcagcttgaagaccactttcgtggtcttgaacagtccctcaagaaaaagtttgacgagctaaaagagcaggagaaggagttccaggagactgtcgcaaaatcagagcagattctggagcagcgggaggcagctgttgtggcaaaggaactgacctctttggagaagttgcaggagaagagggaagctgcattagctatgatctttagcaagtccaggctttccttacctgttcctaccatcaacccaatgaacaaggcgctgaataatcttggtgtcaagtggccaaaaccggcatctgaggagagtgtgcacttgcaagttgataatgctgtagtgacgcctcgttctgagcttgttgcactctgtgaggaaatgaatgtgaaggggcttcataagttcatatccgacaacaggaagaacttggctgccatccgcgaggaaattcccagtgcactgaagaaaacatctcatccgtatggcttggtgttggattccctggaagacttctattctggagataatcttgtattagatggcaaaaaggatggggaccttctgggtgttagaaggacgtgcctgatgttgttggagtcactcggacagttgcacactgctggtataacttgtttctctttggagggtcacatgcttacaactaatatcatagagcgagcaaagaagattgcatttgagtggaagtccaagttagataatcttgagattgatgctagtaatgggaactgtcttgaagctcatgcatttcttcaactcctggcaacctttggtatttctgctgaatataatgaagatgacctgtgcaaattgcttccatatgtcagtcgtcgtcgtcagacacctgaactttgtcgattgcttgggttgtcacagaaaatgccaggtgtcattgaagttctggtgaaaagtggaagaactattgatgcaattaatttagcttacgtgtttgagcttactgaacagtttgaaccagtgcaactgcttaaagcatatctgagggatgttaagaaactgtcacatgccaggaatgtcaaaatttctcctggagcacagaatgagatgaatgagcgtgagttgtgtgcactgaaatctgtcattaagtgcattgaagatcataaacttgaggagcagtaccctgtggacccacttcagaaaagggttttgcagctagagaaagcaaaggcagacaagaggagggctgttgaagcagccaagccacagtccaagaggcctcgtgccaatggatcgacctttgcaccccgtgctacaggctttgctgacaagagcttctacccagcaaccccagagaggcatccctccaacccttacgagaggcagtttgtgtatggtgctgaggctcatcttcctccaatgatgagttcagcgtcttacccgatgcaacctgcccatggaccttattacggcaatggctacccagtacagtaccaggtcccgtatatccactaatggagacagccaggtgcaggtgctctttcctaactatctagcttagcctgctgccccttgttgtagtcctatcagttactctgctagtttgcctagatggaaatagttggaccactcaatgtgtgtgctctgagtggctgttgtgaaatctgttaattttatgccctaatgacatgacataaattactcct

SEQ ID NO: 21597 - DNA, 1125 bp, Zea mays
  Clone ID: LIB3354-037-B6_FLI
gcggctattcctatactgtttggccaaacttttgcgcaggctgctcgacgccatcgacgtgctgctgaccgacggctgccaaggcctgctcgtccctctctctgcgcgcacccgcaagaggcaccaccagcaccagggccaggccccgtcctccgacgccggcgccttgttggccacgtcgtccgactgctgcgtgctgacgcgggaggacatcgtccgccacctcttcggctccatctcccacttctccccggtcgccgcgctcaccgtcgcgtccctcggcctcgtccgccgcgacgtcgtgcacgctgtccacgtcgacgacgacgggctcgacgtgatcccgcttttgcgcagggccgtctcggacggcacggccgtggccgtcgtcgccgacgacgacgcgttggtcggcgagatctgccccagcgtgctcgcctcgtgcgacgtcgaggcggtgtcggccgccttcgcggggctctccgctggcgacaccatggcgtacatagactgctcgctgtcgtcgcactctccgccagagttcttggtgcgcgccatcagagctcagctcgccggaaagggactggacgccatggccgagctcgtggaatgcgctggaaaggacaccgccgtccttcctttgtccccgtcctcgtcgttgtcgtcgacatcctctgacgaggactcaccgtcgggacgcgcacgacgcccaaggaggatgtcatctgggagcttcgggtggcggtccacggaggacgtggtggcttgccactctgagagttcgcttgtggcagtcatggcccaggcgcttgcgcaccgtgtagggtacgtctgggtcgctaatgagaccagcggcgcgctcgtcggggtagtgagattcgccgacgtgctcgcggtactccgggagcaactccggcctcagtcggtcagtcccaggtgctagctagtgctatgcagataaaccgtgatctgcgtgtcagctcgcgcaagaatcaagatctccgacgctaaaacagttgctagtggttctcttccgtgtcaatccgtctcagtcaagttcggactgaagatgtgcagagtttgtttgtttgtgtgtgtgtattttgaatgtgctaagtttttttt

SEQ ID NO: 21598 - DNA, 1395 bp, Zea mays
  Clone ID: LIB3354-037-E11_FLI
cggacgggtacatcctgagcctgcaaaggatcccgagtggcgggcgtggcgggcacggcggcggtgccggtgccggtgcctcgtcctcgcgcgcggggcagccggtgctcctgcagcacggggtcctcgtggacagcaggacggcatgtcatggttgctggcctcgccggaggagtcgctgccgttcatcctcgccgaccgcggcttcgacgtctggatcgccaacaacaggggcacgcgctggagccgccgccacgtctcgctcgacccctccagccgggggacgctggtggcgctggcggccttctcggagggccgggtggtgagccagctgaaatccgcggcgctgctcacgccggtggcctacctcgcccacatcaccacccccatcggcatcctgctggccaaggcgttcgtcggcgagtcactcacaggtgctctcggacttcctcggcatggccgagttcgacccgctagcgtacgtaacgtaccgcgctctcgtacaccccccactgcagatggatgcaggcatgcagctgagctgagctgacctgacctgacctgacctgacctgctctgctcgccgcgcaggccgccggtgacgaacctcatcagggcgttctgccgccgcccgggcatgagctgctacgacctcgtcggctccatcaccggcaagaactactgcctcaacagctccgccgtcgacgtcttcctcaagtacgagccccagccgacctccaccaaaaccatggtccacttcgctcaaaccgtgcgcgacggcgtgctgaccaagtacgactacgtgctgccggagcggaacatcgccagctacggccaggccgagccgccggtgtaccggatgtccggcatcccgccgagcttcccgctcttcctcagctacggcggccgggactcgctcgccgaccccgccgacgtgcgcctcctcctgcaggacctccggggccacgaccaggacaagctcacggtgcagtacctggacaagttcgcgcacctcgacttcatcatcggcgtctgcgccaaggactacgtctacaaggacatgatcgacttcctaaaccgcttcaactagtactagcatatatatttgcttcaatcggtgtcgtcttcagccccagcaggattagacaaaaaaagggggggacactgcagctcgtaaacgttgtccatacagattatcagaggtgaaaaccatacatgatgtaatttagcattagatagttaaaacatggagctgcctcagtatggaggattgtcaactactctccatcacagcagtaggtgtgatgtagaagagtgattgtcacactgtgtgtgttgcaaatttgcaacacagtgattactaatataaaaaatactcttgagttaacctttgac

SEQ ID NO: 21599 - DNA, 758 bp, Zea mays
  Clone ID: LIB3354-039-B2_FLI
ccgccgcttacgcgcagcctgctgggttccactatggatacgggcatgggcatgggcatgggttccaccatggcgggcatatgggacaagcacaagcccatggcgtccaccgacaggcaccgttggggcaacaacagcagcaggcagatatttatctgaaggccctgctcttcatgattgtaattctagtgctcgcaagcctcctcgcgttttaaagcttgtttggcaacgtctcctcgtcatggtttggaaattgtaattctggggagtgctcctcctggcatttcagtgctgttggcatggcagtttgacattgtgatggcgtattggcctatgagaatcgccagaatatttcactgttggatctgtactatagcctggtgctgaatgtcgtataagggctagttttgcaacaccattttctaagagatctctattttctcaaagaaaattgaactggttttcttttagaaaaatggaaatcacttgacaaactagtcctaagtattgtatttgcatggactgtccatagaatatgcatctgcgtctagctaagtatctgagtttcacaacacaataaaaaagtgtgaatagaatcccgtctaaacaaggctaggctctattgggtcgtattatacaaacacataatcaattaaatacactatttctcatcgagatctgtagaatctactggaatgtaaacaacatcttaggccttgtttgggaacacagtttttccgaactacagttttttaaat

SEQ ID NO: 21600 - DNA, 1796 bp, Zea mays
  Clone ID: LIB3354-040-D3_FLI
cgaaaattccccctctttttcctacttcccgtcccacggctcctacgccccgcgggcccaaaaccctagccggctaatccaatcctgcttcccgcccatggcctccgcggacgctgccaagcccgcgtccccgcccgccgcggatccgcccgtcgacgaccccatggacgccgaccccgcgccccacgcgggggaggaggagcaggccacgccgcagaagcagcagccggagaagaagcggggcggccggaggaagaagggcgaggcggcggagaagacgccgccgtcgtccaagaagtcggcgggccccacggtggagcgcccgtccagggagaggaagacggtcgagaggtacgcggagcttgcgccgcgcgccacacccgccaaaaagtcccccgctattctccagggttctggaacgaagctcaaggacatacccaatgtttcatttaaactatcaaagagaaaggtggatgagaatctccagagcctccatactgtattgtatgggagaaaatcaaataaccattttctgaagagaaacatatctcaattttctgggtttgtttggacagataatcaagaaaaacagaggaacagaataaaagaaaagcttgagaaatttaacaaggagaagttgctagatttttgtgaaatactggacgttattgtaaaagtaactatgaagaaggaagaagtttctgccaagctcttggaatttttggagtctccttgtgttactcgggatgttgttctcactgataaaaagaaggggaagaaacggggaagaaaatctaaagtaggtcgtgaggcaactgctgaaggtgcttctgcagagaagaaaaggaaaagagcccataaacaagcagctgaagatggtaaagagaatgatggtgaggatgatgatcccgctggttctgaggatgcatcaacaggagaggaagctgatggggactctgaggcaaatgatcatgctttgagtgatgatgaacatgatgagcctgctgcaaagaaaaagtcttcagatgttaaacaaaagaaagaaacaggttctgatgcaaaggaaaaggatgcaccaggaaaaaaaggttctacgaaacgtgcatcaaagccttctcaaaacagtaaaaatgagcctgaggtagagataaaaaaggttggcaagagagaaaagagttcaaaagaaactgacgtgtcaccagattcaaataagtcaaacaagaagatttctaaatccaaaaagggtgatggaaaagaaacccaaaacaataaagctgccaggtcatccaataagagtaaaggtaaagtcaaaggtgggtcagtggctgggactgccccaaccactgaacagcttcatgctgttgttagtggcattttgaaggaagttgacttcaacacagcaactttggctgatattctcaggcaattaggtgaggaaggctcagaagatgaagctgaagacgatggtaaggcggataatttaaagagtgaacccgatggaggtgaagagaagtgattctgtggactggatgtggattgaacatcgaagggtcatttttcatggcagtctcctgtttggaggtttggctctgtacaattcgggcaccgcaagaacgagccggtgacctgggtactgcttacatgattgttaaccatttcaacagccatacgcatctagctgagcttgacttggtagtgaatgtagtctagtcgcttgtcatgtaatagctttgcgattgatagtttgctagcttaggtagctagcctgactgtaatatgcagaataattcttgtct

SEQ ID NO: 21601 - DNA, 778 bp, Zea mays
  Clone ID: LIB3354-041-B9_FLI
gaagagagagaagacgtctctctcctctcggcgtccccgttccccaacctctcgtctgctgcctgcctgcctgcaaaaaggagtttgtcatggcgtctaagcgcatcctcaaggagctgaaggacctgcagaaagacccccccacatcatgcagtgcaggtcctgctggtgaggacatgtttcattggcaagcaacaattatgggaccacctgacagtccctatgctggtggtgttttcttagtgaacattcatttcccgccagattaccccttcaaacctccaaaggtttctttcaagacaaaggtcttccatcctaatatcaacagcaatggaagtatatgccttgacattctcaaagagcagtggagccctgctttgacaatttctaaggtcctgctctccatctgctccctgctgaccgaccccaacccggacgaccctcttgtcccggagattgcccacatgtacaagacggaccggccgaagtacgagtcgacggcccgcagctggacgcagaagtacgcgatgggctgacgaacgctttcctgctcgtctgggcgccattgttcccttggatttgttgttggtcgtatgtatccctgatccatctaggatcatcgtattgtattgtagtgtatgtatgtcgtcggcctaccatcgttgccatccaccatagtgaggtggttggacatgcttcgcctatatgcacctgtgcttgccttccttcgggtcggtgctgtttggttaatgttcatcgaagacgttgatttcgttgc

SEQ ID NO: 21602 - DNA, 672 bp, Zea mays
  Clone ID: LIB3354-042-F9_FLI
ctcaccgatagcaagtagcgccgccgacgtttcgagagcagagtatccaagctagccaagcgcgcacctcggtgacctagctagttcaggcgacgatatggcgtcaggtcaggaaagcaggaaggagctggaccgcaaggcccgcgagggcgagaccgtcgtccccggcgggaccggcggcaagagcgtcgaggcccaggagcacctcgccgaagggcgcagccgcggaggccagactcgcagggagcagctggggcagcaggggtacagcgagatggggaagaagggcggtctgagcaccacggacgagtccggcggcgagcgcgccgccagggagggcgtcagcatcgacgagtccaagttcaccaagtagtcctatcgcgtgcgtgcgtacgcagcgttcgtagctgtctgcgtagtgtaccttggccgtagctagtgctactctctactttggagtagctgaatgataataatgtagctagcagcatgcatgtaggcgatcatacatacgtacgtacacaggtacgtgtgtgtgatcatgtatgcttccagaagggtatcctagcttaatcagtcacgtcgtcaagtcgtcaatatggcaggttcgcgtcagggctttgtagtttgatagcctgtttcacgactcctcaataatcaagtagtgtaatg

SEQ ID NO: 21603 - DNA, 996 bp, Zea mays
  Clone ID: LIB3354-043-D9_FLI
ggcagctccagctgagagccttgagacggagggggatctccggatagctatgggtgacgcgaagccttcggtgctaatcacgatgcccagccgcgaccgcgaccgggaccggctcgtgcctaccgctgccgttgccacccatgagtccccgtctgccctcactgtcggcgactccgacgacgacaagagcaagccctcctctgcttccgccgctgctgccgccgcgcagaccggccgtgaggcgttccataagtgtcatcctcttcccaattgcagttacattctatgtgacatggtggttctttcgctttgtggatgggtttttctccccaatatatgctcacctgggaatcaaaatatttgggcttggttttgtaacatcgatatctttcatttttgtggttggtttattcatgtcatcttggctgggagcatctatccttggtctcggagagtggtttataaaacgaatgccatttgttcgccatatttacgatgcatctaagcaaatcagtgctgccatttcacctgatcaaaacaagcatgcattcaaagaagtggtcatcattaggcacccaagaattggcgaatatgcatttggatttatcacttcggaagttctacttcagggttattctagtgaagaacagatgtactgtgtttatgttccgacgaaccatctctatattggtgacatatttctggtcagctcaagcgacgtgattagaccaaatatgtctgttcgcgaaggcattgaaattgttgtctctgtgggcacatcgatgcctcaagtattatcgattctggaaactgagccaaaccagttgaacaggatcagatccacccgaagctgagatgacttcacattttgtaatttcgtgttacaaagtccttgttgtacaagagtaggttctgacagattgtacagttctcctgggtagaaagcaaaatctgtttgtgaacacatctcacctgaacgcgattgcttgtatggcc

SEQ ID NO: 21604 - DNA, 2367 bp, Zea mays
  Clone ID: LIB3354-043-E10_FLI
gccgccgccacacctccaccatggctgcgaccacgccggccaccgacccgccggatgccttgcttgcagtaacagctgatgctcccactcctgctcgtcccaccccggcggagctggtagcccgcgccgtcgcccccgtcaagcccgccttcctctgcccgcctcccgtccgtgaggcacccaaggaggagggtaaagccgccggcggcggggccgtcgtaaaggtggagaagaagtccaagcgccagctcaagcgcgagcggcagcaggaacaaaaatctacttctcacctttgtatcgaagtagggaaaagtggaaatgtggactcatgcaaatatggtacttcttgtcgtttcagccatgacataaatgcttatttgtctcagaaaccagctgaccttgaaggcacatgcccatttactgcactgggacatttgtgtccatatggactaacttgtcgattccttagtacacataaggataaccttgctcctcaaaatcatccagagggaaattgtgagagaaatcctttgagcaaagaaattcaaaagctcttatggaagagcaaatataaatttcccaaggccagtgcccagatcaaacttcttggtcttaaggatggaaacaagaataaagcagaagcagtaaatgatgataatccagatgaaacatgtaacctaaatggtgatgacaaaacacttctttctagcattcctgaaaatgttgaacctgatcccacgttgtgcaaagaaatagataattcagggggagaacctttagttgttgactcagttgaatctgtggagccaagggcatcaaagaaatcaaaggttgaagttgatgaaactcgggataatgaaatcaaaggtcctaccactggtattcatgacaatgaggctgaatctgaagttaattcaatcagtggagtaaaagtttcctcaaataaccaaagttcctgcaaagttgatctgatcacgatacctcatttacgtgaaaagaaaattatagattttcgagagaagctgtaccttgctcccttaaccactgttggtaatcttccttttcggaggctctgtaaaaccttgggagctgatgttacttgtggagaaatggctatgtgcacaaatcttttgcaggggcaagcttcagagtgggctttgctgcgacggcatccatcagaggatttgtttggggtgcaaatttgtggaccgtatccagatactgtagcacgaacagttgaacttgtggataacgaatgttcagttgatttcatagacataaatatgggctgcccaattgatatagttgtcaacaagggtgctggatcatcattgctcacaaagcctatgaggattaggagtattgttcaagcggcatcaactgttactgaaaaaccgttaactgttaaggtaaggacagctttctttgagggcaggaatcgtgctgattctttagtttcagatatctacaactggggtgcttcagctataacaatacatggtcgatcacggcaacaacgctacagcaaacttgctgattgggactatatctaccagtgtgcacagaaggctcctgactatttgcatgttattggaaatggcgatgtattctcctttactgactggaacaagcatgtttcagactgctccaaaatttccacttgcatgattgctagaggtgcacttatcaagccttggttatttactgagataaaagaacaaaggcactgggatatcacatctggcgagagattaaatattcttaaagattttgtgcgttttggtctggaacattggggctccgatttcaaaggagttgagacaacacgccatttcctcctagaatggcttagttacacctgccgctacattccggtgggtctgctggatgtgattccacaacgattgaactggaggcctccaagctactatgggcgtgatgacctcgaaaccctgatggtctcagattcagcagctgactggataaggatctcagagatgttgcttggcaaagttccagaagggtttaccttcgcaccgaagcacaagtccaatgcctatgaccgagcagaaaacggttaaacctttgttccgttgttcgtcagggcaggaactcagcaacaccagtggtgggttctcttgaggatcagagacaactactgaggtccatgctgcttgaacccatcatgttgtgtaacatgattttatatttagccaaatggtgattgtaccaatagtttaagtatagactatagagcacctgataattgaattgctcaattctcctctattcatgctagctctagcatcttacttatccatatacctatatttaaacttactctatgaacaatgcagtttacagtgc

SEQ ID NO: 21605 - DNA, 1352 bp, Zea mays
  Clone ID: LIB3354-043-E8_FLI
ctcgtggtggcgtgcgtcctcgtcgcgtgctcctcctcctgcggctgccctgtagcggcggcggcggcgatgacgacagtggacggcatcacggccatctacagcttcggggactcgataacggacacgggcaacctcgtccgcgaaggcgccaccggcatgctgcgctacatcggcagtcgtccctacggcatcgacttgctgcgcggcggccggaccccgaccggccgctgctctaatggatacctcatgatcgatttcctcgcgaagtaccttggccttcccctcctcaacccgtacctcgacaaggcggcggatttcacgcacggcgtcaacttcgcggtcgccggagccaccgccctcggcgcgacggcgctcgccgagagaggggtcaccatgccccacaccaacagctccctcgacgtccagctccagtggttcagggacttcatggcctccgccaccacaaactctagccaagaggtccgaaggaagctagcgagctcactggcgatgctggagatcggtgggaacgacttcaactacgccttcctccagctccagacccggccaacgggcgtcggatacggcagcggcaacgtcacccgtatagtggaaatcctagaacaggtcggggcgctcgtgcctcaagtcgtgcaatccattacaaacgcagccaaggcgttgctggagatgggcgcggtccgcgtggtcgtcgccggcaacctcccgatcgggtgctcgccggcctacctctcgggggcgaacgtcacggagctggccgcgtacgacgccgacggctgcctggccgtcctcaacggcttcgcggagctgtacaacgcggcgctgcgggccgccgtcgcgggcctgaagcgggcgcacccgcgcgccgtcgtcgcgtacgcggactacttcgccgcgtacgccagggtgctccgcgaggcgcgcgcgcgcgggttcgacccggccaggacgcggacggcgtgctgcggggcacgggaagccgcggcgtacggcttccgactcggcaggttctgcggggcgccccggacggccgtgtgcgcggaccgggcccggtacgtgagctgggatggcgtgcacccgacgcagcatgcgtacgaggccatggccgagctgctctaccgcggggggctcgcgtgcccgccgccgatcaactggccagggcagacgatgccgggggcgaacgcaccgttgaattgataccatatgcatgctctctctctctctctctctctttgatagtgtatccgtgtttgttgcaaatgttatacctaccggtgtcacgtttctcatcactaatttcggttttcaagggctttggttaaggtgtt

SEQ ID NO: 21606 - DNA, 153 bp, Zea mays
  Clone ID: LIB3354-043-F3_FLI
tggagagagacagagagaatacaaatgacagaactgttgtcctttattgtagtgacaggacagtttatatacaagtgtctgcagtggttcctaaggggtgtgtcccttggaataactgtcagaggttgatcacatgttatatacatattttgt

SEQ ID NO: 21607 - DNA, 647 bp, Zea mays
  Clone ID: LIB3354-044-F10_FLI
gtacaaatcaagcatgaagataactctagggtgatagctgcacgcagggtttcaaattggacaggaaaacacgagcaagccatcctagatgcaacccatgtcctaagttgctcatcaattccagttatccacctcctagttgtctaactaatcagacgaccagaaaactaatcagcctaatcgagttgtagcccctagtcgagtccaggataccaactaggacgactaatcacgattaactggatgacttgataacactgctaattggagtcttaggccctgctgtggctatgatactgtagtgcaaaaattgggagttatgttgcatacaatcttgtttgttggccggagattttcaacaactgatgtgtcagggtctaaggaggcccacagaggggctgcggcagcagcaaccatgggccctccaaggggattatataaggatagttagagataatattagaagattagttgagattatttaggagattagttgagattatctaggaaggttattagttagtagtttgttgagagtttttaggagagttttaaggagataaggatctctagctagataggggcggccagccggtctatttatgtaatcaatggatgagaaataaagcagacaagaattagaatgg

SEQ ID NO: 21608 - DNA, 1121 bp, Zea mays
  Clone ID: LIB3354-045-E7_FLI
ccaaaagtagaaaagggcaagcgacgagcacagcacagcacagcacaagcacgccttccgttttgggaaggcgaggagaggggaaccccggcccagggagagttgtggggaggggatcggcggcggaggagatggaggagcgggagaagctcgtgtgcctggccaagcttgccgagcaggcggagcggtacgacgatatggtggaattcatgaagaatcttgctaggatggacgtggatatgagtgctgaagaaaggcatttgttctcagttggtttcaagaacactattggagcaaagagggcatcatggagaatcatttgttcacatgagcaaaaggtcgcagctgatcgtcagactggtgtgatgatagatgcctataagaagaaagtagaagaggaactaaggaaggaaaggtgactactaccgttacttggctgaatttagcactggaactgaaaagaaagctgcctctgatcagtcacttatggcctatcagcatgccatggttgtcgcctccagtgagctctcacctgctcaccaaatccggcttggccttgccctcaatttgtcggtcttcttttatgagataatgaactctcatgagagagcttgccaagtggcaaaacaagcatttgatgaggctcttactgagataaattctggtgagggaggttacaaggatagcacacttatgatgcagcttctgaaggacaacttagcattgtggacatcagaactaactggaggtgaagcatccaagggtaacgacgatgtcgacatggagggttgatacattctccatgttttaaggaaacacagaaagcacgcaaaaatatccaggctgtgatgctagcgaacctgggtcctcaagttttttctgcatcggaactcagaggagccttgtgtatttttctgaagtttctgtccgtctcgggttttttttttgaggtctgtttgttcctctcttttggccatcgtttggtcctggagtcagtcactcactaccaagtgtttcagaggtctgaactggtgagcatctagatctgttgttgctttttttttcttcttctgtgcttcagaggcatctttgtacaccgatggaaaactgtttctcttatc

SEQ ID NO: 21609 - DNA, 857 bp, Zea mays
  Clone ID: LIB3354-046-B3_FLI
gctcgcctcgggtcaaaccctaagcagggagttgatttatccgctgcagccatgagtaagttgcagtctgagtctgtcaaggatgccatctcccagattgttggggatgccaaggagaagaataggaagttcactgagactgtggaacttcagattggtctgaagaattatgatccacagaaggacaagcgtttcagtggctctgttaagttgccccatatccctcgtcccaagatgaaggtgtgcatgcttggtgatgcccagcatgttgaggaggccgagaagatgggacttgactacatggatgttgaggctctcaagaaaatgaacaagaacaagaagcttgttaagaggcttgccaagaagtaccatgctttcttggcatcagaggccatcatcaagcagattccccgtctccttggtcctggtctcaacaaggcaggcaagttcccgaccctggttactcaccaggaatccctcgagtccaaggtgaacgagactaaggcaacagtcaagttccagctcaagaaggtcctttgcatgggtgtcgccgtcggcaacttggcgatggaggagaagcagatccagcagaacatccagatgagcgtcaacttccttgtttcccttctgaagaagaactggcagaatgtgagatgcctgtacgtcaagagcaccatggggaagccatacagggtgttctaagtctgctcttttgtgaagtctgctaggttctggcaccgaggttttattgaattaaactcttgttaagagtatgtttttggacgatcctatatttcgtcctggcgctactatgtttcagaatggtggtactactataagtattgcttgaaaggatc

SEQ ID NO: 21610 - DNA, 1111 bp, Zea mays
  Clone ID: LIB3354-046-G6_FLI
cggcgggccgtatggtgatcacgacggcgggtcgtcctcatccggcccagccggagatgggcacggtggcagcggcggtaacggggagatggtagcccgccggccccgtgggcgcccagcgggctcgaagaataagccgaagcccccggtgatcatcacgcgggagagcgccaacacgctgcgcgcccacatcctggaggtggcgagcggctgcgacgtgttcgagagtgtctccacgtacgcgcgccggcggcagcgcggcgtctgcgtgctgagcggcagcggcgaggtcaccaacgtgacgctgcggcagccgtcggcgcccacgggcgccgttgtgacgctgcacgggaggttcgagatcctgtcgctgtcgggttccttccttccgccgccggctccccccggcgccaccagcctcaccatcttcctcgcgggggggcaggggcaggtggtcggtgggaacgtcgtgggtgcgctctacgccgccggccccgtcatcgtcatcgccgcgtccttcgccaacgtcgcctacgagcgcctccccctggaggaggaagaggcggctcagcaggcagcgccacccggcctccagatgcagccacccagcagtggtgtcgacggcgctggaggcatgggcggtgggccgttccctcccgacccgtcggctgccgggctgccgttcttcaacctgccgctcaacaacatgactggtggcggatcacagatcccgccgggcgccgacggccatggttgggccggtgcacggccaccattctgacaagtccatgatgcgccggtggtgtaattcatcaggtttgggagaacaggaaggtgtcaagaagaaagcataaaaaaagcaatgaacggcacaagggttaagggcagcttgcaaaaggttagcgcacgtatgcttgcaattgcaaggattatcttttctacttctatctcgatctctgtacaacttccgtagtgtttcgtttgctcggtctgtctgatttcgtgcttttagtttcttcttcctcctttttctttttcctcctctcgcgtgtgcctcttgaaacttgatatgtgttgtaaccttgtcttaatttttaatctggtgtttaat

SEQ ID NO: 21611 - DNA, 1007 bp, Zea mays
  Clone ID: LIB3354-046-G9_FLI
cttgcgtcctgatcccaccaaccgcagaggacagaggaccatggagagcggcacggagcggcggcggcaccacttcgtgctggtgcacggcacctgccacggcgcgtggtgctggtacaaggtggccaccctcctgtcatccgcgggccaccgcgtgacggcgctggacatggccgcgtgcggcgccagccccgggcgcgccgaggaggtgccgtcctttgaggagtacagccgcccgctcctggccacggtggccggcctggcgcccgaggagaaggtggtcctcgtcggccacagcttcggcggggtcagcctcgcgctggccatggagcagtacccggacagggtcgccgtcgccgtcttcgtcgcgaccggcatgccctccgctgggaagccgatggcgttcgtcttcgagcagtttttgcaagaagagtacccagcggaccgctacatggactgcgaattcgaaaccagcggcgacccccagcgtcccgtggagacatttcggttcgggccacagtacctgaagcagagactgtaccagctcagccccccagaggatttgaccctggcaatggcgatggtgaggccgtcacagcggttccgagacgacgcgacgatgaaggggggcgtcctgacggcggagcggtacggcggcgtgaggcgggtgtgcgtcgtcgccgaggacgacgcgtcagtgccggcaggcttccagcggcggatggcgtcgtggaaccccggcacggaggtgagggggttgcagggagccgatcatatgtccatgctctcgaaaccaggggagctgtcagaacttctcatggaggttgccaacaagtacagctgaaacttgtatcatgtaaatggctatcagcaaaatggttgttcaggtacgcttgtttcagatgaacaaatggagacggaagtttgaagtaacacgatgaaataagactagattttgtatccaatgcagttgtaactttctaaggtataaggctatttctatcagc

SEQ ID NO: 21612 - DNA, 839 bp, Zea mays
  Clone ID: LIB3354-047-B2_FLI
gctctgggcagcgtgcgcacgtggggtacctagctcgctctgctagcctaccatggctgatcaccaccggggcgcgacgggaggtggcgggggctacggcgacctccagcgcgggggcggcatgcacggcgaggcgcagcagcagcagaagcagggcgccatgatgacggcgctcaaggccgcgacggccgcgaccttcggcgggtcgatgctggtgctgtccgggctgatcctggccggcaccgtgatcgcgctcacggtggccacccccgtgctggtgatcttcagcccggtgctggtgccggccgccatcgcgctggcgctcatggcggccgggttcgtcacctccggcggcctcggcgtcgctgcgctgtccgtgttctcctggatgtacaagtacctgacgggcaagcacccgccgggcgccgaccagctggaccacgccaaggcgaggctggcgtccaaggcccgcgacatcaaggatgcagcacagcaccgcatcgaccaggcgcaggggtcttgagagaagaaccacactcgagcggaccgcgcgcgcgtcctccttgaaccactgccggcgcggcggcatatggcccttaaaggcggtggctgctgctacgtacgctgccgtagagtctcggtcgccgcgatagctctagctagtcgtttatgtgttgtgctttgtgtgtgcatgcatgtgtctgggggcatgcagtgcagtgcagtactatatgctgtatgcgtctctctttgatcggagaggcggatgtacagcatgctcgatatgtctagtttggatgtcatgtttatgatgaggaataaaatgcagtgttcaggtg

SEQ ID NO: 21613 - DNA, 1022 bp, Zea mays
  Clone ID: LIB3354-047-F3_FLI
agaaggcccaaccagcacgtcacactgctgcgaaggacaccaggcccgccgaaaattgtgtgaacgcccctttcttctaccccaagacgaactcggtgaactctttccggttcgttcccctacgcccgtttctctctcgtcgcgcaacatcagagcacaagcgaggaacccagtccagtcccgggaatggagtgcgtattgggcgtggttggccgcgacttcgcgctggtggcggccgacacctccgccgtgcagagtattctcgtccacaagaccgacgaggacaaggtgatggtgctcgactcgcaaaagctgatgggcgcttcaggggagcctggtgatcgggtgcaatttacggagttcatacagaagaacctccacctgtaccagttccggaacaccatcccgctctcaaccgccgccgccgccaacttcacacgcggcgaactcgccacagcccttcgcaagaatccatatatggtcaatattattcttggtggttatgataaggatgttggtgcttccctctactacatcgactacattgcaaccttgcacaaaattgacaaaggtgcttttgggtacggatcatacttctgtttgtctcttatggacaagttgtaccacccggacatgactgttgaggaagcagtagatcttgttgacaagtgcatcaaggagattcggctgcgattggttgtcgcgcctcagaactttgttatcaagattgttgacaaggacggggcgagggagtacgccaggcgtgaactcgtcggtgacaatgcacctgctgaagctgcaaccgcagttgttgctgcctgaggcatgaactcgtttgaggttggaatgtgttagttgtttctcagcgatgctacttatgcgatcacaggatactggtggggggcccacaactgttttatcaattttagcccagtcgtgtaattctgtttctgcactattcatgtctgctgagtacaagtagtgtttcacgcttgaacaaatacaatactgttgctgtgcac

SEQ ID NO: 21614 - DNA, 1431 bp, Zea mays
  Clone ID: LIB3354-047-H7_FLI
ccctcccccactcaagcagccaaaccctagattgggcaagatgctcggcggcctgtacggcgacctcccgccgccgtcgtcggccggcgatgaagacaaggcctccacggcttccgtttggtccagcgccaccaagatggcgcctcccaccctccgcaagccgtccaccaccttcgccccacccccatctattctccggaaccagcacctgcgcccgcccaaagccacctccatccccgctccccccgtcgttgccgccgaacccgccccggccacctccttccagcccgcgttcgtcgctgtccagtccaccgtgctggaggagtacgaccctgccaggcccaacgactacgaggactaccggaaggacaagctccggcgcgccaaggaggctgagctgaacaaggagcttgagaggcggcgccgcgaggagcaagatcgggagagggaacgcgagcagcgggagagggaggcccgcgagcgcgaggagaaggactaccaatccagggcctcctccctcaacatatccggcgaggaggcgtggaagaggagggcagcgatgagcggtagcggttctgctgctagaaccccatcgtccccacctcacggtgatggcttcgccattgggagctcatcttctgctgggttgggtgtgggtgccggcggacagatgactgctgcccagaggatgatggccaagatgggatggaaggaaggtcaggggcttggcaagcaagagcagggcatcaccgcgccactagtggccaagaagaccgataggaggggaggagttattgttgacgagagcagttctaggcccccagaaaagaagccgagatctgtcaactttgatgggcaaccaacacgagttttgctgctccgcaacatggttggtcctggtgaggttgacgatgagctggaagatgaggtggcatcggagtgtgccaagtattggacggtttctcgggtgctgatatttgagatcacacaggcagacttcccagctgatgaggctgtaaggatattcatacagtttgagcgggcggaagaagcaacaaaggcaatgattgatctgcaagggcggttctttggcgggcgtgtggtgcaggcaaccttctttgacgaggaaaggtttgggaggaacgaactggctccgatgccaggggaagtgccagggtttttcgactaaagaaagaagttttcatgtggtatcagataagtggtgggttgtgaacttgtgattctttcttttaatcgagatgaactagaacatacagtcaggcaatttacttgctttgtagtgctagtgcagtgtactggaaatattatggatataaattatggtttttgagctgtgcctcctgctgctgaactactaccttgtatgtacatgagcattttgaccgctttagcatgctttgtcgtgcagtt

SEQ ID NO: 21615 - DNA, 2067 bp, Zea mays
  Clone ID: LIB3354-048-D6_FLI
cacgcgccctgcaattgttgtgttgttcatcacctctccgaagaagcgtcacagagcaccgcccggaggttccccttcccgtcgccgtcgccgtcgcttggccaagtaagatggctgaacaattctataccgtggcatcggatagtgaaaccactggtgaagacaaatcacagccttcattccctgatgttgctgttggcattgacattgggacttccaaatgcagtgttgctatttggaatggccaccaagttgagctcttaaagaatacccgtaatcagaaagggatgaggtcatatgtcatgttcaaagatgatactctttcagcaggagttactggaggtgcagccaaggaaaatgcacacgaggaaagagacatcttgtcaggaagtgccatattcaacatgaaacgcctgataggaagaatggacactgatgaagtggttcaagctagtaagaccctcccatttcttgtgcagacattgggtatcggtgtgagactattcattgcggccctggtgaacaacatgtggcgatctacaactccagaggaggtccttgccatctttctacttgaattgaaggccttggtggagatgcaccttaagcatcccgttaggaatgctgtgcttacaataccagttgcgttcagtcggtttcaacagaccaggattgagagagcctgtgcaatggctgggctgcatgtgttgaggttgatgccggaaccaactgctgtggcgcttctgtacgctcagcagcagcagcagcttgtgcatgacaatatgggaagcggcatcgagaaaattgctctgatatttaacatgggtgctgggtactgtgatgtggccgtggctgccacagctggaggtgtttctcagataagagcattatcaggatgcacagctggtggggaggatatacttcagaacataatgcgccatgttcttcccaattttgacggtatatatgctggccagacaatggatagaatcaagtcgatgagcttactgcgaattgctactcaagatgcaattcacaggctcgttagtcaagaatccgtggagatcaatatagatttggggaatggccacatggtgtccaaagttctagaccattcagagtttgaacaagtcaaccgggcaattttcgacaagtgcgaaaagatcatcaaccagtgcttggctgatgcgaagttggtaccagaggacatcaatgatgtcatactggtcggaggttgttcgaagatccccagaatcagaagccttgtcctgggtttgtgcaagaaggaggtctcctacaagaacatagatgctctagaagctgctgtttcaggtgctgcgctggaaggagccatcgcttcgggagtaaatgatccttcggggagcttggatcttctcacgatccaggcaactcccatgaacctgggaatccgtgccgacggtgatagcttcgctgcgatcatccctaggaacacgacggttccagcaaggagggacatgctgttcacaacgacacacgacaagcagaccgaagccctaattgctgtgtatgaaggagaaggggaacgtgctgaagataaccatctgttagggtacttcaagatcactggaattccggcagcccctaagggagcagttgatatcagtgtatgcatggacatcgatgctgccaatgtcctcagggtgttcgcaggggtcgtgaagcctcaaggcccagccattccaccgttcatcgaggtgaggatgccaacgctggacgatggccatggctggtgtgggcaagctctagcaaagatgtatgggaagactctcgaccttgctgttcttccgaagaagctgcagccatgatatgtgccttccgtggcccgtaaagtagctggtgcgttgtgcgaatgtaggctgctcagtgttcagtattcactgtgtcactgtcccctgtggtgtggccactgtttatgtgctgttggtgttgggcagtctacagaactgaactaccagtttcatccttgtaggcgtgtacaataatgtcccgtgcatgtgaaatgaatgttgcggatgtttacttcat

SEQ ID NO: 21616 - DNA, 1165 bp, Zea mays
  Clone ID: LIB3354-048-E2_FLI
tgattttctcgccgcgcgccgtgttcaatacggctacgaaaatagtagggctggcaaaccggtggccggccggcagcgcggcggccgaggagatggggagcctcgacggcggccactcgctgcagcagggtcgccaccacggctacgcccactcccagtctcacgtcggcgcgggtcccgacagcagcaacaacaacaacaacgacgaggacgacgcgtcgcccccgccgccttccggggcgggaggaggtcctcgccggccgcgcgggaggcccccggggtccaagaacaagccgaagccgcccgtggtggtgacgcgggagagccccaacgcgatgcgctcccacgtgctggagatcgccagcggcgccgacatcgtcgacgccatcgcgggcttctcccgccgccgccagcgcggagtctccgtcctcagcggcacgggcgcggtcaccaacgtcacgctgcgggagcccgcgggggccggcggggcagcggccgtcgcgctgcgcggccggttcgagatactgtccatgtccggggctttcctcccggcgccggcgccgccgggggccacggggctcaccgtgtacctggcgggggggcaggggcaggtggtgggcgggagcgtcatgggggagctcatcgcgtcgggccccgtcatggtgatcgccgcaacgttcggcaacgccacctacgagaggctgccgctggaccaggcagacgccgaggagggcgccgtgctgtccggctcgtccgagggcgccaccgcgcagcagctggagcagcagcagagcagcgggggtcccgtcgtgccgccgtccatgtacgccgtcccgcagacgccgccgcacccgcacgacatgttcggccagtgggggcacgcggctgtgacgcgcccaccgccgacgtcgttctagctagcgctagatgcaccagctgcgacctgcaccggctgcccgcccgccgtataccctctccacctttctagttagatttccacttcttcactagctagtactagctactactctagtttgttacgtagctctaccatggcatgcatgtgtgatcgttttcccatttcttctagctctcttccatctggagcgtgtggatcaatgtacaattcctatttgcgaataccggaatccatcaatgtttactt

SEQ ID NO: 21617 - DNA, 864 bp, Zea mays
  Clone ID: LIB3354-049-B8_FLI
cagaagcggcggcggcggagcaaaagcaggcgaaggcgagggtgcgagggaaggtgcaccagccatggtgcacgtcaacttctaccgcaactatggtaagacgttcaagaaaccaaggcgtccttatgagaaggagcgtcttgatgctgaactgaagctggtcggtgagtatgggctgaggtgcaagcgtgagctttggagggtccagtatgcactgagcaggatccgtaatgctgcaaggcacttgctcacccttgacgagaagaacccccgtcgtatctttgagggtgaggcgcttcttcgccgcatgaaccgctatgggctgcttgctgagggtcagaacaagcttgattatgttcttgccctcaccgctgagaacttcctcgcaaggcggcttcaaacacttgtcttcaaggctggcatggccaagtccattcaccatgctcgtgtcttgatcaagcagcgtcacatcagggttggcaggcaaattgtcaacgtcccatcattcatggtgagggtggagtctgagaagcacattgacttttcactgtcaagcccattcggtggaggccccgcaggaagggtgaagagaaagaatcagaagaaggcaagcggtggcggcgatgctggcgatgaggatgaggagtgaggatggacaagtagcgttacccaatataataatattatctagttttcttgaacttgttcgaatgatgagtgcttagctgtgtgatctgacgcagagttccctgtgctgactctgtgtcatggatggtccattttatcttgtggtattatcagcctttacataactgctatgtttggatatgttcaattctgttgcaattttatgtggttgttttt

SEQ ID NO: 21618 - DNA, 1070 bp, Zea mays
  Clone ID: LIB3354-049-C2_FLI
tcctcctcctcttgttgcctccactgactctagccgaccgcccccgcccaccgacatcggaagccctagctgctgcaggaactgccctgccggcccgccgctcctccgctcgaagcgtctccggtttcttggatgcaccggctgctccgatggctgcccttccgcccgccgcagaggaccccgacgccgtggagatccgtgaagtttgggcgagcaacctggaggaggagttcgcagtgatccgcgccgtcgtcgacgtgtacccgtacgtggccatggacacggagtttcccggcttcgtggtgacgccgagcgccgagtaccggttcacctgcgaccgcaactacgccgccctcgagggcaacgtcaacgtgctcaagctcatccagcttggcctcaccctctccaacggggcaggcgcgctcccgccgtgcggcacgggtgggaggcgctgcatctggcagtttaacttccggggcttcgacccgcacaccgacccttctagcagcgactccatcgatctgctccgccgcagcggcatcgacttcgacctctttgcggctgagggggtcgattccacccgcttcgccgagctgatgatgtcgtccggagtcgtgctgaacgacgatgtccagtgggtgaccttccacagtggccacgacttcggctacctcctcaagctgctcaccggacgggaaatgcccaacaccttggatgagttcctgaaactcaccaagaccttctttccggtgatgtacgacatcaagcatctcatgaagttctgtggcggtggcctatatggcgggctgagcaagcttggggagctgctcaagattgagcgtgttgggatcagccaccaggctggatctgattcgctgctgaccctgcagtgcttcatgaagctcaagcagttgtatttaaaggagtctgttaagttgtatgatggtgtgttgtttgggcttattcctggggaagtggagatcaaacctgttgctccacccattgaatgagttatggtagttcaataacaagattctgaatgataaaaatggagaacagagcctaccatc

SEQ ID NO: 21619 - DNA, 502 bp, Zea mays
  Clone ID: LIB3354-049-F3_FLI
gacaacactcaccgatagcaagtagcgccgccgacgtttcgagagcagagtatccaagctagccaagcgcgcacctcggtgacctagctagttcaggcgacgatatggcgtcaggtcaggaaagcaggaaggagctggaccgcaaggcccgcgagggcgagaccgtcgtccccggcgggaccggcggcaagagcgtcgaggcccaggagcacctcgccgaagggcgcagccgcggaggccagactcgcagggagcagctggggcagcaggggtacagcgagatggggaagaagggcggtctgagcaccacggacgagtccggcggcgagcgcgccgccagggagggcgtcagcatcgacgagtccaagttcaccaagtagtcctatcgcgtgcgtgcgtacgcagcgttcgtagctgtctgcgtagtgtaccttggccgtagctagtgctactctctactttggagtagctgaatgataataatgtagctagcagcatgcat

SEQ ID NO: 21620 - DNA, 777 bp, Zea mays
  Clone ID: LIB3354-049-H5_FLI
gaggaccgcctccgcgagtacttcggccgcttcggtgaggtcactgaggccgtcatcatgcgggaccgcagcacgggccgcgctcgagggttcggtttcgtggtcttcgctgacgccacggtcgccgagcgcgtcaccatcgaaaaacacatgatcgacggccgaatggcaatgcatatgaagtgaacaacccagatacatatgggaacagctctatttatggtggcacatcctggaggttcccttcatctgaagttgacgtgccttctttcagtcatgatcttggaaatgttgatccgaatatgaaatcagacatatcagcaaattacatgggaaattattctgttagcaacaatcagccaagcagaggtatcacttcatagtgggagtattactacacattcatatatgacttgggatagatgaagcacccattcagtcaggcagccaggtgcgtgcatggcaactgtgaatgggtgatatgtcaggttagttttgtctagctgaccagcggtgtggtttacaacaccaacatgctagaggaggaggaagcggatacagaaacattttctgaggggcttcttttctttgagtcatgtttttagttttgattcctgcgcgtggctagctccttttggtttttgaatgagatgtgtagtggtgattattgcggcgcatattttagagatcgtggttcttccaacataagctggaaaaagaagtctgtatacggatgaacatgtataccaaccaaagggatgctgtattatcttgccc

SEQ ID NO: 21621 - DNA, 1130 bp, Zea mays
  Clone ID: LIB3354-050-A1_FLI
ctaaaccccagtttagggtttctcgcgcggcgctccgctccccgccctcctccgctccgcgcccgatcgcctcttcatctacctcctcaaagcttcgactgttccacacccccacccatatcaacccctttcccctttagctccttcccaccgatacgcccgccgcgtgaagcattcgttagccgagccgccgcaaccatgtcgtcgttctggggtgtggaagtgaagcccgggaagccctacactctcacccatggcgacttcgccggccgcctgcgcctcacccaggcgacgctaggggttgatgtcggcaagggggagaaggctaccggcgtgaagaggtgtgtgctacagtgcagtgccgagaacagagatcccgtttttctttgcgtcctcatgccggagcagtcggagacatgccacctggagctagaatttgaggaggaagtcaccttctcagtgattgggccaaggagcatccacctcgctggatactatatgactgatgcgtgtggggaagataggagtgacggtgattctgggagcgattctcttcaaagttcagatgaggatggtttcttggaggaggacgatgatggtaacatggttatgggatattcagacagtgaagatgatgattcagagtctgatgatgaagagatggcatacaatcagggtaggggcaaaagttcagttgttattgaggaaattgaagaggatgatgacaaggctgctgttgctgaagtgcagaagggattgaagaagcaaatccgtgaaaatggtgatgagtctcaactccagcttgctgcaagaaatccacctactgaatccttggaaagtgaagatgaagatggttttcctgtatcattttctgaatcaaagaagagttctgagattgtttcaaacaagaatgggggaaaagacaaggagactagcaacaaagacctgaaaagaaaaagtggagccattagcgaccgtggtgattcttcaggggggaaagctgagattgatggggcatcaaagaaaaagaaaaagggcaaggacaaaagcactgttatggacacaggaaaagtaaacaacgaagaaaaggaggttaagctacacgattctccagctgatcctgtcggtat

SEQ ID NO: 21622 - DNA, 1295 bp, Zea mays
  Clone ID: LIB3354-050-B7_FLI
ctgtgcgagccacaccgcccgcacaccccaccggccggccacataggccccgacggcgactcgaagatgacggccgggcagcttctgcgcaccgagccatcagcccagccccagcgggtgcgccacagcaccccgccggcggcactccaagcagacatcgtgccgtcgtacccgccgcccgagtcggacggtgacgagtcgtgggtctggtcccagatcaaggcggaggcgcggcgcgacgcggacgcggagccggcgctggcctccttcctctacgcgacggtgctgtcgcacgcgtccctggaccggtccctggccttccacctggccaacaagctgtgctcctccacgctgctgtcgacgctcctctacgacctcttcgtggcgtcgctcgcggagcacccgtccgtccgcgcggcggcggtggccgacctgatcgccgcgcggtcgcgggacccggcctgcgcgggcttcgcgcactgcctcctcaactacaaggggttcctggccgtgcaggcgcaccgcgtggcgcacgtgctgtgggcgcagggccggcgcgcgctggcgctggcgctccagtcccgcgtcgccgaggtcttcgccgtggacatccacccggccgccaccgtcggcaggggcatcctgctcgaccacgccacgggcgtcgtcgtcggggagacggccgtcgtgggcgacaacgtctccatactccaccacgtgacgctgggcggcaccggcaaggcggtgggcgaccggcaccccaagatcggggacggcgtgctcatcggcgccggcgcgaccgtcctcggaaacgtcaggatcggcgccggcgccaaggtcggcgccgggtccgtcgtgctcatcgacgtgccgcccaggagcaccgccgtggggaaccccgccaggctgatcggcgggaagaagggcgaggaggtgatgccgggggagtccatggaccacacctccttcatacagcagtggtcggactacatcatttgagcccgcaagctagaaaaaaaaagagctcgtcttgctactgttgttatactgctgttgcgttttctgtgtatgtgcgtggatgtgttagctgtatgctcttgttccagtgaggtgaaccgtggacatgctggtgtggtgtccagaaagatatgctcaaagttcgctctgtaattttcgaagcagatgaactgtgttactactttttactctagtaaaaactgtttctttggctcatttcccacccacccaaagtacgaccagtatgtatggaaaaagataatttgtgtttccagatc

SEQ ID NO: 21623 - DNA, 853 bp, Zea mays
  Clone ID: LIB3354-050-B9_FLI
gcgggggcggcaagcaaccacgggcggagctcggagcgtcctcctcctcccgtctataaattcccctctttttcttcctccatatataggggccatcagatccaagaagagggaagagcaccaaggaccttcggcgcccgttcaggatccacatcttcccgagcgagttcttggttggcctcttcctcttcggaccacctccaaggctcttggtgtagcttgccactctcaccaatcaagttttcatgtctgatctcgacattcagatcccaactgccttcgatcccttcgctgaggccaatgctggggactctggtgcagcagcagggtcaaaggactacgttcacgtgcgcatccagcagcgtaatggtcgcaagagcctgaccaccgtccagggattgaagaaggagttcagctacagcaagatcctcaaagatctcaagaaagagttctgctgcaatggtacagtggtccaggacccagaacttggacaggtcattcagctccagggtgatcagaggaagaacgtctcgaatttcctcgtccaggccggcattgtgaagaaggagcacatcaagattcatggtttctgagcaaccgccgggtccatatcaaaccaaccctgcatgcagggcatcttattatatataatatctgaggtggagcatatctatctggctgtgtactgcaagcaggcctagtacgccgcctgcgcgttcctcctattacacatataggcccctccctgcgtgtatgcttgttaccgtcgtgtcgaaccttgtactacgaggctccatcgaacatcgatggcttgcttctttatcagaacatgtttgaataaacgctatttggt

SEQ ID NO: 21624 - DNA, 1237 bp, Zea mays
  Clone ID: LIB3354-051-A5_FLI
gctggttgctgccatgacaagtccacctagggtgagcatggagatcactgatgaggtggtcaagagcatgaagatagggttggtctttcaaggctataatggcagaatttgttctatggactttcacagcaaggctaccaactatctcgtgacagctagcgatgatgaatcaatccgtttatacgatacccaagatgcagtgtgtttgaatactattaatagcaaaaaatatggggttggacttgtgtgcttcactgataacccatctattgtcttatattcatcgaacaatggctgggatgaatctctgcgtctgctctcaatgaatgataaccggtttattagatattataaaggtcaccttgatagggttgtctgcatcgcactttgctctggaaaagaaaattttctctcatgttcgcttgatcgtaccattctcttatgggaccatcgggctgaaaaaccgcagggcttactgcgcgcgcaaaggaggcctacagtttcgtacgacgcccagggcatggtatttgctgtcgcctatggtggccgcataaagatgtttgatattcggaaattcggaatgcccatgtcgtacagttcagcggtgatggcaggcggattctgttaaccactaaagctgggcgtgttcatgtgctagattcttttgaaggcaacagcattgcatcgtttcgcgcgaagccaatattaaccaattcgacactggaggcatcgttctgtcccgagggaaaccatatcgtatctggctccggtgatggtagtgtctatgcttggaacgttgagagcggaaaggttgcatgctgggaaagcacagatgtgaaaccgccgcgggtaaggtggtctccaggatccttgatgttcgtgacaggaacgtcggagctgtcctgctgggtgccggatttgtccaagctggagtccttcaccatcagccacaccaacgccaggtccagctcgtccctgtaggcttggaccgatttgcatgccgtgtggctggttgacgcgactccatcaagagcaggaggaacaagaaagcatagcggagcatcttgtacgaatgagttgtgatggttggattcttttcctgatggcccggtaaagctactcttgcaacgatcgtggtcttgcggcaacgctgcgcgttgtttctgtagtgaacatgaactgggcagttaattggttactttttcaaagaaagatataaagaaaatacagctctctt

SEQ ID NO: 21625 - DNA, 634 bp, Zea mays
  Clone ID: LIB3354-051-C6_FLI
ctagaaagatcgaatcgacccatgtacataataatctcatgcggtcatgccatgttctttctgccactccagggaaatctccatctcggtcgctgctgctgctgaggtcggcggtgcagatcatcgcagtatgagcatggaggggctcatcccgttcgtttgcggcgcgatcagcaagcggagggcggcgaaaagggctgtggactacgagcgcctctcctccgccggcgctccgccaacgcggggatggggacacgagcgcctccccggcggcgcctacgaccatcctcggagccagagctgccggttcgccgcgcgctcgtcgcccgacgagcgcggtttctcccgtgacgagggtgtccaggacgagccgtctccgccgggcggcgacgggtggcgtggtctgtccaagtcccggaggttcagtagcatgcgcttgtttggatgcgtcagtggcgcgtaggaagagaagaatctgtttggatgtctggtatcgtgtgccgcgagcacagctctgtacagaagcaacgatttgacgagtaaatcgagtgaaatgtagcgcttgctgcgagctgcgactgcgaagcacaatcttgctgatggcaaatgaaatacacaacggacgcattttgtt

SEQ ID NO: 21626 - DNA, 587 bp, Zea mays
  Clone ID: LIB3354-051-C8_FLI
tccccaaagcctccgacccccttcctctctccctccgccgccgctgcgcacgcagggaacaagcgacatgggcgtctacacctttgtgtgccgcaacaacggcggcgagtggaccgccaagcagcactccggcgagatcgaggcttccgccgctaccccatacgagctgcagcgccgcctcgtcgccgccgcctccgcggccgactctgcctacggcgtccagtcgtccttctccatggtcacccccagctccgccgtgttccaggtgatcgtcggtgctgtcggtggtggtgcaatgatggtgagcggaggtggcggcggcggcggtgctgctgcatctggtggtgctgctgccgaggctcccaaggaggagaagaaggaagaggagaaggaagagagcgacgacgacatgggattctccctgttcgactagagttgtgtgtgtcatctggatctcagaagtggtggtttggtcctgttgccgtagttaattttgctgtcctgtctgtgaacctgaagaactcttggtaattgttacaagcgacctgttccagtttatgtgagaatttgatatgttgtttggaatc

SEQ ID NO: 21627 - DNA, 2171 bp, Zea mays
  Clone ID: LIB3354-051-D5_FLI
cttcgaaagacggagccaggagactgttattgcctgaaatccgcttgtgaagctataacagatgggtaacacaacaatccgaaaggagcagaagctagagcgggtgaagctggagctggagcgctaccacgagaacctactcccactctcccagtcataaccagcctgtccaactagtaccatcatgacctcctagcacgtgttaatctactcaccagtaacaacagtaaggacagaggcacataaaattacatcatgtatgtctttgtaactgatgtcttaatgcgtgcattgtagagtcacttatagatggaacatgcactctcctggcacctgaactgcccaccgttctagcatttatatgtaaacattgactagatgttgctttatcctttacaggatattacagtaatattcagaaggaggggtggttgtgatcttgttcaaagttttagtgattggaaaggaactgttgcctcagcaccagatgtcataggcatgacctttctttcaattgtctctcttgttgacgatgtaccaggaaagaagcaccttgctcgtgcagttgagctatacttgacctgtaagatctgctttcggttactttcatttgtcctatgcagttatgcaactcaagaactcattcaccacattgaatatagtatatttataatgccctgaggaagctaacttacgatgtgatttctcttcaattatactgttttgataagttctgttttacagacaaacctccaattgaagaattacagtatttcttagattttcaagtcccactagtttgggctccagctccaccaggtattgctagtcaccataggaaggaacctgtctgcccatcgcttcagtttagcttaatgggcccaaagctcttcattagcacagaacaggtaaaggttaccccttaaatctgaacatatgagtacagtgattactttttggagttttacgctagaaatgttattttaattgttgtcaggaaatgctatagctaagtatgaaacacaattaccatcataaacaattttctactaggttgggcctctagctgagttggttaggtggtagcacttaagttctgagttcgattccccatgggagtcagactgctgttaaaaaggtcctctcgtttgtcccaaaataaagcacaggtaaaagaaccgactcttacataggctacggcgccgttgtgtatgggtgagatatgtgttcggatgttttctagaattgcaagagaaggtcttcttaatgcaatacctgggatcccagatgttgtcttaccctcgcaagccaagtttttttttaaaaaaatataattctaaagatcaaggcatgcagaagaacaaaaatgtgtaaattgcaccaggggtacaaattttgtacctatagtgcattttactgataaaaagatacacttttaagacaatcaatttttttgtgaacatgctaactctgaagaagacatgtgcagatctctgttgggcgccgaccagttgttggcctcaaactgctcttggaaggagctaaacagaatcgtttggctattcacttgcagcaccttgtctcattaccaaaaatattcctacctcattgggactctcatattaccattggacctccaaaatggcaaggccctgaagaacaagacagccgatggttcgagccaatcaagtggaagaactttgctcatgttagcacagcacccatagagtacactgaaacaaatattacggacctatctggtgtttatattgttacaggtgcacagttgggagtgtgggattttggtgcaaagagtgttctccacctcaaacttttgttctccagggttcctgggtgcacaattagaagatcagtgtgggaccacagcccatcaagttcttcaattcataaagcagatgaatcttcatcgtcctcgagtgataatgctaaacttctgaagattattgacatgacagaaacattgaagggcccacaagatgcacctggccactggctgatcacaggtgctaagttgggtgtcgagaaaggcaggattgtagtgcgtgcgaagtactccttattgaattattaaccaaatgtttaaagcattcattcactcactctgatattgagcactgtgttttaaggtagcatttgttcttttgtttttc

SEQ ID NO: 21628 - DNA, 1165 bp, Zea mays
  Clone ID: LIB3354-051-F4_FLI
aagagacacggaggagaggagaggagcgggctagccagtctcgatctcaggttctcaagaaagaccctgcagggagagcgatcaaaaaggctgccggcacggccgggtagcagctacaactacaagctggcctatagctagctagctagctatagctgctacagccgccgagctcgatcctcggactcggactgcaacgaggaaggagaggaaatggtgggctccggcgcggatgggggcggcggaggggatgacgcgcggagcaaagaggccgcggggatgatggcgctccacgaggccctccgcaacgtctgcctcgactcggactggacctactccgtcttctggaccatccgtcctcgcccgcgctgccgcggcggcaacgggtgcatggtcggcgacgacaacggcagcctgatgctgatgtgggaggacggcttctgccggccacgggtggcggagtgcctggcggacatgagcggcggcgaggacccggtgcggaaggccttcatcaagatgtccatccaactctacaactacggagaagggtgggtactatactgggtaggtgctgtgcaggtgcaggtgcaggccgtcgagttcggtcggagtcgtgtcgtgtgcaatttctttccgactttccaatctccactcccggcttagcttagcttagcttatggcactactagtattaggcggtaattatggtgtgatgtagacacgtacggcgcccattttttttcaagtcgtggctgctgctgctgctgctttctgcgaggatcaagcacgggcgctgctgtcacgtgagggaggggacacggctggagtggggcggtgcctcgtgaggcttaaacaatcccacccgcgtcagtgggctataacagccggatcagctcgtgattaacatattcacgattgtgctacgcacgctacatgcacagccaggtgctacacggcgtcgggggcagtgtctttttttttatttatcttagaggacgatgtgaaatgaaagagcgacatgtcgtcagagttgcgtgtcacacgttagctgtcagtcagtcagtcagtcgttctgtgtatttttgtgtgtgtctcggcctcttttgatctcgctttgctgctgtaccgagatttcggaggcatacaatacatacatgagtcatgg

SEQ ID NO: 21629 - DNA, 798 bp, Zea mays
  Clone ID: LIB3354-052-D2_FLI
ccaagatccaggacaaggagggcatcccacccgaccagcagcgcctcatcttcgccggcaagcagctggaggatggccgcaccctggcggattacaacatccagaaggagagcactctccacctggtgctccgcctcaggggtggcatgcagatttttgtgaagacattgactggcaagaccatcaccttggaggtggagagctctgacaccattgacaatgtgaaggccaagatccaggacaaggagggcattcccccagaccagcagcgtctgatctttgcgggcaagcagctggaggatggccgcactctcgcggactacaacatccagaaggagagcacccttcaccttgttctccgcctcagaggtggtatgcagatctttgtaaagaccctgactggaaaaaccataaccctggaggttgagagctcggacaccatcgacaatgtgaaggcgaagatccaggacaaggagggcatccccccggaccagcagcgtctgatcttcgccggcaaacagctggaggatggccgcaccctagcagactacaacatccaaaaggagagcaccctccaccttgtgctccgtctccgtggtggtcagtaagtcatgggtcgtttaagctgccgatgtgcctgcgtcgtctggtgccctctctccatatggaggttgtcaaagtatctgctgttcgtgtcatgagtcgtgtcagtgttggtttaataatggaccggttgtgttgtgtgtgcgtactacccagaactatgacaaatcatgaataagtttgatgtttgaaatt

SEQ ID NO: 21630 - DNA, 1216 bp, Zea mays
  Clone ID: LIB3354-053-A2_FLI
gaaacgtactctgaacttgttcgtggtcctgtcgccttcatcagttcgttctgcgcgggaaccgccgatgggggacgccgtggaggacgtcgtcatcgccggcgcgggcctcgccggcctcgcgacggcgctcgggttacacaggaaaggggtgaggtgcctggtgctggagtcgtcgccggcgctgcgcgcgtcggggttcgcgttcaccacgtggaccaacgccttccgcgccctggatgccctcggcgtcggggacaagatccgggagcaccatttgctctacgagcgctactggtgaagcagctgcagaagtgagcctaaagattcagagcaaaagcgggccacacgagatccggtgcgtgaagcgggacttcctgctgcggacgctggccgacgagctgccggagggcaccatcaggtactcggccaaggttgtcgccatggaggaagacggcgtcggcggcgccaagaccctgcagctgcacctggcagacggttccaccataaaggccaaggtcgtgatcgggtgcgacggcgtgaactccgtggtggcccagtggctgggcctgccgaagccgatcctgtcggggcgctcggccaccaggggcctcgccgagtacccgggcggccacggtttcggccccgagatcctgcagttcatcggccacggcttccgctccggcgtgctgccctgctccgacacctccgtctactggaactacacctggtacccgtcccccgcggacggcgacgccgaggagagcgtggccaagatgcggagccacgtggtcgccaagctgcggggcgccaaggtcccggccgaggcgctggaggtggtggagcggagcgagatgagcgacgtggcgtcatcgccgctgcggttccggtccccgctggcgctggtccgcggcagcatcagccgcggcggcgtgtgcgtggcgggcgacgcgctgcaccccatgacgccggagctcgggcagggcgggtgcgcggcgctcgaggacggcgtcgtcctggcccggtgcctgggcaaggccttcgccctgctcggccatgagcgggatgaggggcgggtcgtcacggcggcgctggaggagtacgcggcggcgaggcggtggcgcagcatccagctcatcaccgccgcctacgtcgtcggcttcatccagcagagcaacaacgccgtggtcaggcgataaggctcaagtgggtcaac

SEQ ID NO: 21631 - DNA, 1337 bp, Zea mays
  Clone ID: LIB3354-053-B8_FLI
ctccaccacctcttcctcctcggtcctcacctggagttgtagcaagcagcaccacatcatatcacagcagagcagagagtggggtgaagcagggagctgggcaggagagccccaacggcctgtcctgccgcggccatgcgtttctctgcgctgctcctcatcgtggcgctgctctgcctcggcggcgggcgcgtggccgccggcttcgagtccatcttcccgccctacggctccagcttcttcggcgggcccgccggccgcttctgcgacggccgcctcgtcatcgacttcctcatggaggcaatggatatgccactcctcaacgcgtacctggattctctaggcacgccaagctttcggaccggcgttaattttgctcaagctggatgttcgatcacaccagcaaagccgacatcagtcagcccattctcatttggtctccagatcaagcagttcttcgccttcaagaacaaagtcactaagctcctgtctgaaggagatatgcacagccgatacattcctcagcaagattacttctcagagggactctacacgttcgatattgggcagaatgaccttgctggtgagttctattcaagaacagaggaccaggtcatcgcatccattccaactattttgctggaatttgagaatggtctcaagaaactgtatgaccaaggtgctaggaagttctggattcacaacacgggccccctcggttgcttgcctcaaaacattgccctcttcggcaaagacccatcccaactggacgagctccactgtgtggcgaagcacaaccgtgccgcaaagcttttcaacttacagctgcacgcactttgcacgaagctgagggcagaattcgatggagccagcatcacttacgtggacatccacacgatcaaatacagcctgatcgccaactactctcgatacgggttcgagcacgccactcaggcgtgctgtggatacggaggcccacccctgaactacgatggtaacgtaccatgtggacacacggtgtctctggatggtaagatggtcaccgcaaaagggtgcagcgacactactgaattcgtcaactgggatgggatacattacacggaagctgcgaatttccatatcgcctcgcagatcctgaccgggaagtattctgatcctccgttcgtggataagatgccgttcgtcataaaacctagattctgattggcatacaattttccctctttactcacccactttacagcaccggttgcagatacgatgtatacttattacttgccaataaccatatatagcttgagtaaaaaaatcatatatacggcttggtttcagttgtc

SEQ ID NO: 21632 - DNA, 738 bp, Zea mays
  Clone ID: LIB3354-053-E12_FLI
gcggacacaggcgtgggggcgcggggcggtggcgcgcttgatgacgccattcaatcgccgcgcggcccacgcctcttctccccacctgctccgcgcctgctcatccgcctcttataccatcgctctcgctcgcctccgacgccacttcacctcttctgcttccttctccccagcatacagtgccagacaggatacccacacattcatggaggtggttcaagaagtccttaggcatggctcagcagatagtgtccgtgctgtcataagagctaacaaaaagagctacagccttgtccagctcattgcagcctcttttgatgtctacaacattttgtgcagcaaaaatatgacaccaaatgggatgcaagattcttcttccaaaggaagaaatggaacaggattccttcatggagctcgtgttggcattgtggctaaaccctctcctgaatttgttgctggggtatttggaacctggctttctggtggagttgcagtaccccttgcccttagctatccagaagctgagcttcttcatgtcatgaatgactcagatatttcaatggttttaagcaccaaggagcatcacgaaatcatggagaacctttctatcaagtgttctgcttattgttctattcttccatctgtcactagtataccttcagaaatcaatcctcaagaaccttcaagcaatgaggcgatttcatcagtctctactttaataactgagaccaacagttc

SEQ ID NO: 21633 - DNA, 1431 bp, Zea mays
  Clone ID: LIB3354-053-E3_FLI
gtacgcggacacagccccgatccgaatcgtcgtctttgcgagcctcgccgatcccccactcccctcccctcgcttcaagatgcagatctttgtgaagaccctcaccggcaagactatcaccctcgaggtggagtcttctgacaccattgacaatgtcaaggctaagatccaggacaaggagggcatccctcctgaccagcagcggcttatcttcgccggcaagcagcttgaggacggacgcacacttgctgactacaacatccagaaggagtcaaccctccacttggtgctgcgccttaggggaggcatgcagatctttgtcaagaccttgactggcaagacaatcacccttgaggtggagtcctcagacaccattgacaatgtcaaggcaaagatccaggacaaggagggcatcccacctgaccagcaacgtctcatctttgccggcaagcagttggaggatgggaggacccttgctgactacaacatccagaaggagagcaccctccacttggtgctgcgtcttaggggtggtatgcagatctttgtgaaaacccttactggcaagaccatcactcttgaggtggagtcttcagataccattgacaatgtcaaggccaagatccaggacaaggagggcatcccgccggaccagcagcgtcttatctttgccggcaagcagctggaggatggacgcacccttgcggattacaacattcagaaggagagcaccctccacctggtgctgcgcctcaggggaggaatgcagatcttcgtgaagacattgactggcaagaccatcaccttggaggttgagagctccgacaccattgataatgtgaaggccaagatccaggacaaggagggtatccccccggaccagcagcggctgatcttcgccggcaagcagctggaggatggtcgcaccttggctgactacaacatccagaaggagagcaccctccatctggtgctccgcctgaggggcggtatgcagatctttgtgaagaccttgactggcaagaccataaccctggaggttgagagctctgacaccatcgacaacgtgaaggctaagatccaggacaaggaggggattcccccagaccagcagcgtctgatcttcgccggcaagcagctggaggatggtcgcacccttgcagactacaatatccagaaggagagcaccctccacctggtgctccgtcttcgcggtggttattaagccatcagtcgttgaagctgctgctgtatctgggttatctagtgtctctgccattgcccatggatggtgctgtctttcaaagtatttgtatggtttgtgtcgtgagtcgtgactgagctggtttcatggaccagttgtgttctcgttacccaaaactatcgtgcgaccgcatatggcttaatcatgaataaatgttgtttgaattt

SEQ ID NO: 21634 - DNA, 1852 bp, Zea mays
  Clone ID: LIB3354-054-E10_FLI
tctggtcaagacgacccggtcgtatttaggctcctcaggagcgactgggagcaacttgtcgatgagctgcaagttaggctttcaaagaatgtggaggagtgtgtggactttgcgccagagggaggtaaggtggtggtgagtgctactccaaaaggccactccgatggaagtcatggtgttgagcttcctgttgctctgcaggcattggagattattgatgccctagactatgggatggcaaaaattgcagattcgatgatgaagcatattctggttccagcaatcagtaacatacatgtgtcagtgcttgtggaatgtggtccagaacacactgtatcagtcttgagtgtagtccattccgaggaaaacaaagacaatagagatggttcaaatctgtactcaagaatagttgatgtcatcaagtttgtgtgcaaattcatctgcatggaaaatagcaagtgggttcaattttttgcgaagttaacctggccaagaatttctgatctagttatcacacactttctctccaaggctgtaccaaatgaggcatccaagctaattgagttccaagatgtcgtgcaaagtacaactgaattcgagaacaaacttaggagcatgatgtttcttttgcctgatagaaaggatggcaagctgacccaatttgttgatgatgttgaagttcattttgctgtacggaagagaagtgaaatcttggtgaaagcaaggaacattcttgtacaatatgattatgatagtcctctggaatctggtgaccaaggtgattctgttgttgatctactttttcagccagagaagtgttttacatctaaatcagcacttctagtaatgaaattggttcatggagccctcaagagcaggatgcatctttgtcatcagcaagagtagctaaggagttctgctttgctgctagggatgttttgctcctttatagggctattgtgccggttcagctagagaagcaatttgatagcttaagtcaagtggctgctattgttcacaatgacttttaccatttgtcccaagaaattctgggccttgcatttcagtaccgtgcagattttcctagtgatctacagaaacaggttgtttttgtggatttagccccaatcttctcccagatggcggatgctatattgagaagacaaatacaactcactgttgatactataagtgaggctatagatggtgctgaaggttttcagaacacacaccaacctcagcattatgaatccgcaaaatttagtattgagcaggtcgtgtttattttggaaaagatacgcatcatgtgggagtcgatactgccaagatcaatttacaggaaaagtatgtgcaatgtccttgggtctgtcttctctagaattacgagggatatgcttctgatagatgacatggcagcagaagagacattgcagctgcaaggccttatacatttggctctggaaaacctctcttcactatttctttccctggttgagaacaacgatgggagcacaaagttcttagaccatgacgcttggattcaattggatggaattctaccatctttgaaaaagttccgcaagctagcagagttgcttgatatgtcattgaagtccatcacatcatgttgggaaagtggagacctagttagatgtggtttcacatcatctgaggtgcaaaatttcatcaaagcaatattcgctgactcgcctcttaggaaggagtgcctaggatggatcgttaggactccagcttagaatacagaaacagcatatttctgtctgtgggtcaatgatttttttttcatattcttttgtccaccataccatatagtgaagtattaattggtatg

SEQ ID NO: 21635 - DNA, 1237 bp, Zea mays
  Clone ID: LIB3354-055-A9_FLI
ggcatcctgacactgaagtacccgattgagcatggcattgtcaacaactgggatgacatggagaaaatctggcatcacaccttctacaacgagctccgtgtttcgcctgaagatcaccctgtgctgctgaccgaggcccctctcaaccccaaggccaacagagagaaaatgacgcagattatgtttgaaaccttcgaatgcccagcaatgtatgttgctatccaggctgttctttcgttgtacgctagtgggcgaacaactggtattgtgatggattccggtgatggtgtgagccacacggttccaatctatgaaggatacacacttcctcatgctattctccgtttggatcttgcggggcgtgacctcaccgaccacctaatgaagatcctcacagagagagggtactccctcactacgagcgctgagcgggagattgtcagggacataaaggagaagcttgcctacgttgcccttgattatgaacaggagctggagactgccaggagcagctcctctgtcgagaagagctacgagatgcctgatggtcaggtcatcaccattgggtcagaaaggtttaggtgccccgaggtgctgttccaaccatcccttgttggcatggaatcgcctggcgtccatgaggccacgtacaactccatcatgaagtgtgatgttgatatcaggaaggatttgtatggtaacgttgtcctcagtgggggatctaccatgttccctgggattgccgatcgtatgagcaaggagatcacgtccctggctcctagcagcatgaaggttaaagtgattgcgccacctgaaaggaagtacagtgtctggatcggtggctctattttggcttctctcagcacttttcagcagatgtggatctccaagggagagtatgacgaaactggtccgggcattgtccacatgaagtgcttctaagtttttttgggaaatttttccaaaaaaaaaaagaagtttctggggaagttcgacatggtacgtcaggcgttaccggctcattgtgaaccaatacatgaactgccatgataaggttataagcagaaataacagtagcactggctccaattcctgaagatgagtctggtgcgccctgctgtatgaaatggatcccactcgtatattcgtcaccgcgccgcactggtgtaacgtgttgcctcagagtttgcttttagctggttccttttttaaaaataagtactgtttttggttggct

SEQ ID NO: 21636 - DNA, 1971 bp, Zea mays
  Clone ID: LIB3354-055-B9_FLI
gaacgagtgagtatgtgcggcatacttgctgtgctcgggtgcgccgacgaggccaagggcagcagcaagaggtcccgggtgctggagctgtcgcggcggctgaagcaccggggccccgactggagcggcctccggcaggtgggcgactgctacctctctcaccagcgcctcgccatcatcgacccggcctctggcgaccagcccctctacaacgaggaccagtcggtggtcgtcgccgtcaacggcgagatctacaaccacctggacctcaggagccgcctcgccggcgcaggccacagcttcaggaccggcagcgactgcgaggtcatcgcgcacctgtacgaggagcatggagaagagttcgtggacatgctggacggcgtcttctccttcgtgctgctggacactcgccatggcgaccgcgcgggcagcagcttcttcatggctgctcgcgacgccatcggtgtgacgcccctctacatcggatggggagtcgatgggtcggtgtggatttcgtcggagatgaaggccctgcacgacgagtgtgagcacttcgagatcttccctccggggcatctctactccagcaacaccggcggattcagcaggtggtacaaccctccttggtacgacgacgacgacgacgaggaggccgtcgtcaccccctccgtcccctacgacccgctggcgctaaggaaggcgttcgagaaggccgtggtgaagcggctgatgacagacgtcccgttcggcgtcctgctctccggcgggctggactcgtcgctggtggcgaccgtcgccgtgcgccacctcgcccggacagaggccgccaggcgctggggcaccaagctccactccttctgcgtgggcctggaggggtcccctgacctcaaggcggccagggaggtggcggagtacctgggcaccctgcaccatgagttccacttcactgttcaggacggcatcgacgccatcgaggacgtgatctaccacacggagacgtacgacgtcaccacgatcagggcgagcacgcccatgttcctcatgtcgcgcaagatcaagtcgctcggggtcaagatggtcatctccggcgagggctccgacgagctcttcggaggctacctctacttccacaaggcgcccaacaaggaggagttgcaccgagagacgtgtaggaaggttaaggctctgcatcagtacgactgcctgagagccaacaaggcgacatcagcttggggcctggaggctcgcgtcccgttcctggacaaggagttcatcaatgcggccatgagcatcgatcctgagtggaagatggtccagcctgatcttggaaggattgagaagtgggtgctgaggaaggcattcgacgacgaggagcagccattcctgcccaagcatatcctctacagacagaaggagcagttcagtgacggcgttgggtacagctggatcgatggcctgaaggctcatgcaacatcaaatgtgactgacaagatgctgtcaaatgcaaagttcatcttcccacacaacactccgaccaccaaggaggcctactactacaggatggtcttcgagaggttcttcccacagaaatctgctatcctgacggtacctggtgggccaagtgtggcgtgcagcacagccaaggccatcgagtgggacgcacaatggtcaggaaatctggacccctcgggaagggcggcactgggcgtccatctcgccgcctacgaacaccaacatgatcccgagcatgtcccggcggccattgcagcaggaagcggcaagaagccaaggacgattagggtggcaccgcctggcgttgccatcgagggatagacgacgacgcatatataagcttcctacttttgtttcaatgcatgcatgctatgtatctgtgtccaccggctgtctagccttatcatcatcactgtctgcaacaaattaataatcaagtggtatggggtacctacgttt

SEQ ID NO: 21637 - DNA, 1002 bp, Zea mays
  Clone ID: LIB3354-055-E10_FLI
ccgagtccactccaagccttttcgccttttcctccgccttctcgcgatggcgccgccgcgccgcgctctactcgtcctcgccgctctcctcctctccctctcccttggggccgcctccttccattccgacgagctcctcctcaacgatgacgaagagttcgagggcgtcgtcgcccgcccctccgccccctccccgccggcggccccggtggtctcctcctcccgccgcagatcagcggacgcgccgttgcccgggtcaggcgagtccaacgcagtgcagttcacgctcgagcacgaccttggcgacggcaagggcttcgtctcagctggaaccttctcggcccgcctcaagaccttcgcccacggcacgcagagatgcattccacgtgacagtttggatgaacacattgttatccacatggatggtgtaaatatcttggcagtcaattatggctctgttgatgggtgccaataccctaggcctatgaaattgccatcaaaatggacattcagctcttacactatcctaaagactgctgaacaggcaccaagaaccccatcgtttgcagatcagttaatagaagctgacaatggtcttggcgaagtaatgaaaccacctgagaaatctttctgggctaaatattggatgtacatcattccgcttggtcttattgtcatgaatgctgttacggcagctgccaacataccagaggaagctgcagggcagggccaacctggagcacaacgggcacctgctgctgttgctgggaggaggagatgatggctgccttccataccgtagttaactatcttcacattgttttctgttttttttggggtattgtatcaatcttaccttgactgcatcatctatggcactgcatgatgatgccatcttttgcttgtgttgaaacacgtagcctatccaagacaatgtggttcctatacatctgtagccaattttggccactagcatgccattggacactgaaactttgcttg

SEQ ID NO: 21638 - DNA, 1180 bp, Zea mays
  Clone ID: LIB3354-055-G12_FLI
ctgcctccatcatcctcccagagagagagagagagcgcagccgaggcagttcgcccgcatgtatcccgctgctgcagagatcacgcccagcttctgcgcctgcagctccagcagtagcagcaccaggggctgcagtggaaacggccgctgctagttcccgttctccccatgatctctgccctttcccctactttttcttgttcttgcttgccccttttccttctgcgctagctgccgcttcttcgccttcctggagcttcccgcatccacacatacctctaaagaaccagacaaataaacgacacagaaccgtcggagtcgtcttctactactgtctccagtatatgggtttgttgtgcacaggtgcgcgtagataggtagaaccgtagaaggcagattatcgctcgaggcagcagcttggttgctggggcacgcgatcgagctccaggcaagaagattattgcaggaaggcgcggcaggcatggaggatctgtacagcatccacccggggatctcacgcgccgggggcgccgccacggcggccagcgaggtgtccggggtcgccggcggaccaggctcgccccctcccccgccgtcgcagccccctccgccgccgccggcggatctgacggagctggtcaaggcgcagatcgccgggcacccgcgctacccttccctcctctccgcctacatcgagtgccgcaaggtgggcgcgccgccggaggtggccacgctgctggaggagatcggccgggagaggtgcgccgccgcctctgccggcggggaggtcggcctagaccccgagctcgacgagttcatggaggcgtactgccgggtgctggagcggtataaggaggagctgtcgcggccattcgacgaggcagcgtccttcctcagcagcgtccggacgcagctcagctccctctgcggcgccgccgcctcgctctcagcaatatattatacgactgctaatcccgaaacgacaagttcattcaacatcgcattagtttatgaaatggtagggtcgtcggaggaggacgaagcatgctcgggaggagacacggaggcgacggagccggggcagcaggagcacagctcccgcctggcggaccatgagctgaaggagatgctgctgaagaagtatagcgggtgcctgagccggctgcggtccgagttcctg

SEQ ID NO: 21639 - DNA, 955 bp, Zea mays
  Clone ID: LIB3354-056-D12_FLI
ggacaagggcaaggcaagagagaggcgtcgtcgtttgatctgctgccggagtgcgaagaggaagaggaagaggaagaggagcgccggagttgtaaagatgttcctggtggactggttctatggggtgctggcatcgcttgggctgtggcagaaggaggctaagatcctcttccttggcctcgacaacgccggcaagaccaccctcctccacatgctgaaggacgagcggctcgtacagcaccagccaacgcagtaccccacgtcagaagagttgagcatcggcaggatcaagttcaaggcgttcgaccttgggggccaccagatcgcccgccgcgtctggaaggactactacgccaaggttgatgctgttgtgtacttggtggatgctgttgacaaggaacgttttgccgagtcgaagaaggagctcgatgcgcttcttgcagatgactcccttgcaaacgttcctttcctcatactgggcaacaagattgacatcccatacgcggcttcagaggaggagctgaggtactacctcggcctgagcaacttcacaaccgggaagggcaacgtgaacttggccgactccaacgtccgccccctggagatcttcatgtgcagtgtggtgcgcaagatgggctatggcgaaggcttcaaatggatgtctcagtacatcaagtgagtcgctgctgtcctcttttgtccatggcgctgctgctttcgcaggagggttgaaatcaagtctggtcgtgacatggcagctgcatggaaaggtttatggtagctagtgataggcaaagcttgtaagtcggtgttaatcctagatatgtgatgtggggtctactttctcttctgattgtttcttggggtggtctaaacggttcaaaaaaaaatgcgacttcttcgggtcagctagaagttatgtaatcacgttacatgaagcagcgcattgttcgcc

SEQ ID NO: 21640 - DNA, 994 bp, Zea mays
  Clone ID: LIB3354-056-E1_FLI
gccaagtcgccgccgtcgctctgcccgcattcccttccacaacaccgagacgccaggatgacggcgcagactgcggaggagctcgccacccagatcgagcagcagaagctcgaggagcagaagaccgaggtgagatttcgcacacactcctcccgaacggtccgaatcagaaggggaatcgctgtcgcataggctatggatactgcagtccaaaatagatttgatgttttatttctagctgcagatccacgaacttgaagtagaatgatttcgtaggtgggtcttgctggaccatgcagaggaggttgtggtggaggatgaggaggacgacgacgatgaggacgatgaggatgatgatgaacttgacggacaagaaggggatgccagcggcaagtcaaagcaaagcaggagtgagaagaagagccgcaaagccatgctgaagcttggcatgaagcccatcactggtgtcagccgtgtcactgtgaagaaaagcaagaatatactgtttgtcatctcgaagccagatgtgttcaagagcccgaactcagacacatacgtcatattcggcgaggccaagatcgaggacctcagctcccagctgcagacccaggccgcagaacagttcaaggcccctgacttgagccagatcacgagtccagagacatctggcccgggccaggaagacaatgacgaggaggtcgacgaaactggtgttgaggccaaggacatcgagctggtgatgacccaggcatctgtttcgaggcccaaggctgtcagggccctcaaggcttctaatggggacattgtcactgccattatggatctgacaacttagaaccattttttttctctctccctttggagtgccatgctatgcagcttgagtgttatctgtggaccatatggttagagatgttagcatgatggcttcttctgtcaaggtcattcaaacacggtttcatctttgctggcttgctatatggcaatagcttat

SEQ ID NO: 21641 - DNA, 333 bp, Zea mays
  Clone ID: LIB3354-056-F3_FLI
gtccaaactaacccgatgaccacgctaatccatgcttagacactggtccagcactccagcctcctatatattggcagagcagaggggagcagaaagcagaggcagagaaaggcagctgcgtcgactggcaatgggggagcaaggcaggccaagcagcaacaggatcagagacatcgtgaggctgcgacagcttctcaagaagtggaagcagattgcgctctcgccgaaagccggcaagagcggcggcggcggcggcagccacggtgtcccgaaggggttcttcacggtgtgcgtcggcaaggagatggtttcagaaaagcagcaaacagagct

SEQ ID NO: 21642 - DNA, 1115 bp, Zea mays
  Clone ID: LIB3354-057-E9_FLI
agaatcctaccaaacctagctaccaactcgatcgtcgtcatcacgctcgaccgcacaactgcaccaaggggggaggagacctaaaaactactacatcttttatagctacatctctagctaaagatcgagagggtaaataaggacgagcgggcgcgagctagaagagcagctgcaggtactaccatcatcgtcgtcgtcgtcgccaggatgaccgtcgtcgacgccgtcgtctcctccaccgatgccggcgcccctgctgccgccgccaccgcggtaccggcggggaacgggcagaccgtgtgcgtgaccggcgcggccgggtacatcgcctcgtggttggtgaagctgctgctcgagaagggatacactgtgaagggcaccgtcaggaacccaggcatgcatgcctcctgcttgttgttatatataagcagtctactatgtcgacctgcgcgagcgtggcagcagatggagcgattaacgtgtttgtacatgttcatggcagcagatgacccgaagaacgcgcacctcaaggcgctggacggcgccgccgagcggctgatcctctgcaaggccgatctgctggactacgacgccatctgccgcgccgtgcagggctgccagggcgtcttccacaccgcctcccccgtcaccgacgacccggtgagttccgtcggccggccgggttccagcactcgtcgactgactggtcagtaaagtagtaacaagggaccgcatgcgccatgcatgtgtgcgtgcgtgcaggagcaaatggtggagccggcggtgcgcggcaccgagtacgtgatcaacgcggcggcggaggccggcacggtgcggcgggtggtgttcacgtcgtccatcggcgccgtgaccatggaccccaagcgcgggcccgacgtcgtggtcgacgagtcgtgctggagcgacctcgagttctgcgagaaaaccagggtgggtgtgtgcttgcttgatcacttttatttgatcggtcgtctccatccatccatcatctactactaagtacagtagcttgtaggttgtagctagctcctggtaccgtccgctgcaccacgccagcaccatattaaattagtgttttctttaattttatgcat

SEQ ID NO: 21643 - DNA, 1624 bp, Zea mays
  Clone ID: LIB3354-059-B5_FLI
ctcgccgtctgccttgtgcgcctccatttcggcctctgtcccttgcaagttcaatctcacctccaaccatgggtaaagagaagtcccacatcaacattgtggttattggccatgtcgactctggcaagtcgaccaccacaggacaccttatctacaagcttggaggcattgacaagcgtgtgatcgagaggtttgagaaggaggctgctgaaatgaacaagcggtccttcaagtacgcgtgggtgctcgacaagctcaaggctgagcgtgagagaggtatcaccattgatattgctctgtggaagtttgagaccaccaagtactactgcacggtcattgatgcccctggacaccgtgacttcatcaagaacatgatcactggtacctcccaggctgactgtgctgtccttatcattgactccaccactggtggttttgaggctggtatctccaaggatggccagacccgtgaacatgctctccttgcgttcacccttggagtgaagcagatgatttgctgctgcaacaagatggatgcaaccactcccaaatactccaaggcacgttatgaagagattgtgaaggaagtctcatcctacctcaagaaagttgggtacaaccctgataagattgcctttgttcccatttctggttttgagggtgacaacatgattgagaggtccaccaaccttgactggtacaaaggcccaaccctgcttgaggctcttgaccagatcaccgagcccaagaggccttcagacaagcccctgcgtctgcccctccaggatgtgtacaagattggtggtattggaactgtaccggttggtcgtgtggagactggtgtcatcaagcctggtatggttgtcacctttggtccaactggcctgactaccgaggtgaagtctgttgagatgcaccacgaggcgcttcaggaggctcttccgggtgacaatgttggcttcaacgtgaagaacgttgctgtcaaggatctcaagcgtgggtttgtggcctccaactccaaggatgaccctgccaaggaggctgccagcttcacctcccaggtcatcatcatgaaccaccctgggcagattggcaacggctatgccccagtgctggactgccacacctcccacattgctgtcaagtttgctgagctcattaccaagatcgacaggcggtctggcaaggagcttgagaaggagccaaagttcctgaagaacggtgatgctggtatggtgaagatgataccgaccaagcccatggtggtggagacgttctcagcgtatcctccccttggtaggtttgctgtccgtgacatgaggcagacggttgctgttggagttatcaagagtgtggagaagaaggacccgaccggcgccaaggtgaccaaggcggctgccaagaagaaatgatgcgatcctgcgcctgctttagcaatacctagttttcatcatcacaagttttgtttgtgatcgttgctgttatcgtgtgaactgttgagatctgttagcatgtgcacttttatctatttatttggtaccatcttgctatttcaccttttgcaatacaagaatgctctaagacctatatgttaaccttttggcattgttaaattgattttagg

SEQ ID NO: 21644 - DNA, 1223 bp, Zea mays
  Clone ID: LIB3354-061-B12_FLI
caacgactggggcgacagtcgctgccgccctacttgccggttgctcggatcttcttcggcccgttagccgtcgacgagcaccaccagggcaaccagatacttcagtggcttcgcaaggatgtcctggtgcactattgagtctgatcctggtgtgttcactgagctgattcagcaaatgcaagtgaaaggtgtacaggtggaagagctttactctctcgatgtgggctctcttagtcaactgcggccagtatatgggctaatttttctcttcaagtggatacccggggagaaggatgaacggcctgttgtcagagatcctaacccaaaccttttctttgcgcaccaagtcatcactaatgcatgtgctactcaagctattctctcagttctcatgaatcgccctgaaattgacattggcccagaattatctcaattgaaggaattcacaggagcttttacaccagatctgaagggcttggctattagcaacagcgaatctatccggacagctcataacagctttgcaaggccagagccatttatttctgatgagcagagggccgcaactaaggatgatgatgtttaccatttcataagctatttaccttttgaaggtgtcctgtatgagctggatggactgaaggaagggcctgtgaatcttgggcagtgcgatggtgctgatgatcttgattggctacggatggtgcagccagttattcaagaaaggattgagcgctactcacaaagcgagatcaggttcaatctcatggccatcataaagaacaggaaagaggtgtacagtgctgagcttgaggaactggagaagagaagggagcagattttgcaggagatgaataatgcttcctccacagaatccttgagcagttcgcttacggaggtgatatcggcaatcgaaactgtcacggagaaggtcatcatggaagaagagaagttcaagaagtggaagaaggagaacattcggaggaaacataactacatccctttcttgttcaacttgctgaagatgcttgcagagaagcagcagctaaaacctctggtcgagaaggccaaacagcaaaagtcagcaagcccgagcacgagttgatggtgaaatgtcaatagactggtagcttttgccgatgtcttctgagcgtcgtgttatcttatcagatacattgccaagtcggcagctcagataaattatgaccgatgttatttatacc

SEQ ID NO: 21645 - DNA, 1040 bp, Zea mays
  Clone ID: LIB3354-061-C7_FLI
cctcggcgcgcgccggcgccagccgacatgactgccggtcagtgcggcaacatccaggaccaggaggcagctcctggcgccgacctctacgccgtgctcgggctcaacagggagtgcaccgacgccgagctcagggtcgcgtaccggaggctcgccatgatatggcatccggacaggtgctcggcgtccggcagctcggcgcgcgtggaggaggccaaggagcggttccaggagatccagggcgcctactccgtgctctccgactccaacaagcggctcctctacgacgtcggcgtctacgacagcgaggacgacgacgctgacatggccgacatgatgagccaggccacgccaacgtccatccgtcaacgtgcaggagagcttcgaggagctgcagcagctgttcgtggacatgttccaggacgacctggacggcgccgggttcttcggcgggcttccgacgagccgcagtgcccagggtcctagcagcacctcgttgccaccgtcgacgtcgccattgcggccgacgcctcctgcaagaagtaagggtgcgcaaacaccgtcgtcgtttaacggcgctgggaggcggggttcgacggcgaagcggccgaggaccggttgggctggcctggaaccggatctgggcctctctggattctgtttcatggtgagcaagtcgaaggagaggccggcggcatgggcgtgcgacggcggtgacgagaggagcggcagcaagcagaggctgtcaacgagccgcgacgtctccggctccggtggtgggatgtcgcgctcgcgcggcagagccaaagcagtagaaacttgtgggcagtgaacggcctctagtcttgaatcttgattagagcaccgtttattcacttactggctcgcgtcagtcgtagtagctcgaggcacgttgaaaaggagagagaaaagatctgtttcattcttcaatctattccaagctagccataaatagccaatctcttgctgcattgtttcgatgaatttttatttgggagaaattgagagtggttggtagt

SEQ ID NO: 21646 - DNA, 1408 bp, Zea mays
  Clone ID: LIB3354-061-G12_FLI
ctcggaattgtccccgtcttccctgatcccttcgctccccgaagcaaaagcgcagagcgcatcagcgcagagtaggacagccatggcgacggcggcggcgcagtcccatccggcatcgatggacgcgcgccggtgggacgagtcatcgtaccgccgcggcatcctccgtgcccgcgacctctcgtcccgcaccctcttccgtgccgtcttctttgaccacagcgacgacccggataccgacatcctactcgccgccgcctccagcgacggctccctcgcttccttctccctttcatcctgcatctccgcatgttccgctacctcccaggtggagaccgccgccactctggtagatcctgtctgcatcgtgcaagcgcacagcggacctgcctacgacgtcaggttttaccccgatcaacagcagccgctgctcttcagctgcggggacgatggccgcatcaagggttggaggtggcacgagatgcagagctgccttgtcccgctctccctgcaaggggatcatctggaaccagcacttgacttggtcaaccctcagcacgagggtccttggggtgctcgatctccagtacctgaaaacaatgccattgcaattaataaacaggatggatccattttggcagcagcgggtgatgcatgtgcttactgctgggatgtggagaccagtaaatgtaaaatcacattcaaggggcatgctgattatttgcacagcattgcagttcgtgagtcaaaccgccaggttgtaacaggatcagaggatgggacagctcgtatctgggattgcagaagtgggaagtgcactcgggttatacagccaggaaagagcaaggcatttgaaagctcatgggtcagctgtgttgctattgatccaagtgaaagttggctggcttgtggcacgtctagcggtatatcagtttggagtcttctctcaaatgagtgcatctttaatttggactgtcatgctcctgttcaagatttattgtttgacaagaatcatattttagcagttggcgctgaacctctgctctcccgtctcacaataaacgggacagtcctttcacaagtaaaatgtgcccctcagtcggcgttttctgtctccatccactcaactgggatagcagctgttgctggatacggaggtctggtggatgtgatctcagaagttgggagccatctgtgcacattcggtagccggggcctagacaagtaaatgacccatgagcattccttgcgaacagcgcgcggagaatgcgagggctgtatctctttgcactgcagttgcacaagtttcatggaacgttgtcgctgacaatgctctactgaacaaagatagctagacggtaaaaaaaaacatttgatactagttcgagctaaacaaagttctgctctg

SEQ ID NO: 21647 - DNA, 1100 bp, Zea mays
  Clone ID: LIB3354-063-F7_FLI
cacaccccccgagctgagcttagctccactccagctccaatcacagtcgtgaccagagcgcgagagctagctagagggccgtgaaaatgccgatcaataggatcgccctggggagccaccaggaggtgtaccacccgggcgccctcaaggcggcgttcgctgagttcatctccaccctcatcttcgtcttcgccggccagggctccggcatggccttcagcaagctgaccggcggcggcccgacgaccccggcgggcctgatcgcggcggcggtggcgcacgcgttcgcgctgttcgtggcggtgtcggtgggcgcgaacatctcgggcgggcacgtgaacccggccgtgaccttcggcgccttcgtgggcggcaacatcaccctgttccgggggctcctgtactgggtggcgcagctgctggggtccaccgtggcgtgcttcctgctccgcttctcgacgggcgggcaggccacgggcaccttcgggctgacgggcgtgtcggtgtgggaggcgctggtgctggagatcgtgatgaccttcgggctggtgtacacggtgtacgccacggcggtggacccgaagaagggcagcctgggcaccatcgcccccatcgccatcggcttcatcgtgggggccaacatcctggtgggcggcgccttcgacggcgcgtccatgaaccccgccgtgtccttcggccccgccctcgtcagctgggagtggggctaccagtgggtgtactgggtcggccccctcatcggcggcggcctcgccggcgtcatctacgagctgctcttcatctcccacacccacgagcagctcccctccaccgactactaaaagccgaagccgaccgacccaggggtgcgcagcgcagcgcagctagcatccagctctctctccccggcccgctcgccgccgtttagtttctctcgtgcacgtgcatgcatcgtagactgtctcaggccgccgctgcgccggcgccgctcgcatcgtttgcttttccttggaccagcagtcgtcgccgtcaggttgagctgcttgtaaccgttaattccggacccgtttgcttctgtaagatttgtgcatttgcctgtgagt

SEQ ID NO: 21648 - DNA, 1286 bp, Zea mays
  Clone ID: LIB3354-063-H2_FLI
acaagctagctagagctagccaagccgcggcgtgcctccgctccggccggcccgcccctgtcagagcccccaccgccgctgccacctccgccagccgtcaccccaggcgttggatcggggccctctcgatccgcgcccggcgaatccagacggacccgcattggggttggggccccttcgatccggcgcttggtgggggtttggctgggagctccaggctgaggggacggggcggggggacctgatccttcattccgttcggatttcgcttttcccccgtggggtctcgactgccggagggggaggaggacatggatttggcgtcggtcaacgaggagctggccgagatcgacgggcagatcggcgatatcctccgcgtattgcaaaatgggttccagaagctggagaagatcaaggatgccaaccgccgcagcaggcagcttgaagagcttactgataagatgcgagactgcaagagactcatcaaagacttcgagcgagttagcaaagctgaggctgagcatactgatccagcaacagcaaaaatgttgcatgacagaaagcagtcgatgatcaaagaattaaactcctacgttgctctaaagaaacagcaggcaagtgaaaacaagagaatcgatctttttgatgggccaagtgctgaagatggctttggtgaagaaaatgtcctgttagcatcaaatatgacaaaccagcagttaatggatcaaggcaatcaactaatggatgaaactgatcaagctattgcacgatctaagcagactgtccaagaaaccgtcaatgtgggcacagaaactgcagctgctctgaaagcacagacagaacaaatgagcagagttgttaatgagttggattccatccatttctccatcaaaaaggcatctcaattggtgaaagaaatcggtcgacaggttgcaactgatcgatgcatcatggccatgctttttctcattgttgctggagtcatagctataataattgttaagattgtgaacccacacaacaaggacattcgcgacatccctggcttggcaccacccgtcagcaggcggctgttgcgatagaggacaggtgaattgcatacctggtgtaaaaattgatgtggcgcggcgccttggcaagcccatctgtattctacgtcttgtaaaacgctgctccagtcatgtggtatattgctgtaaaacttctcatgggatccactcctactccttggctacacacagtgcgtatatgttcctcctagttcgccttcctgtttttgcaaaact

SEQ ID NO: 21649 - DNA, 1204 bp, Zea mays
  Clone ID: LIB3354-063-H5_FLI
ccgccgccgcctccaaggtgcgccaggcgtccagagtcgcggtgggcgggttccggcagcatccgcggagccgtgtcggccccgtggccgtgcgggcgtcgctgttctcgcccaagcccgcggcggccaaggacgcgcggccgaccaaggtgcaggagctgtacgtgtacgagatgaacgagcgggaccgcgagagccccgcgtacctgcgcctcagcgccaagcagacggagaacgcgctgggcgacctggtccccttcacaaacaaggtttacaacggcagcctggacaagcggctgggcatcaccgccggcatctgcgtgctcatccagcacgtccccgaccgcaacggcgaccggtacgaggccatctacagcttctacttcggcgactacggccacatctcggtgcagggcgcgtacctgacctacgaggagtcgtacctggccgtcacgggcggctccggcgtcttcgagggcgcctacggccaggtcaagctccaccagatcgtcttccccttcaagatcttctacaccttctacctccggggcatcccggacctgcccagggacctgctctgcacgcccgtcccgccctcccccaccgtcgagcccacgcccgccgccagggccgccgagccgcacgcctgcgtcaacaactacaccaactgactgatcaactccagcccaggaaccatctctgcctgccatgcctgtccctcactcgatttgtatgtttgtatggcttaggtccttcgattcgtacgttcgtgcgtggtagcaccaataaacatgcgatcgattgagttgtgtgtgcttctccattcattcacttgctctttctgcagctcgtgatcgagttgtgtgtgctccattcccaaattatgtatgatcgattagtagcgttaggggttaaccagtagccgctgtgtacttgtgtcacccttggacaaacaatgagatatttctttgtcgtcgagtaatccttcctgacggtgatggtgatggacatgttgctgacacgacgggatttgggaatctttgagcgctgagctgtgatgcaactgcagcgaccgctgctggtgctcttaaagcgattgttgccttgttggagtcggctgtgtgtccagactccagagtctacacgttcactgtaataacagggaggcaaggcaagtgagaaacaggatctgttacacatgctc

SEQ ID NO: 21650 - DNA, 741 bp, Zea mays
  Clone ID: LIB3354-064-B8_FLI
ggcggcggagcaaacgcaggcgaaggcgagggtgtgagggaaggagcaccagccatggtgcacgtcaacttctaccgcaactatggtaagacgttcaagaaaccaaggcgtccttatgagaaggagcgtcttgatgctgaactgaagctggtcggcacttgctcacccttgacgagaagaacccccgtcgtatctttgagggtgaggcgcttcttcgccgcatgaaccgctatgggctgcttgctgagggtcagaacaagcttgattatgttcttgccctcaccgctgagaacttcctcgcaaggcggcttcaaacacttgtcttcaaggctggcatggccaagtccattcaccatgctcgtgtcttgatcaagcagcgtcacatcagggttggcaggcaaattgtcaacgtcccatcattcatggtgagggtggagtctgagaagcacattgacttttcactgtcaagcccattcggtggaggccccgcaggaagggtgaagagaaagaatcagaagaaggcaagcggtggcggcgatgctggcgatgaggatgaggagtgaggatggacaagtagcgttacccaatataataatattatctagttttcttgaacttgttcgaatgatgagtgcttagctgtgtgatctgacgcagagttccctgtgctgactctgtgtcatggatggtccattttatcttgtggtattatcagcctttacataactgctatgtttggat

SEQ ID NO: 21651 - DNA, 653 bp, Zea mays
  Clone ID: LIB3354-064-D10_FLI
cgcttcgccctctcgctccagccgcttcacagcgccgccgctcgcctctccgaccgccgcgagaatgccgttcaagaggttcgtggagatcgggcgcgtggccctggtgaactacggcaaagactatggccgcctcgtcgtcatcgtcgatgtggtcgaccagaacagggcacttgtggacgcccctgatatggtcaggtgccagattaacttcaaacggctctcacttactgacatcaagattgacatcaaacgcgttcccaagaagtcaaccctgatcaaggctatggaggaagctgatgtgaagacgaagtgggaaaacagctcatggggcaagaagctgattgtccagaagaggagggctgcgctcagtgactttgacaggttcaaggtcatgctggcaaggatcaagaggggtggtgctatcaggcaagagctcgccaagctgaagaaggcgtccacggcttaagtcccttttggtggatggcatgttagtttttggtttcatgttgcatcagcattttgttttgagtgttgtcaaagccagaattagtaatatgtttcatgtgtacccttttcaaacttcatcaagaatgggtgtgctctggatattttgtcgggaatgatatgaaatacttaagttagcttgcgac

SEQ ID NO: 21652 - DNA, 892 bp, Zea mays
  Clone ID: LIB3354-064-F2_FLI
cgcgctcctatgctccgatcgcgcgtctcgcccatggccaccgtccgtcgtcaagcccctgcgtgcgcggtcctctgccggagctccctgctcgccttctgcgctctgctggcggccagtccctgctcctcgcggcccgcgcgtttctctgttcagccatggccgcgcgccggcgctcttcctttgccgcgtcccgcttcctgcccgccggccacagctcgaagtccctcccattgtgagttcgccgttcctcccacgccgcggtcaccctggtattccagctcgtcgtcgcgttgtttgaggtcaacctcactaaatcgcctcttgctcgacgccggtgatggccgttgtggagcaccgctgcgaactcccagcgttcttgctctgctccaagaaatatcaagcgctgaacagtcatcgttttgttgcgacgtgcgtgtgcgctactcgccccacgtcgtcgtctttgtgtgtctttgtgtctggccagtcccgtcgaggcatctgcaaatcttgcctcttgtcgtcatgttttcttgatctgccaaatcatcgcgcccgtgctgagttctctggccatcacgtttttcttacagacgctcagcctcgccgcgcgtcctgttttctgctcgccagcgcgccctctcggctcgctcgactttaattcccaatcgcgtcgtcgattccgccagttagcgtcgttcgtcgtcgcgtcgcgtgtgtagctctatatacgtcaccctcctgtgtcgtcgtcgttccgcgtgtcagcaagaaatcgcaagaatcgggtgaagacaaagccagcagcgtggtattcaccaagtgcgcaataaaagctcggacatcctgcgcgactcaagttcggttcgtcaaaattattcagtcgagg

SEQ ID NO: 21653 - DNA, 1369 bp, Zea mays
  Clone ID: LIB3354-064-G9_FLI
gcacctaaggacctctataatggcaaatttctctctatcagtggagcaaccacggaggctgtcggaggacctccactgttacatacatactacttggcaggctgaagccccaagtttcctgcgcctgttctagctagttggcgaagaaagatgtcgttccgcagcatcgtccgcgacgtccgagacagcatcggcagcctgtcgaggcgcagcttcgaggtgactgctgcagccgccgccggcggcctctccggacgcaccgccgcgcaacatcgcagggggaggtctcagagcacggtgcacgagctccgggacacgggtgtcgtggtccagcaggacgagagccgctgggccagcctccctcccgagctcctccgcgacgtggtccggaggctggaggccagcgagagcgcctggccgaaccgcaagcacgtcgtgtcctgcgccgccgtctgccgcgcgtggagggagatgtgccgggagatcgtgctcagcccggaggtctgcgggaagcttaccttcccggtctctctcaagcagcctgggcctcgagacgggatgattcagtgtttcataaagcgcgataaatccaagtccacgtatcgtctctacttgtgcctgagtactgctgtgctcatggagaacggcaagttcctcttatcagctaaaaggagccgcagaacaacctgcacgcagtatatcatctcgatggacgccgacaacatatcgagatctagcagcacgtacatcggaaagctgaggtcaaacttcctgggcacgaagttcgtggtctcagacacgcagccgcccccatacagatacagcggggctgcaccccctccccctcgtgctgctgggcggcgggcaagccggcggttcgactccaggaaggtctccccgaaggtgccgaccccggccggtgccggtggtggcagctacagcatagcccaggtgacgtacgagctgaacgtgctgagcacgagaggccccaggcggatgcactgcgtcatgcgctccataccggcgtccgcggtggagccgggcggcacggtccccggacagcccgagcggatcctgccccgggcgctgctggaggagcaggaggaggaggaggattcgtcgtcgttccgccgcaccggcaccggcaccacctccttctccaagtcgtcagcatccatcatggaccggtccgtggacttcggcggcagcagcagcagcagcttccgcgacttcagcagcgcccggttctctgacattgtcgacggaggcggcggcggagatggggagcaggatagggagaggccgctcgtgctccgcaacaaggccccgaggtggcacgagcagctgcagtgctggtgcctcaacttcc

SEQ ID NO: 21654 - DNA, 735 bp, Zea mays
  Clone ID: LIB3354-065-E9_FLI
ctagccaagcgcgcacctcggtgacctagctagttcaggcgacgatatggcgtcaggtcaggaaagcaggaaggagctggaccgcaaggcccgcgagggcgagaccgtcgtccccggcgggaccggcggcaagagcgtcgaggcccaggagcacctcgccgaaggtatatatagccgactgcggctaaccatctgcatatgttaattcactgtcgttggctttaattacacgagtagtgtggctacctgatatgttctgaaatgttgcttgcacgtactgagtgattgcctctacgtttgcagggcgcagccgcggaggccagactcgcagggagcagctggggcagcaggggtacagcgagatggggaagaagggcggtctgagcaccacggacgagtccggcggcgagcgcgccgccagggagggcgtcagcatcgacgagtccaagttcaccaagtagtcctatcgcgtgcgtgcgtacgcagcgttcgtagctgtctgcgtagtgtaccttggccgtagctagtgctactctctactttggagtagctgaatgataataatgtagctagcagcatgcatgtaggcgatcatacatacgtacgtacacaggtacgtgtgtgtgatcatgtatgcttccagaagggtatcctagcttaatcagtcacgtcgtcaagtcgtcaatatggcaggttcgcgtcagggctttgtagtttgatagcctgtttcacgac

SEQ ID NO: 21655 - DNA, 508 bp, Zea mays
  Clone ID: LIB3354-065-G7_FLI
gctcggccaccagctttgaccgcctcccctcccctccgctcctgttcctccataccccacccccccgcaggagcggcgcggcggcggcggcaaaggcggctaaggcaagatgttcgggcgcgcgccgaagaagagcgacaacaccaagtactacgagatcctcggggtgcccaagtcggcgtcccaggacgacctcaagaaggcctaccgcaaggccgctatcaagaaccaccccgacaagggcggtgaccccgagaagttcaaggagctcgcacaagcctatgaggttttgagtgatccagagaaacgtgagatttatgatcagaatggatgatgccccttactatacccctatacatatagtagatgatgaagtcattactaggaccttttttccctaatctttttaagacccatctaagtaacatgtcctctctatgctagctatataattgtgtatttctggatacataaagccaaggttcttagtagtataatcttctgtgtt

SEQ ID NO: 21656 - DNA, 1388 bp, Zea mays
  Clone ID: LIB3354-066-A4_FLI
cgccgttcaaccctcttctcgcctgatcgcctcccgcacgtacctctctatatttgtttctcccatccatgcgaagctccggcatctagctagcaggtcgctcgatcgccatgtccgacgatagcgacggccagcggcaatgccgccggggcgtcaccgtcgacgtcgagctcggcgccgccatggcgcttgccgacatggccggggtcgccggaccgggcggcgaacagccgccgcccgtgcggcgcgctactcccgctccttctgctcaccaggaggacgaggcgagcacgcggctgagcctggagctaggggaggtgagcatccaggcctccccgtgctccagcagctccagctttggcgggcacccgccgccgccgccgtcccaccaggcggcgtaccagcagcccgccgtaccggagccagcgacgactggctacggaccccggccccggcacgcggtcaccgaggccgagaaggaggcgaagcggctgcggcgcgtgctggccaaccgcgagtccgcccgccagaccatcctccgccgccaggccatccgggacgagctcgccaggaaggtcgccgacctgtcgtcgcagaacgagagcatgaagaaggagaaggacgtggtcatggaggagtacctgtcgctcaaggaggcgaacaagcagctcaaagaagaggtggcgaagacgtccaggaagccggcgatgccagcgcagcagcaggcggcagaatccttggtgccggcgccgccgcggccggggttcctgtactcagcggcaccgccggcaccagtgccggtgccctatgtctggggctcctggccgcccagcgccgccgccgggagcgagcagcacggcagcccgccgccgctctgcctgcagccctgcgcgtggtactacccggccgtagcggacccgcgcgggtcgccatcgtccgcgcacgcgcagcagccgccggcgttccaggacccgcgcgccgcaacgggcgaggaggacacggacgacgacccgtgctcgctcacgctcggcctcgaggtcgacaagcggagcgcgcccgtcggtatcgtcgcgggcccggcctccggctccggctccggcggcgggggagcgcagagcgacagggacagggcggcgcaggcgaggaggcggaggagggaccttaccaagctcaagcacacgcacgccgccgcccgccccggctcctccgagcagtggtaggcgcggcaaaaagcttggacaggcattgcgggcatgcacggcatcgcggtgccggtggtgactccattggttttcttctcggcggcgaactaaacagcttcgtgatctcttccgttttcttttcttagtatattctttgctgcaatatgtaactgaagaaattaaacg

SEQ ID NO: 21657 - DNA, 1320 bp, Zea mays
  Clone ID: LIB3354-066-B6_FLI
gttgatgtgagtggtggcttggatgaggcggcgacttccggtttggaggactccgaagccgcatcggaaggctccactgcacaggatttctacaccgacgttgaaacggagtccagcggctccagcagcgacgagcagagagctgagttcggcttttccttaccaccaccggaacaagttagcaacaaggcggattggaaaaatgacacttcagaggtgaagagttctgataggatgattccaatagctcaacggacacgtgtgttatcgtcaggtgctgcaatattgcctcatccgtcaaaggtagcaacaggtggagaagatgcatatttcattgcagccaatggctggtttggtgtagcagatggagttggccagtggtcatttgaaggaatcaacgcagggctttatgcaagagaactaatggatggctgcaaaaagttcgttaccgagaatcaaggggctccagatcttagaccagagcagattctttccaaagcagtagatgaagcatgttcacctggttcttgcactgtattagttgctcattttgatggccaggcccttcaagcattaaatattggagactctgggtttatagtgattagaaatggagaagtgttcaaaaagtctaaacctacgctttatggtttcaatttcccactacaaattcagaagggagatgacccctcaaagtttgtacagaattatgctattgatctagaggacggcgatgcaattgtgacagcaaccgatggcctttttgataatgtatacgagcatgaaatagctggaattgtctccaaatcgttacaggcagatctagaaccagcggagattgcggaacacttggctgtgaaggcccaggaagtagggaggtctggggctgggagaagcccattttcagatgctgctctctcggctgggtaccttggctacagtgggggcaaactggatgacatagccgtcgttgtatcaattgtccggactgaaattcaagaggataggctaagatgactatgcagaaaagaagctcatgttttgtggaagctcaacaccaagcgaccacgcaggttgccctatcagtattctgtactgctagaactgcagctatgtggcgatttctggaaagttaagggcgtatgcatcagcatcatacaccgtgctcgatcatcaataggcgggccaataaccattggacatcagcattgtagcgaagcccctgcctgttgcccttgccagtgcaccggcgccacattttgatttttggtttcgctataaaaatataaggcatttagatgttgcccttgccattaaacc

SEQ ID NO: 21658 - DNA, 1421 bp, Zea mays
  Clone ID: LIB3354-066-C12_FLI
ggagcacgacgtcgcgcacggtgcaggcggcgctgtccccgcaggcgaagaagcgttcgaggtagctcatcagttgctggcgcaggaggagttcagcgactcggagtccatccagatctccgacctgaagcgccgcatgtggagggaccagatgctgctcaacaggctggagtgccgcgcggacgtcttcagtgccgccggcggggcggggccgtcttcgtccaggccgctcgggccaccgaccgcgggcgcgcacggggaggacgaggaggaggaggaggaggtggaggcccccgaggtgcggtgccggcgcaaggcgatgctgcgcgcgcaggacggcgtcctccgccacatgctcaagatgatggaggcgtgcaacgcgcgcgggttcgtgtacggcgtcatcaacgaggccggcgagcccatgttgggctcctccgacagcctgcgcggctggtggaaggacaacgtcagcttcgaccgggccgggcccatggcgctcgtcacggcgcccaccggcgagagcccgccggggcccgcgtcctgcctgcaccgcctccaggacatccaggacagcacgctggggtccgtgctctcggcgctcatccagcactgcgtgccgccgcagcggagcttcccgctggagcgcgggctggcgccgccgtggtggccgaccgggaaggaggcctggtggggctcccagggcgaggtccaggcgcaccagggcgcgccgccgtaccggaagccgcacgacctcaagaaggcgtggaagatctcgctgctgagctcggtgatcaagcacatgagcccgcgcttcgaccagatgcgcaagctcgtgtggcagtccaagcgcctgcagcagaggatgagcgccaaggagacggagacgtggtccaagatcctccgccaggaggagacgctcagccgacgcctcaagagctcgctcaggatcacgccccttgacggcgacgacgatgacgacatggaccgagacggcctggaggacgtagtccgcggtgtgcaggacaagcgcaagcgcgagctgataagtagcagcagcggagggcgcgccgagctggtggcggatgagaacccgatcgacgaactcctgaagcgtcactacaacctcgtgcctgatcagcacgggatcgtcgtcgcgccggagaacgatgcgggagagctcgacctgctgtacggtgtcgtcgacgacgtgccgccggacgtgctcttcgatctcatcgcgagctgttcgggagccgacgacgcgttccgcctgatcctggactgagcagtggctcagcttgttggtccaggcgtcgctacgcagttggcatggatgggcgggagggatgacgtggtgcgttgtgcttgtttccgttccatttcttctgagctttatcacgatggagctttgagtcttt

SEQ ID NO: 21659 - DNA, 852 bp, Zea mays
  Clone ID: LIB3354-066-C4_FLI
ggggggcggcaagcaaccacgggcggagctcggagcgtcctcctcctcccgtctataaattcccctctttttcttcctccatatataggggccatcagatccaagaagagggaagagcaccaaggaccttcggcgcccgttcaggatccacatcttcccgagcgagttcttggttggcctcttcctcttcggaccacctccaaggctcttggtgtagcttgccactctcaccaatcaagttttcatgtctgatctcgacattcagatcccaactgccttcgatcccttcgctgaggccaatgctggggactctggtgcagcagcagggtcaaaggactacgttcacgtgcgcatccagcagcgtaatggtcgcaagagcctgaccaccgtccagggattgaagaaggagttcagctacagcaagatcctcaaagatctcaagaaagagttctgctgcaatggtacagtggtccaggacccagaacttggacaggtcattcagctccagggtgatcagaggaagaacgtctcgaatttcctcgtccaggccggcattgtgaagaaggagcacatcaagattcatggtttctgagcaaccgccgggtccatatcaaaccaaccctgcatgcagggcatcttattatatataatatctgaggtggagcatatctatctggctgtgtactgcaagcaggcctagtacgccgcctgcgcgttcctcctattacacatataggcccctccctgcgtgtatgcttgttaccgtcgtgtcgaaccttgtactacgaggctccatcgaacatcgatggcttgcttctttatcagaacatgtttgaataaacgctatttggt

SEQ ID NO: 21660 - DNA, 1169 bp, Zea mays
  Clone ID: LIB3354-066-C9_FLI
tttgctgctctccgaccccgagctccgaaggccgcagcatcaggcgcggcccccctcgcgtgtgaccgagatggtgagcgccccgcccccgcacggatccgatctccgccgtgtttgatccccggatctgcggctgcgtgtttctgacccgatatgttttgttgtttttttttgcaggcgctgccgaatcaggggaccgttgattaccccagcttcaagctcgtcatcgtcggcgatggtggaactggtaaaactacatttgtgaagaggcatctcactggagagtttgagaagaaatatgaaccaaccattggtgtggaagttcatccgttggatttcaccactaactgtggtaagatcaggttctactgctgggataccgcagggcaagagaagtttggtggcctcagggatggatactatatccatggccagtgtgcgatcatcatgtttgatgtaacctcaaggcttacttacaagaatgttcctacgtggcatagggacctgtgcagggtctgtgaaaacatccccattgtcctctgcggtaataaggttgatgtgaagaacaggcaggtcaaagccaagcaggttactttccacaggaagaagaatctgcagtactatgaaatttctgccaagagcaactacaactttgagaaacctttcctgtacctcgcaaggaagctggctgggtaattgactacccttcttctgtgcattgcatttagtagtcacaaccaattaccactctatgtttgttcttgacaatgtctttgtttttaacagtgatccgaaccttcactttgttgaagctgttgctcttaagcctccggaagttaccatcgacatggctatgcagcagcagcatgaagctgagcttgctgcagcagctgcacaacctcttcctgatgacgatgatgatctgattgagtagaaaggatcatgagtcttgaacttgagcaggagttgtgccttgcgtgttttaagttgttctagggtgaactcttgagttctcattgtctggatcatctttttctccttggatgtgttgcatcttttgagtgtggaaatggatggtactcctcgccatgaatttgctggctactttatacattgctttgtaactctgtttgatgataaactttgttgtggcaatcctcttagtgctg

SEQ ID NO: 21661 - DNA, 1243 bp, Zea mays
  Clone ID: LIB3354-066-D5_FLI
ctcccgtgccgcgctccgagctaacctagatgaacatactcgaaaggatacgtggaggtggcgacagggcggctgccacggagcgccccccgcggccggagtgctgggtggagatttcggagtccgtctcacggctctgcagcttcgacgccgccggcagcggtagccgcagcatctctgtaaaagttattcaggattctagacctatacatgacaaacttgttgattctttcttgaacaaatttttcccatcaggttatccatacagtgtgaatgaaggttacttaatttataccaaattccgtgtgctacagcatttctcgagtgctatgctacatgtgctatcaacacagtccttgctgtttgctgcaggtttgcgacctaccccggcgcaagcaactgctgtaagttgggtaagcatatgatgacagagatgctaaagtccaagcagcacgcaggaaagctcatttgtagcagcatgggtgcaagaatggattctgaaccaaagagttggaggatacttgctgatgttctctacgatcttggtactgcattggaagttgtttcgccgctgtgcacacaacttttccttgaagtagcaggcttgggaaattttgcgaagggaatggccgttgttgcagcaagagcaacgaggcttccaatttactcttctttcgccaaagaaggcaatcttagtgatttatttgctaaaggggaagccatatcaacacttttcaatgtcatgggaattggagctggaattggattggcatctactgtttgttcaacaactcaagggaagttaattgcaggcccgttactttccgcagtgcatatatatggggtcatccaagagatgagagcaactcctgtaaacacactcaacccacaaagaacagcaatgatcgtggctgattttatcaaggtttggtatctctgatctattaacgcaacctttttatccagtccagctacggcagtaacacttgtctattatttataccaataaatgtggcatcagctgaaaggagcttctcaaagcttaagttattgaagaattatttaaggtctacaatgtctcaagaaaggttaaacgggctagcaattttatgtattgagaagaaattattagatgatgtcaatattgaagccatctgatgattttgcatctagaaatgttagacgacatttttaagttgatctctacaatatatttgaggtaataatcttacttctattttat

SEQ ID NO: 21662 - DNA, 557 bp, Zea mays
  Clone ID: LIB3354-066-F7_FLI
gtcttcgctaaggagagagaagaatcttataaagccctcacatcgttcactggatggctataagcacattgtgaatgtggaatactggacggccgtgtcatcggagggcccacatttcccttccaaggctgccagagctaaagaagctgcacagcgatcgccaaaccgagaaaataccgaggagtaccaccaaatgatggacgaaggttggctggaagaaggtggacgtcaacttccattcgtcattctggccttactctgctcacaacaacatacacgtcaagaacgagtggcttcacaatgctggcgctggtgttatcgcgcacgttgcggacagcatcaagcagcaggagtcacggccatgtcttcctgccaatctatagcagtagcattcagcaatccatttgttcaaattatctgtcgctagcaaataaacccatgaccaaattctgttcgtcagcatccactgagcggcgaaatatttgggactgggacacacaataagctgtgtatcattatcggccgcctaggttttacattgtttgatgtcaattgtc

SEQ ID NO: 21663 - DNA, 1104 bp, Zea mays
  Clone ID: LIB3354-066-F9_FLI
tgattttgctgctgctgctctctctctctctctctgtgtgtgtgtgtgtgtgtgtgtgtgtgtgtgtgtgtgggtgcagcgctgaggaggatcggggtgaagggggtggaggtgcgcaagccagagcagctcctcggcatcgactcgctcatcatccccggtggcgagagcaccaccatggccaagctcgccaactaccacaacctgttccctgcacttcgagagttcgtcggaggtggaaagcctgtctggggaacctgtgctgggctcatctttcttgcaaacaaagcagtagtgttgctttcagggcaaaaaacaggggggcaggaacttgttggaggattagattgtacagtccaccgaaacttttttgggagtcagactgtttctcttgcagcttcaaagctttgagacagagctttccgtgccaaagctttcggagaaggaaggagggaatgatacatgccgcggtgtatttatacgggcacctgctatattggaagtaggtccagatgttgaaatattggcggattgccctgttcctgttgacagacccagcattacaatatcatttggggagggtactgagttccttttagttctttaatgagcagtgagccagtgaatatggccatttcttggaaagcaggaagaagagtattcaaaagatcgggtaattgttgcagtgcggcaagggaacatcctcgcaactgctttccacccagaattgacatcagactccagatggcatcgtttcttcttggacatggataaagaatccccagcaaaggcgttttctgcgctctccctgtcgtcatcgtcaagagacactgaaggcctgccaaagaataagccgtttgatctgcccatttttgagtaacgctacagacaagacaaaccaaaagattgaaggaacgaagaaactgaccgtatttattatcgatcatcatttagccggttacaaaaacagccagctgagaatctgtcatactcagccgaaaaaagtgttgtctggtagctaacttgtacgggtcaaaaataatcacgctgtgtgctgtacgcaattctcttcagataaagcgaaacattgtttttctggtgacc

SEQ ID NO: 21664 - DNA, 1096 bp, Zea mays
  Clone ID: LIB3354-067-C5_FLI
gtctacgcctccaatttggcctctctcccttgcaagtttaagcttcaccttcaaccatgggtaaggagaagtcccacatcaacattgtggtcattggccacgtcgactctggcaagtcgaccaccaccggccacctgatctacaagcttggaggcattgacaagcgtgtaatagagaggtttgagaaggaggctgctgagatgaacaagcggtccttcaagtatgcttgggtgctcgacaagctcaaggctgagcgtgagaggggtatcaccattgatattgctctgtggaagtttgagaccaccaagtattactgcaccgtcattgatgcccctggacaccgtgacttcatcaagaacatgatcactggtacctcccaggctgactgtgctgtccttatcattgactccaccactggtggttttgaggctggtatctccaaggatggccagacccgtgagcatgctctccttgcgttcactcttggagtgaagcagatgatttgctgctgcaacaagatggatgcaacgactcccaaatactccaaggcgcgttatgatgagattgtgaaggaagtctcatcctacctcaagaaagttgggtacaaccctgataagattgcctttgtccccatctcaggcgttctggcaaggagcttgagaaagagcccaagttcttgaagaacggcgatgctggtatggtgaagatgattcccaccaagcccatggtggtggagacattctcgcagtatcctccccttggtaggtttgctgtccgcgacatgaggcagacagttgctgttggagtcatcaagagtgtggagaagaaggacccgaccggcgccaaggttaccaaggcagctgccaaaaagaaatgatgcaacctgtcgttaatcctgtatctgcttttgcaatacctgacttgtcactccatcccgaagttttgtatgcggttgttactgttattgtgtactgttaagctctgctgcggcgtgccctgttgtttgggtagcgtcaacgtcgagcgccacttgcgggtgtgcctttgtctgctatcagtagcggcaaaaattgaaagctctcgagacttatgtccc

SEQ ID NO: 21665 - DNA, 854 bp, Zea mays
  Clone ID: LIB3354-067-C8_FLI
gcctcgggtcaaaccctaagcagggagttgatttatccgctgcagccatgagtaagttgcagtttgagtctgtcaaggatgccatctcccagattgttggggatgccaaggagaagaataggaagttcactgagactgtggaacttcagattggtctgaagaattatgatccacagaaggacaagcgtttcagtggctctgttaagttgccccatatccctcgtcccaagatgaaggtgtgcatgcttggtgatgcccagcatgttgaggaggccgagaagatgggacttgactacatggatgttgaggctctcaagaaaatgaacaagaacaagaagcttgttaagaggcttgccaagaagtaccatgctttcttggcatcagaggccatcatcaagcagattccccgtctccttggtcctggtctcaacaaggcaggcaagttcccgaccctggttactcaccaggaatccctcgagtccaaggtgaacgagactaaggcaaccgtcaagttccagctcaagaaggttctttgcatgggtgttgccgttggcaacttggcgatggaggagaagcagatccagcagaacatccagatgagcgtcaacttccttgtttcccttctgaagaagaactggcagaatgtgagatgcctctacgtcaagagcaccatggggaagccatacagggtgttctaagtatgctcttttgtgaagtctgctaggttctggcaccgaggttttattgaattaaacttttgttaagagtatgtttttggacgatcctatatttcgtcctggcgctactatgtttcagaatggtggtactactataagtatcctggcgctttaagt

SEQ ID NO: 21666 - DNA, 837 bp, Zea mays
  Clone ID: LIB3354-067-D2_FLI
ctcttccagttgacgcggcatcctctccttgaccatttccctttcctcccagcctcctctagcagccgtatcactaatccagttgttccccactaccgcctctggtcgaattgattagtcaaagtccagaggccagagcacatctctgtctcgctaatcgccttcataaacccctgccgcagccgcgctcgccgcccagaccaaccaaacacacacaactgtagccgtcgtcgtcgttggcgtgcgtgttgctctgctttcggagcccgtgcgcgagcggaaccaaagtaccagaccatggagggcctgctgccgttcctgtaccgggccatcctccacctcgccagcggcgggcagtcgcccatcggcaaccccttcttccgcgacgactcgccgccggagtcgccgctggcggcgcactactacgtccgcctcgccgccggcgccgacgtgccggccttcctctcctccgcggcgcgcggctactacgaccgcgggtgagagcccggccggaccaggaacgacgctgggcctgggcgtgcgagcaggaagaatcctcgtgtgctccttcagttgcgtgttcagagtgctgggtctcctcccctcttcttgtggcttcttggagattctcctccccctccccctcctttgctccttggaataaaggcatggatggatgaggtccagccatccagggggccgcgtcgttttcttccattgtatataggccatatatgacgtgatcagtcgggtgctcgccaaattgtagttctcagacacgggcgaatatgataccgattaatttgcaatatatcgcccaaaaaatatttccaaggc

SEQ ID NO: 21667 - DNA, 1205 bp, Zea mays
  Clone ID: LIB3354-068-B11_FLI
gccattacgaagccaaccctggaaaaccagggccattaatactactcccacccgtcgtctatctcctcctcaaccaccgccccgagatctccccttctctctcctcgcgccgttttcctctctacctctttgatccggcaatggccgcgcccgcccctgccaccaccggcgacctcctacgcgtcgaccccctcgagctacgcttccccttcgagttgaagaagcagatctcgtgctccatgcagctgtcgaatcacaccgacgactacatcgccttcaaggtgaaaactacaagtccaaagaagtattcggtgcgacccaacactggggttgtcttgccacggtctacctgtgatgttgttgttacgatgcaagcacagcgggaagccccgcctgacatgcagtgcaaggataagttcctagtccaaagcgtcgttgcccctgctggtataactgtgaaggatgtcactggggatatgtttacgaaggagtctgggtataagatggaagaggtcaaattgcgagtgacctatgttgctcctccacagccaccctctccagttccagaggaatctgaagaaggttctccacctagggcttctgaatcagaaaacggagatggaccttctggaggattcaccagagcactaagagagcgcattgagcctcaagacaaatctacagaggctggagctttggtttccaagttgactgaagagaagaattccgcgattcaacagaatcatagacttagacaggaacttgacttggtgaggcaggagatcagcaagaggcgtggagggggcttctccttcatcgtcgtcataattgttgctctgatcggcgccatcctcggctacctgatgaagtcgtaattctttcaggctgtcctctgctggccataccagaggcagtcgtgcaagttgtgtttgggaagaactcgaaaaaaaaactgttgaaaccagatgtcctgagatcatccttcatattttgtcgatataggagtgggtacgtgaggaatgctgggccagtgtttaagcttttcttttccttgttgtttctccgttggatgggcattgcggacgctgtaacttgaaagttgcatcaattgcttctgtttcatagttttatcttgctgagcaaatttgttttttagcaagtaacctgctgtttcattatccggaaagaacaaggtgattcccaag

SEQ ID NO: 21668 - DNA, 726 bp, Zea mays
  Clone ID: LIB3354-069-A4_FLI
cttctcctccccctcttaccaagtcctcctcgggttagggttccttagggttttgtggaggggcgatggcggcggctgatgtggagtaccgttgcttcgtcggcgggcttgcctgggccaccagcaacgagtcgctggagaatgccttcgcctcctacggcgagatcctcgactccaaggtcatcaccgaccgggagacggggaggtctcgcggcttcggcttcgttaccttctcctccgagaactccatgctcgacgctatcgagaacatgaacggcaaggagctcgacggccgtaacatcaccgttaaccaggcccagtcccgtggcggtggcggtggcggcggtggctacggcggcggtcgcggcggcggcggctatggtggcgggcgccgtgacggcggttatggcggcggtggcggctacggcggtcggcgcgagggtggtggcggcggctacggaggcggtggcggctacggcggtcggcgcgagggtggtggtggcggctacggcggcggcggcggcggctggagggactgatgtgtgggcccatcctggcttcggccgagttatcttatctatctatagtatcgtgttaccgttcgcttctgtcaccgtgttagtgtccgttctacctttggattaggtgttggtacccctgttgttccctttgtttgctcccgctatgaaacgagacgagagaagaatgagcaaggtttttgttcgc

SEQ ID NO: 21669 - DNA, 1158 bp, Zea mays
  Clone ID: LIB3354-069-D4_FLI
cgccgtcgtcgcccattcgcccccgtccctgcagtcgcccgtgctccgcctgctccaccagggcgcctcgccctaggggatggtctccgaccacctcccttcaccgccaccacgtgctcagtgacgcctaggtcatcggcgctgaagtttggaggccctgtacgtgcttcacagagatcgccgaccatgggctacgcagagatcgccatccgcccctctgggagcggcaagaaaatacagaggcagggtggcctatctcgaagattttcaaatgtgtcctattacggtctcacaaccccgccatataaactggatgctctggaaccttatatgagcaagaggacagttgaacttcactggggtaagcaccatcaagattacatggatggcttgaataatcagctggctaccagccctctgtatggatacactctggaggatctgataaaaaaagcttataacaatgacaatccattaccagagtataacaacacagcacagtgaagagaaatgagagaaagcttttggttgttcatacacgaaatgctatctccccacttgcttttggtgacattcacgcttactacttagactacaaggatgataagctaacatatgtcacaaacttcatggaccatcttgtctcttggcatactgtcactctacgcatgatgcgtgcagagtcttttgtgaaccttggtgagccaaatatcctagaggcttgagctacagatacaccctagttatcatcatgaggcattcttcggatacatcggatcaaatcctgctggaggagccagagagttggaaaatctcatgtctcacaagaaatgcttatcaccccaatgtcatatacgccaagataagctgctgggatttcaccattgcccttggatattcctacaaggaaatcactagtcagcatccagtttgaagacatgcaacaaaacaactctagaagctatggagctggtagattctggagttggcagtaaggcagtgatccaacttgggctttgaagccatggtgctttctctagacagctattatgtctgtagtgttgttagaataatcctggttctgtgttttcataacttcatcatgctagtgttctgctgtagcggaacacagaatggaacggaacgatattcttgttt

SEQ ID NO: 21670 - DNA, 1397 bp, Zea mays
  Clone ID: LIB3354-069-E8_FLI
ggaaacgcgtgaatcgatggccatgtaaagcggcggttccccgtgcccaatgcctcaggttcctattccatctcgaattcggagtcttctctcgtccctgtccccctccagcaccgccgccgccgccaccgcgccgcaacctcgccatggcacgccctccgtcggcggccctcaagccgccgtatccggccttccaatcccatcccagcgatctcgagctcgtcaacttctatctccgtccctgggtcgagaccggcgtcaagaccggcgcgttcatccacgacgcagacgtgtacgccgctgaccccaactacctcacccgtcagttcgcgccggcggtggcccaggacggcgagcgggcgtggtacttctacaccccgctgcgccacaagagcgtccacgggacgcggaagacgcgcaccgtggccaccggcggcgggtgctggcacaacgaggcgaaagctaggcccgtgtacatggtctccaacgggatgcaccagattgcgcatcgccagagcttctccttcgtcgagaaggatggcggcgtgcgggtccgcacgggttggctcatgatggagctccgcctcgtcgaggacggcgccgccgggcagaaaccggaggaggacggcgccctcgggagtcgcgtcctgtgcaaggtgtaccgcagcccgcgcaaccccgagccaagcggcatcgaagccgcgacggcgcccgggcagaaggcggaggcagacgacgatgaatcttgcgacgacgaatctagcgacgcgacgttggacgacgatgacagctccaacgcgtcactagcggcggcatcgggacccaagagggaatccgacgaggtggaatccagcgacgcgacggtggcggcacctagtcgccatagcgcgccgaacgacgagatctccggcgggtccgcggtggcgcccggacgcaaggaaaagacggagatcggggaggtctccaccgagacgtccgcggcggtgcgcaagaggagaaaggccgacggcagcagctcccctagcactccggtttctacgacggatatgcactgccctcagtgcggcacccatctcatgctaacactgaacatggcggagtccaaatcggaggcggggctcgcgaaggacgagtcggccaccgccgcgcctgatcaaggcgggacgggtgagtcttcacagaagaatgttcgggttcggttccatcagttcctgtgagatccagggttccttcctgcccagacaaatcctgggaaacagagccatagtttcttgtctgttatttggaagaacgaaataagaagattttagattaagaattcgttagaagtaaccgtgtctattgctgcaacggtgatgtaatcgtgaaaccaagacataaggcgtacgaatttacac

SEQ ID NO: 21671 - DNA, 1658 bp, Zea mays
  Clone ID: LIB3354-069-E9_FLI
ctttgaccgccgcctcccttcccctccgctactgctcctccccaccccactcccccgcaggagcggcggcggcggcggcggcggcgaggtcgtaccccacatcggcgagcggcggcggcaccgccggaggcaaaggcaagatgttcgggcgcgcgccgaagaagagcgacaacaccaagtactacgagatcctcggggtgcccaagtcggcgtcccaggacgatctcaagaaggcctaccgcaaggctgctatcaagaaccaccccgacaagggcggtgaccccgagaagttcaaggagctcgcacaagcctatgaggttttgagtgatccagagaaacgtgagatttatgatcagtatggtgaagatgcccttaaggaaggaatgggcggtggaggatcccatgttgatccatttgacatcttctcatcattttttggaccctcttttggaggaggtggtggaagcagcaggggaagaaggcaaaggaggggagaagatgtagttcacccacttaaagtttctctggaagatctttacaatggcacctcaaagaagctctctctttcgcgcaatgtcatctgctccaagtgcaagggcaagggctcgaagtctggtgcttcaatgaggtgccctggttgccagggctcaggcatgaaagtcactattcgtcagctgggcccttccatgatacagcagatgcagcagccttgcaatgagtgcaaggggactggagagagcatcaatgagaaggaccgctgcccagggtgcaagggtgagaaggtcgttcaagagaagaaggttcttgaggttcatgttgagaaggggatgcaacacaaccagaagatcaccttccctggtgaagctgatgaagcgcctgatactgtcactggagacattgtattcgtcctccagcagaaggatcactccaaattcaaaagaaagggtgaagatctcttctatgagcacaccttgtctctgaccgaagcactatgtgggttccaatttgttcttacacatctggacaacaggcagcttctcatcaaatcagaccctggtgaagttgttaaacctgaccaattcaaggcgattaacgatgaggggatgccaatttaccagaggcctttcatgaaggggaagctgtacatccatttcacggtggagttccccgactcgctggcaccagagcagtgcaaggctctcgagacagtacttccaccaaggccttcatccaagctgacagacatggagatagatgaatgcgaggagacgactatgcatgatgtgaacaacatcgaggaagagatgcgcaggaagcaagctcacgctgcccaggaggcgtacgaggaggacgacgagatgccgggcggagcccagagagtgcagtgcgcgcaacagtaagcagactatcatcaaggcaattgggaggggtggtgcccttaaagcatgggagtgatctctggttttgctgtcgccgagctgggaaataggaagctgaatcgacctcgcaagcggggaatgtatccttttttgctgcaacataaaaaatgctacccaggcatagctgggtaccttttaacttctgtttgtgggatttgctagagtgatggtttcgatatatagggggacttgaatgtctggaatgctacggtataacgc

SEQ ID NO: 21672 - DNA, 713 bp, Zea mays
  Clone ID: LIB3354-069-F11_FLI
cgctacgtccgcgacccactcccacgtggcaacttccgtttcagcccgccgcgcggaggccgctggttggccaggggacaccacgccttccattattagagtaccactactccattagtaccagcgtaccaccaccaccgaaaacgaatcccagaacagtaccgcagcggcagccatggtgctctcgcacgcgagctccggccgggacgacgacgacgcggtggcctccaccttcgcgtcgcgctacgtgcgcgagcgcctgccgcggtaccggatgccggagcggtcgatcccgcgggaggcggcgcagcagatcatcagcgacgagctcatgctggacggcaacccgcgcctgaacctggcgtccttcgtcaccacgtggatggagcccgagtgcgacaagctcatcatggactccatcaacaagaactacgtcgacatggacgagtaccccgtcaccactgagctccagaaccgctgcgtaaacatgatagctcacctgttcaacgcgccgatcaaggaggacgagacagctattggggtcggaacagtgggatcctcggaagcgatcatgcttgcaggtctggcgttcaagaggaaatggcagaacaagaggaaggagcaggggaaaccgtgtgacagacccaacatcgtcaccggtgccaacgttcaggatccaggaaccacaaataatggatgtaaatgttgggttt

SEQ ID NO: 21673 - DNA, 912 bp, Zea mays
  Clone ID: LIB3354-070-A3_FLI
aaaggggaaatcgcagttatcatcggggaatccgaccccaagcatcgaactgctttcgtgccgtcggctcgttcccggcatgtagctgctacttgtcagctttcaaaggtttctgcatctgcatgacgcctaatctacattgttaaaggttttctgatggatggtgataaggtgaaggaatcagctccggattgtgcgtccggtgcagcagagccaaccaagaagcaggataagaggaaacgtgcctatgctgaatttgatgtggtggacaagaaatctgtatctgctgaatggcagcaagaaatggatgcactgtataaatactacaaggaggtttctggtcatcagctgaacccagaggagctttcatgcaccacaaatgactctattatagcatgcttgctggaggagagcagtctttcttgtgccaagttaacagatggaatctacaagaggatgaagctgcaatatggtgtcactgagtcttcagtgcgcacctcagtactcaacattggtaggagatcttcatatgggatttctgctatggatgtcaatggtctggaggatgagtcggattcaagcctttggtgttgggagacagaagatttggcattattacccttgcatctacgtagtagtttgagcattcgacgcacagctcggaaattaatccataaaaggattctggttctttcgggcaagctggctaccaaagatgccagtaatgcttgtagcaaccagaacagccttatggaaaatgctggggaagcgctagatctagatgagattcgctctatcattgagtcaaaacacaagaatgatgatgacattaaaacggaggcacaagatttccaagccatcaggaaagccgtgaagaaacagcaaatgatggtggggcatattcaaactgag

SEQ ID NO: 21674 - DNA, 1631 bp, Zea mays
  Clone ID: LIB3354-070-C2_FLI
gtggggggtgattctctctttcttctcttcctcagccgccaggaaggtggattcttttcgagctcttgcccagctgattataggtagcggccggctattcttcttgtccggctatccgttccaggacttcggattaagaggcgacgagatgatgcgacgctgcgtctcggcgttggcccgccgccgccgtccagatcgcacggttgatactatgaaggcacgattccaatgtttggttaacatttcctcttcaataagggacactgacagccaaaggtgctcaagtacgtgtgctacttcctgtgctaccgatccagatgttttatcgagagaaacatcgtcatcagaaatgcttgttgattcatttgggaggttccacaattacttgaggatctccttgaccgagcgctgtaatctgaggtgccagtactgtatgcctgctgaaggagttgaactaacaccaaagtcagagcttctgtcacatgatgagataattcgaatcgctgacctttttgttacttctggtgtgaataagatccgattaattggtggagaacctaccgtacgaaaagatattgaagatatttgtttgcatctttctagtttgaagggactgaaaactcttgcaatgaccacaaatggaattgttctttcaaagaaactcccaaagttgaaagaatgtggactcaatgctttaaatataagtttagatacactagtacctgcaaagtttgagttcatgacaaggcgtaaagggcactcaaaggtcttggaatcaatagatgctgctgtagaacttgggtatagccctgttaaggtcaactgtgtcatcatgcgtggtataaatgatgatgagatctgcaattttgttgaattgacgagacacaagcccatcaacgttagatttattgagtttatgccatttgatggtaatgtttggaatgtgaagaagctagttccttatgcagagatgttggacaaagtgcggcaaagttataaaggagtagagagacttcaagatcaccccacagacactgcaaagaatttcaggattgatggacatgttggcactatttcatttattacatcaatgacagagcatttttgtgctggctgcaatagattacggttattggctgatggaaacctcaaggtgtgcttatttggcccctcagaggtaagtttgagagaacccatccgtactggtgttgatgacgctggactgaaggagataattggtgccgcggttaaaaggaagaaagctaaacatgccgggatgtttgatattgccaagacagcaaatagacccatgatacatataggtggctgaggtgtgcagaatttcctcatgtcgaatatgagccaataaaatggatttgccaactgctgggttgctgcctggttttacctgaacgaccatgaaaaagttctctgatgcaatggaccaaactctttccgagtggtttaaacattagaggaggaagtggagtgtattggtcactgcagtcatacaatttagatccgtatacttgaacaaatgaacagtgtcacagaaactcactcagtcttcgcgtgccaaggtgttttggttgtgtacttgtatgttgtatgctcataatgtcacgttgtgt

SEQ ID NO: 21675 - DNA, 928 bp, Zea mays
  Clone ID: LIB3354-070-D10_FLI
atataacttgccgccttcgtatcttgttgcactttattttgagaacggacgtccaattacaaaaaaaaaacacaagctgtcaaataaagatgcataataaacaaacagtgggatgctgcattatgcgtggacacgactgacgacacaagctttaggatggatgatgcatgcatgcatcgtacatagagtactatatagaagctaagaaacatgtaacgtgcaaagcaggaagcagcagacacgtgtgtgcaagcagtcatgcacgctaagcttcacgttcacgatcacgggtgaaggcagccaccgccgccaccgagcccactgccaccgccaaggccgccgctgccgcccagacccgatcctgagccgccaccaaggccaaggccgccgccaccgccgagaccaccaaggccgccgagacctgacccgccaccaaggcctgatccgcctccagcaccaccaagcggtccaaaccctccgagtccaccaccgacgacaccgccgacaccaccgccagtcataccgccaatgcctcccgcaacgcctccgatgcccccgaggccggcgccggcgccagcgaaccctccgacgccgccgacgtagcccggcaggaaggtcttctggtcggcgttcacgccgggcgcagctgctctctgaccatgcttctgctggctgtcgttgctgttagtagtagtgccgcctatggccgccaccgtcgccgtcgtcgtggtggtcgtcgttggcatggctctgctggcctcggcgggcgtcagcgccaggatgacaaccaggagcaccaggctgctgcagcacgccacgattccggcggtgttgcgccacccgctaggcataccggatcaataataatgtgccttctcttatctctcgatcggcttttcttttttggtggctagggctcaggtctctc

SEQ ID NO: 21676 - DNA, 938 bp, Zea mays
  Clone ID: LIB3354-070-G9_FLI
ctcttgtgtagtagctgttgaattgcttttaagatgcaattcctgtttcaggttgtgcagcagtttggaatacctcacctctttgatttgccaatacggccaactctttcggcttccggagatactggaattcctgaggttgtggctgatccgcaaggggatgtggctaatacatttcagaatcttggggcatgtgttgttcaacagtgtgctaaaatcaggcaacaagtttctacagcggtgtcctacgatagatccattaaagcaatcagagtgaaagtgccagattcagacgaagagttcttgctgcatccagcaacagttagacggaatgaccgatccgctcaaagcgtggatgaatggacaggggagcagaaggttcagtacagtgacataccagatgacatcgagccagaagagattaggccgatgggaaactatgcagtttctataacttggcctgatggatttagtcagatagcaccttatgaccaattggaaatgctggagcggttggtggaggctccgagtccagcagcagcgtctgcagtggcctcgtcatgatacagcagaaagaatgttcagttagcaaggggcaagaaggccgacttttagctcccagaaaatttatagctctgctacaaattttgaaagaattttacagtactgtagaaccatgctcattgaattttaaaaaaaggcagcagctttcgttcctcttaaaccattgtgcagacccccgttctcactaaaccacaggctagccttgacaataccaaaccataaaagaaaacggttactgttataaagatagttttttttcccagttatatagaaaattgatataaaactagtgacaaacagaaggtgcatgggtggatctaatatgtttgttacatatgaatatagtgaatacaagtattattgataaccattgc

SEQ ID NO: 21677 - DNA, 1242 bp, Zea mays
  Clone ID: LIB3354-071-A5_FLI
agtactcccggtgccatctcctccatctccctattcctcctcagctcctggaccggccatggccgcaccttccggcacgatgcgcgccgtgcagtacgacagatacggcggaggagcacaggggctcaagcatgtggaggtgccgatcccgtcgccgaagaaaggcgaggtgctcatcaggatggaggccaccagcatcaacgccgtcgactggaagttccagaacggcttcgcgcggcccttcatgcccaggaggttccctttcatctctggtttcgacctagcaggagaggtcgtagagttgggtgctggagtgagcagcttcaaaccaggggataaggtgatcgccatcaacttcccgaacggcggagggctcgccgagtacgcggtcgcgtcagcgtctcgtacagccgcaaggccgccggaggtgtcggccgtcgaaggtgtctgcgtgccgatcgccgcagtcaccgcgctccggtcgctgcggacagccggggtcacagtcacactggacgacccggctcgcgcccccgccacgcccaagaacgtgctggtcaccgcggcctccggtgccgtcggccacttcgccgtgcagctcgccaggatgggcggccacaacgtcacggccacctgcggcgcgcgcaacctcggcctggtccggagcctcggcgccgacgaggcgctggactacaagacccccgagggcgccaggctgcggagcccctccggcaggaagtacgacgcggcggtgcactgcgcggcgaaggggctcccgtggtccgtgttcaggcccgtgctcgccgcctcgggcacggtcgtcgacatcacgccagggttcgtggccgtcgtcaccgcgatcctccaggtggcgaccttctccaagaagaggctggtgccgctcatggtgacgcccaagaaggaggagatggagctgctgctgggcatgctgaagcagggtaggctcaagacggtcatagattcccggcacccgctgggcagcgctcacgaaggctgggccaagagcatgagcggccacgccaccggcaaggtcgtcattgagatcggagccgcgcaaccataataatagtgcagcaatatattgattcaaaaaataattatgaattttgtaatttttagatctataatttctatattttttgttcataatgaattatgtatttttatttaaaatttatgaatcatgtattttttttatttttatatgaattatgtattttt

SEQ ID NO: 21678 - DNA, 856 bp, Zea mays
  Clone ID: LIB3354-071-D4_FLI
caccaaatgaggtagggtttccgattgcttccgcggttcaatcaccgcccacgtagaacccctccgctccttccagctcgctctctacctgcaccagcctcgcccgcccttcgctcgccgccgccatggggaggggaaagttcaagggaaagcccaccggccgccgcaacttctccacaccggaggagatcgctgctggtacttcaggtcgccctcgcacctttaagaagaaggaggaagaggaagaggaggaagaagaaagagaagagtcagaggaggaagaatctgaagacgagtctgatgacaaacctaagcataaaggtactgagggtattattcagattgaaaatccaaacttagtaaaagtgaagaatataaaggccaaggaagttgatcttggaaagacaactgaactctcaaggcgtgaaagggaggagcttgagaaacaaaaagctcatgaacgttatatgaaacttcaggagcaaggaaaaacagaacaagcacggaaagatttggaacgtcttgctttaataagacagcaaagggctgatgctgcaaagaaacgcgatgaggagaaagctgccaaggagcagaggaagtcggaagcacggaagtaactgcaatatcatggacgatgagaccacgaaggcatgatctgcgttagttggatatttatttctaatgcatcagttatcttgttataaacctggtccctattctgtatccccataaaatatgcattgacaaaattagtaacagtcttgtgggcgtgtcttcctgtaaacttgagcttgacaaaattagaaagtagtattaaggtcagcttatgcgaaactggctcttttgtctgctgtcc

SEQ ID NO: 21679 - DNA, 1063 bp, Zea mays
  Clone ID: LIB3354-071-E10_FLI
gagagagggatggtgtgagggagggaagggagcaaaggcaaagcagccaacgaccagagagacacggaggctgagagagagagagagagagagatttgggaatcgagaaagcagcgaggaagaagaagatggagcaggaggaagcgtgcacctcgtcgctgcggcagtgcaggatttgccacgacgaggaggacgagcggcgctccgccatggagtcgccctgcgcctgttccggctccctcaagtacgctcacaggggatgcgtgcagaggtggtgcgacgagaagggaagcgccgtctgcgagatttgcctccagaactttgagccgggctacaccgttcctcccaagaaaacccaacctgctgatgtcgcggtgaccatcagagacagcgtgggggtgcccaggccgcagcacgagcctgaagaggaggagcaggagcaggtggacgcggcgttgatcggaggcagcgacccggagtacgccgagtgcgcgcgcgccgccggcaggagcgcgtcctggtgccggtcggtggccgtcacgttcacggtcgtcctgctgctgaggcacctggtcaccgtggtcacggtcggagcggccaaccagttcgccttcggtctcctcacggtatacttgctgcgggcgagcgggatcctgcttccgttctacctcgtcatgaggctcatctccgtgatccagcaggggcagaggcagtaccgcctccggctgctccaggagcagaggaggcacgcgttgaggtcggcccggctgcacggccaggaacaggaacagcatgtcatcctggttcgctgaggaacgagccattcattcaccttggtgtccatacattccattcatccgtcgtacgcgtacaaggttgtaagatgtaccactccatttttttgttcaggcctttacaagcctaaaaaaagcttatatgtaccaccacttcatttgtaaaccctcaaaatttgttgctgagaagatcgacatatcatgtatagatttgaaaaaagaaacaaacaaaaaaaaaaggggaaagagaactggcgcaatgttcgatt

SEQ ID NO: 21680 - DNA, 1169 bp, Zea mays
  Clone ID: LIB3354-071-E11_FLI
cttttcttgatacatgctcatgcatggaccatcaggctggcagtagctggtggtgtccctgaaacatagtctgtggttcgcactgaaggcttcaccatggatcattgatgctcatgaatcgctagccttaaaaatgaaaactgctgggtggtggcatgatgccccccgtctaacggtggggaacacgttttactggcagcatgtgggatgaagctggccacagcagggtatggcgtgtttggtatcgattatgagggccacggcaagtccatgggtgccaggtgctacatccacaagtttgagagcctcgtggccgactgcgacatgttcttcaagtccatctgtgacatggagggatacaggaacaagagccggtttctatacggcgagtccatgggcggagccgtggctctactgctgcacaggaaggatccgaccttctgggacggtgcagttcttgtggcgccaatgtgcaagatatcggagaaagtgaagccgcacccggtggtggtcaccctgctaactcaggtggaggagatcatccccaagtggaagatcgtccccaccaaggacgtcatcgactccgcattcaaggaccccgtcaagcgcgagaagatcaggaagaacacgctcatctaccaggacaagccccggctgaagacggcgctggagcttctcaggaccagcatggatgtggaagacagtctgtcagaggtgaggatgccgttcctcgtcctgcacggcgaggccgacgcggtgaccgaccccgaggtcagccgcgccctctacgagcgcgcggccagcgccgacaagaccatgaagctctacccggggatgtggcacggcctcaccgccggcgagcctgacgacaacgtggagctggtgttctccgacatcgtctcgtggctcgacaagcgcagtcgccactgggaacccgacgagcgggtgagaagggctccgccggagcctgagaacaagcgccgcgtcaccagcagcagcagtcaacggcccggcagcttcctctgcggactaggctgccgctgccggcaacaccagcaacagtgtagtaggatgtagatatggaaaacgcttgctttttcctcctcctttaagttgttgacaaagaactgagaaaagtcatggtctcaacaaagatcttgttccatcct

SEQ ID NO: 21681 - DNA, 840 bp, Zea mays
  Clone ID: LIB3354-071-F10_FLI
ctcctagtcctaacccaccaccaacgcaataatctacagcagcggaggaaagcactacagctcttggtcgagcagtagcaacaatggcgccgccgatgaaggtgtacgggtgggccgtgtcgccgtggatggcgcgcgcgctggtgtgtctggaggaggccggcgccgactacgagatcgtccccatgagcaggtgtggcggcgaccaccgccggccggagcacctcgccaaaaacaatcacgcgccatcgcacggtacgtcctccgcaagctcaagccagagctcctccgcgaaggcgacctcgaggggtcggcgatggtggacgcgtggatggaggtggaagcccaccacatggagccggccctgtggcccatcatccgccacagcatcatcggccagtacgtcggccgcgaccgcgaccaccaggccgtcatcgacgagaacctcgacaggctgaggaaggtgctgccggcgtacgaggcgaggctgtccgtctgcaagtacctggccggggacgtaatcagcgccgccgacctctgccacttcggcttcatgcgctacttcatggccacggagtacgccggcttggtgcacgcgtacccgcacgtcaaggcctggtgggacgccctgctggcgaggccctcggtgcagaaggtcatggcaggcatgccgccggattttgggtacgccagcgggaacataccataggctagagaggtgggcgtccgtcactccagatctgaggtctctgaacctcaacgtttccgataaacatgcatgctttatctactgtttaaaaaccaaacttgattggtgcaggggtattttggttttctctt

SEQ ID NO: 21682 - DNA, 820 bp, Zea mays
  Clone ID: LIB3354-071-G12_FLI
cggcggatgttttcttgcaagagtcacagtttctagtctatggaaatgggaaggacaagcctcctactgggctgatgttcgataagcagcagatcaaggggctgtatttcaaccaaaccccttccaaggtacattgtgttgtaccattatgtaaccagaaccagttgatagacgtactgtactgtgtccacccaacgttatcatgtcaggtctgtattgccagtggactcactaactgagtttgcacacgcctttgaaaatgcaggatatggcactagcagcggtgtccatgaggcctatccctctagccccaatcatggagaagctctccctcaccccggagaactacggctccgtccgtcgctacttcatccaggcactcgacgaccacatgctgtcgccggatgcccaggagaagctggtccgcgagaaccctcccgacggcatcttcaagatcaagggcggcgaccactgccccttcttctcaaagccgcagtccctcaacaagatcctgctggagatcgcgcagatccaagctcctgcggcgctgctcaaggcgagctcccccgaggagaccgccgccgccatggtgacagggccagccaagtcatgactgcatgtatgtagtgtacacgaaaagagaaatgagtaagcacataggttgcaaaagggagggggaggaggtctggggattaactgaagccaagctgtgtcggataataatgtagggaggtcaaagtgtttctttctttcttctgtgatcagatcagatcatatagagaatgagaggtggtcagcagataattgcatttcttttttc

SEQ ID NO: 21683 - DNA, 1070 bp, Zea mays
  Clone ID: LIB3354-071-G9_FLI
caccccccgagctgagcttagctccactccagctccaatcacagtcgtgaccagagcgcgagagctagctagagggccgtgaaaatgccgatcaataggatcgccctggggagccaccaggaggtgtaccacccgggcgccctcaaggcggcgttcgctgagttcatctccaccctcatcttcgtcttcgccggccagggctccggcatggccttcagcaagctgaccggcggcggcccgacgaccccggcgggcctgatcgcggcggcggtggcgcacgcgttcgcgctgttcgtggcggtgtcggtgggcgcgaacatctcgggcgggcacgtgaacccggccgtgaccttcggcgccttcgtgggcggcaacatcaccctgttccgggggctcctgtactgggtggcgcagctgctggggtccaccgtggcgtgcttcctgctccgcttctcgacgggcgggcaggccacgggcaccttcgggctgacgggcgtgtcggtgtgggaggcgctggtgctggagatcgtgatgaccttcgggctggtgtacacggtgtacgccacggcggtggacccgaagaagggcagcctgggcaccatcgcccccatcgccatcggcttcatcgtgggggccaacatcctggtgggcggcgccttcgacggcgcgtccatgaaccccgccgtgtccttcggccccgccctcgtcagctgggagtggggctaccagtgggtgtactgggtcggccccctcatcggcggcggcctcgccggcgtcatctacgagctgctcttcatctcccacacccacgagcagctcccctccaccgactactaaaagccgaagccgaccgacccaggggtgcgcagcgcagcgcagctagcatccagctctctctccccggcccgctcgccgccgtttagtttctctcgtgcacgtgcatgcatcgtagactgtctcaggccgccgctgcgccggcgccgctcgcatcgtttgcttttccttggaccagcagtcgtcgccgtcaggttgagctgcttgtaaccgttaattccggacccgtttgcttc

SEQ ID NO: 21684 - DNA, 886 bp, Zea mays
  Clone ID: LIB3354-072-C5_FLI
tctactcgaccaccgcctcctccacgtcgtcggcgccgtacggcggctacggtggcggcggcgaaggctggggctacgactcgctgaagaacttccgccagatcagccccgccgtccagacccatctcaagctcgtttacctcaccctatgcgtggcgctggcctcgtcggcggtgggcgcgtacctgcacgtcgtctggaacatcggcgggatgctgaccatgctcggctgcgtcgccagcatcgcctggctcttctcggtgcccgtctacgaggagaggaagaggtactggctgctgattgcggctgccctcctggaaggggcgtcggttggacccctcatcaagctcgccgtggaatttgacccaagcatcctggtgacagcgttcgtggggactgccattgcgttcgcgtgcttctcttgcgcggccgtggtggccaagcgcagggagtacctctacctgggcgggctgctctcttctggcctctccatcctgctctggctgcagttcgccgcctccatcttcggccaatccactagcagcttcatgtttgaggtctactttggtctgctcatcttcctgggctacatggtgtacgacacgcaggaggtcatcgagagggcgcaccgcggcgacatggactacatcaagcacgccctcaccctcttcaccgacttcgtggctgtccttgtccgcatccttgtcatcatgctcaagaacgcggctgacaagtcggaggacaagaggaggaagaggaggaggtggtgaaaatctgtgtgcgaacacagcactcaagggaagggaaggaactggtgcgtctgaaatgaagctcccacataactaggtgtatacatatataggagcgaggagttactttggggtgg

SEQ ID NO: 21685 - DNA, 1535 bp, Zea mays
  Clone ID: LIB3354-072-C8_FLI
gctccacacgcgcggaggtagtatagccgggaggggcacagagagaggagcgaacgagaggaaggagcagcggcaactacacgccagagagagggaaggggaggttggccagagagccgagagcagccctgcagtcgagagcatccgactgctagctactagcaatagcataggcagataagctcgggccgggccggggcacgcgcacaatgaggtcgcggcggtggcacagcgtggtcgccgtagcgctggcagcggcggcgtggtggtggtgcgcggcggcgcaggcgcaggcgcaggcgcagctgagccagagctactacgcgtcgacgtgccccgacgtggagacgctggtccgcggcgccgtcacccagaagctgcaggagaccttcaacgcggcgccgggcacgctccgcctcttcttccatgactgcttcgtcaggggctgcgacgcgtccgtgctgctgtcgggccccgacgacgagcacagcgcgggcgccgacaccacgctgtccccggacgcgctcgacctggtcacccgcgccaaggccgccgtggacgccgacccgcgctgcgccaacagggtgtcctgcgccgacatcctcgccctcgccgcccgcgacgtcgtctcccagacgggcgggccgtactaccaggtggagctggggcggctggacggcaaggtaggcacgcgtgccgcggtgaagcacagcctcccgggcgccggcttcgacctggaccagctcaacaagctcttcgccgccaacgggctcacgcagaccgacatgatcgcgctctcaggtgggcacacgatcggggtgacgcactgcgacaagttcgtgcggcggctgtacccgttcaagggcgccgccgccggcccgccgatgaacctctacttcctgcggcagatgcggcggacgtgcccgctgaactacggcccgtcggcgttcgcgatgctggacgccgtgacgccccgcgcgttcgacaacggctactaccggacgctgcagcagatgaagggcctgctggcctccgaccaggtgctcttcgctgaccgccgctcccgcgccaccgtcaaccgcttcgccgccaaccagaccgccttcttcgacgccttcgccaacgccatggccaagctcggccgcgtgggcgtcaagaccgccgccgacggcgaggtccgccgggtatgcaccagggtcaactagccctgcccagctccagatgcaatgcatgcgagccacgtccacgtgcacatgaaatgaagctagctagctgctagcctagctttagctagctcgttattactaggggcgccgggggttgggaaagaatgcttcatgagtcatgtccgtccattcatccatccatccatccatcacacggttcacagtcagtcacagtgtactattgattcgttggtccgccgattcttttctttccttggtgattgttgtgtatgtagcagaagtaataattaaaaaaaccatgtaacaagaagagggatgagctttgagctccacacttgtactgcatcc

SEQ ID NO: 21686 - DNA, 465 bp, Zea mays
  Clone ID: LIB3354-072-D3_FLI
ctccaacccgtccccccccccaattcagcaccagcctttgcgcatcgcgacagcgatatcgggaagaggaaactcgaaagcccggcgagcggtatggcaaccggcgaggagcacgtggcggcgccggcgccggcggtcgaggagacgccggagaagaagcaggccagcacaaccgagctccccgcaccctcaggctggacgaagaagcttgccccaactcgaggtggacgaggtggacgatttgaggttatttttgtttccccaactggtgaggaaattaaaagcaagagacagctgactcagtacctgaaagctcatcctggaggccctgcatcttcagagtttgattggggaaccagtgatactcccagacgctcagcacgcttgagcgagaaggtcaaggcaactgagagcccagagggtgagaagacccctaaacgggcaagatcaagctctaagaggggc

SEQ ID NO: 21687 - DNA, 1413 bp, Zea mays
  Clone ID: LIB3354-072-D6_FLI
ctgcgacccccggcttcaggtccgttccgcaccccgcttcgtccaaccaatcgccgccgcgtctcgtcgcatcgcctccttttcccccgcccgcgcccggacggcggcctcgcctcgccagaagaacccaggctgcagccgaaacccccggtctccgtcatccgaccccgcctcgacggcccagatccacttgccgccgctgccctcgtgctcctcactccctcgcctcctccggggccgcggctccgcggcgaagacagctgcgagcggggcggccatttctaggcggaagcgcgggcggctgggctagcagattgattggtttgagtggttgggtcggctctaggaaacgccccgccgcggcgatggggtgcttccattccacggcgaagcggcaacaccctggctacgaggaccccgtgcacctcgcctcccagaccgccttcagcgttagtgaggttgaggctctattcgagctgttcaagagcataagtggttcggtgattgatgatggcctgatcaacaaggaagaattccagctagcactatttaagaatcagaggaaagaaaatcttttcgccaatcggatatttgaccttttcgatgtcaagaaaaggggtgtcattgattttggtgactttgtccgagctctaaatgtgtttcatccaaatatcccaatggaagaaaaagtcgatttctcgttcaagctatacgatatggatggcacagggtttattgaacgaaaggaggttaagcagatgttaattgctctcctaggagaatcagaaatgaggctatctgatgagatcattgagacaatcctggataagacattttcagatgctgatgcaaatcaggatggaaaaatagatagaacagagtgggagaattttgtcacaagaaatccttccttgatgaagataatgactctgccatacctcaaggacataacaacaacattccctagctttgtgtttaactcggaagtcgacgatctcgtcacgtgaccaccactctctccgatgtatagttaataaggagttttttctcccctcaaccgcaaaaaggagaacctgtcgagggttacgagtggagatttccagctttctctggcaatgaatggagggtgcgtcaaattggctgccacaaatgtacgagacgacctgtagttttcactcagggcttgtttgggagcaagtggaatgaagggtattgataggactataatcccttgctatctaaaattgaatagtggaggattatatgccctccaattcactccattacctttactcccaaacaagccctcaatggtaatgatgatgcttttgtgttggtgatgattgagactgagttagtatgcagatgtgaacagtttccatttttaccagtgggaaggctgttttgtttgtg

SEQ ID NO: 21688 - DNA, 1043 bp, Zea mays
  Clone ID: LIB3354-072-F6_FLI
gcagctgctcgctcgcgattgcgattcccactcagccctccaggcacgaaacctaacccacccgcccggggatcccaagcggcggcggcggcggccatggagccctcccccgtcggcgacggcggctcggcggagcggtggcgcgcggaggcgtcgcgggcgttccagcactacctggaccgcgcggcgccgcacacggcggggcggtgggcgggcacgctcgtggccgcggcggtgtacgcgctccgggtctactacgtgcgcggcttctacgtcgtcacttacgggctgggcatctatctgctcaacctcctcatcggcttcctctcccccatggtcgacccggagctcgaggcgctcgaggccgggcccgggctccccacccgcggctccgaagagttcaagcccttcgtccgccgcctccccgagttcaagttctggtatgccataacaaaagccttttgcattgctttcgtcatgaccttcttctctgtattcgatgttcctgtcttctggccaatacttctctgttattggattgtgctctttgtcctgacaatgaagcgacaaattatgcatatggtcaagtacaagtatgtcccattcagctttggaaagcagaggtatggcggaaagaaacgccctggagccagtgcatcaaaagagtaaagaccggagggtcttgtacctcaaagagcaaatgcctgtgttatctgtgaggcattttgctggcatcatggtattttgagtaccagctactgatagtgaatgcacaccatattcactagtggagtctgcagagaagctaaccagacttttgcattggttaatgattcctgtttcacaagtcggtagtttatgtacaatgacatggaacatagctagtaaatcagattctcagttcctcttgtgctgtgcttttgtcgacaagttgtggacctgttgaactgttgcaaatgcaaagcacgcgaagaccgagaaaacaaagtcgaattgaggctgtgaaaaaagttttcttttattattattattattatctctcc

SEQ ID NO: 21689 - DNA, 1412 bp, Zea mays
  Clone ID: LIB3354-073-C9_FLI
tggcccatcgagtatagcagacgaagttgtagttgctctcctccgagaaccctcgccgccgccacccaccggagctccggtttgcagttcttcgctgaaggccatggatcacgacagattgaatttgccgagcacgtcggctatttcgctggaggtgatgggccaccagctacatatttcacaggatccaaactccaagcaccatgggaccacggtctgggatgcatcaatggtgtttgtcaagtttttggaaaagaatagcagaaaaggtcgcttttgtccgtccaaactaaaaggaaagagagtgattgaattgggagctggctgcggtctagctgggttcggaatggccttgttgggtggtgatgttacaacaactgaccaagccgaggtgctcccactgcttatgagaaatgttgaacggaacagatcttggatctcacaatcgaaccccgactcagattccgttggctcaattacagttgcagaattggactgggggaacaaagaacatatcaaggccgttgaacctccatttgattacattgtaggaactgacgttgtttattcggagcatctgttgcaacctctaatggagacgattactgcattatctggtcctaaaacaaaaatattgctagggtacgagatccgttcgacaactgtccatgagaagatgatggaaatgtggaaaagcaatttcattgtgaaaacggtctctagatcgaagatggatgtgaaatatcagcatcctagcatacatctctacatgatggacctgaaggcaccattgatccctgaggttgaggctgccgacaatgggaactacgaggaagaggttgaggttgctgtgaatcaagaggaagacgaagatcctggagtgaagagcgaatcttgttccggctcgtcaccagaggctaagagcggcagtctggatgattgggaaatcagaaggtgtggggctatggctgcaaggcttctgaaggatgtgaaactgtaaacatgaatcctagagatcgttttccccccttgtcagagaactctagagctcctttatgttgttgtccttgatagttgttgtactgcccatggcagtctatgttattgtatcttattgcatcagtggatattgataccattccaaaagaaaaaggaagtttctctatctctctctctgatagatgtcaggacaacacggctaatgagtcagataagaggggctcttgcttgcaccggcgcctggcggtagaaacaaggtaaatgatggggtgaaaaacaagggcagctgtggttggtttgtgtttatgacaggttgttcgttttgtattaaagccaattatttagactgctgcagctacaatttatatggacaaaatactgtaaaagaattatagccaaacgaacagttaagg

SEQ ID NO: 21690 - DNA, 762 bp, Zea mays
  Clone ID: LIB3354-074-A11_FLI
gttgtctctctctctctctctgtctctctctctctctcgtccccctctcgctctcagacgaccggtgggccgccgccgccgacgccgccctaagccaggtgctgaggctcttgttggtctcttcgccagcgaggagcacccagcaggacaaggcaacaggctgttggaatatggaccaacaaggcatgcatgaccatgaaggggtccacgttgttggatttgaagtcccgccttcaccggattccagctacgacaaccctgttcctgggaatgaagacgaaggccgggagcccccactgatgccacctcatctgcagcacacgctgctgagcttcccaccaagccaagacgagtcgagcccgctgccccagccccagaccgtggttctgaaccacctttacatcgagaaagagaacacgaggtccatggttgctctggggatcacgcaccggttcaaggctaagttcgtgaccgtcgtgctttacaagccagtgctgaggcggtagggtgtggtcgtgtgcctgcgctcctgctccctcttctcgcgcaggatcggtaatggtaatgccgtaatggtaatggtaattgaacaccccttgggttgcagcccaccccttccagttgttgttattgttgttgtagtggtgcagaaacgggcgagaacgtcattttcgaatgattattagccttgttgtacctaatttggctgctggtggtggcagtgatggtttggttggagtagtttgcttgtgatttggcacc

SEQ ID NO: 21691 - DNA, 1545 bp, Zea mays
  Clone ID: LIB3354-074-A5_FLI
ggcggagggtgggcccggcggggccgtcgaggagggcgtcggggagagctcgtccccgccgcgcgaggacgccgtcccagcgcccgccggctccggcgggagcgggggcagcggaggcgcccgcgaaatctgtgcccaggtgctcgaccgcctcgtcgccgacggctacgcggaggcgtccgaccccgagttccgcgacaggctcgccgcccatttcggccggctcccgcacaggcagggcacaccatatactcacattcatgagatagttttctccacaatcgataagccaaagctccttagtcagctatctgcattgctatctgacattggattgaacatcagagaagcacatgttttctctacccatgatggctattctcttgatgtttttgttgttgatggctggcctgttcaggatgctgatggtttgcacaaagcactggaagcatccattctaagaaatgagggttcatggtctggttcatctcattcctcagccgctgaaagaacactgcccttccaagttaaaggtggtgagtgggaaatcgacaaacgacttctgaagatgggagggatggttgcttctggttcttgtggggacttgtatcacgggacttaccttggtgaggatgtagctgttaaagttataagagctgagcatttgaataagaatgtttggaacgagtttacgcaagaagtatatatactaagagaagttcaacataaaaatgttgtgcgattcattggtgcatgcacaaaaccaccccaattttgcataattacagaatacatgtctggaggaagcctatatgactttgtgcacaagcagcataatgttctaaacctcaggactttattaaagtttgcagttgatgtatgccgagggatgtgctacttgcatgaaaggggtatcatccatagagacttgaagactgcaaaccttctaatggacaaagatcatgttgtgaaagtggctgattttggtgtagctcggttccaggatcaaggaggtgtcatgacagctgaaactggaacatacagatggatggcacctgaggttataaaccatcaaccctatgataacaaagcagatgttttcagctttgctattgtcatctgggagctgataacgtctaagatcccgtatgaaagcatgacccctctccaagcggctgtaggtgtgagacagggattgcgcccaggacttccaaagaagacgcatccaaaggtattggacttgatgcagagatgctgggaagcagacccatctgcccggcctgctttcccagacattttagccgaactggaggatcttttggcacaggttcagggaacaccgggaaagacggcccatgctccatcaaataactcgaacacgaaagattaacccccatgcacacatacctgacgtttttctgaattcagtgatctgccatgtttaggattcgagtcgctaattacgaggaatgtagcatatcgatttttttccctggatggttttgcttgtgtacatttgaacaatcttcttggggcctatttttt

SEQ ID NO: 21692 - DNA, 1004 bp, Zea mays
  Clone ID: LIB3354-074-A8_FLI
ccgaaacctcagacactctacatatatcctctgcgcgtgtatctcgtcgtacagagccgaaagctggagcttccaatggcgggaaacaacgacctgaaggtgctcggcgtgtggacgagcccgttcgtgatccgggtccgcatcgtgctcaacctgaagggcctggcgtacgagtacgtggaggaggacctcagcaacaagagcgcgctcctcctggggtccaacccggtgcacaagagcgtgccggtgctcctccacgccgggcgcgccataaacgagtcccaggtcatcctgcagtacatcgacgaggtgtgggcggggacggggccggacgtgctgccggccgacccctacgagcgcgcggtggcgcggttctggggcgcgtacatcgacgacaaggtggagtcggcgtggctggggatgctgttcaggtgcgcgaacgaggaggagagggcggcggcggtggcgcgcgcccgcgaggcgctcgacgcgctggagggcgcgttccgggactgctccagggggaggcccttcttcggcggcgacggcatcgggttcgtggacgccgtgctcggcgggtacctcggctggttcggggccgtcggcaggatcatcgggcgcaggctcatcgacccggcccggacgccgctgctggccgcgtgggaggaccggttccgcgccgccgacgtggccaagggcgtcgtgcccgacgacctcgacaggatgctcgcgttcctgcagaccctgcgcgctatgaactacgccaagtgagagtgtttcgtcgcatgaacgtgtgccgtgccgtgcacgacctatgatcagttcatgccgatacgtctatcactcagttttgcttcttccgtcaataatcggtgtgctatgtacaacagctgcctataattttgcttctttcttctactacctccgtttttttatttgatagttcaactttataataacaaatgtcaaattaaaaaaaatatcggaaggagtatttttttaat

SEQ ID NO: 21693 - DNA, 1531 bp, Zea mays
  Clone ID: LIB3354-074-B8_FLI
ctcccgtttcgtttctccccctcgctccccagccgcatctcgagcgcgctctcggcggccgtccacgtctcggtcccacgcgctgctcgcttgctcgccggcggggcgcgagggcggtggcctaggtcgtacccagcgaagcgcggcgtgccacggggtgggggttggctcgggaccatcgagcctgtccggaattttttctggcgcgtgatttgccgctgagaaagcatcggaaaagggaacggggatttactctcagtagccgcgagctacccaccgtcccctggtcgattcagtgcaaatcctccaggtttctgggtcttaatggcttcctcagatatctctgttgatattcgtcctgacataaactcatttgatcattttttaagcatgcgatacattgcaacagatagaccctggctgaaattatatggaataagagttcagcctgtgccaccattcagcagtttgagctacaaacctgatccagcgctcattcatcattgcctacctgatgaactaatgctcgagatttttacaagaatgagcccatatactttagggagggctgcatgtgtctgccgcaagtggaaatatactgcacgcaatcctactttgtggcgtgctgcatgcttgaaaacttggcaggtctctatgtaagcaggaacacatacattcatactggagttacagaatggcaattcaagaaaactgtcaatgtggtttgctactaccgttacttaagatttttcccgagcgggaagtttctctataagatctctccagataaagttaaagacgctgttaagtgcatgcatttccgggcatcaaaggctgattgtgtatttaaaggtgactacgtgctgtcagaggatggccagatagaaatggctctcctgtacccagggcatcggtacacgcttgtcaggatgcaccttaggcttaggggcaccacagttggtgcaaataacaggttggatgtactgaagattctaaccaccggagtgaatgcaactgagctgcaaaactggaaaggaagcatactagaactcgttgagggctgggaggaggatgagacgcatgacccggatgtgcctgccgtttcccacagcaggggctgatacttcggtgttaaacctccccgtggagaagatggactactacgtccctgggtgagctcttcatgacgacgatggccattggagaatgagatgatgggtggccatgttacaggttaaaatgatgatggccaacgatctccttccctcgcagatcccttgctagagcaaatgtgtaaatacagtgttgttttgtttacacttttcggttggtcgcatgctgttgtatgacattatgtttgttgatacctggaaacaggttttattattgttggtgtttgaaaatggtgtgggaggaaactcactatcaaaaaaagtagagctaccctcctgaagtaatgtgggtctgtattatagaaacaagcagtctatcgttgcgaactttttagtctgtatgtattttcgtattgtac

SEQ ID NO: 21694 - DNA, 858 bp, Zea mays
  Clone ID: LIB3354-074-G1_FLI
gaggctgaaacagaagactagtatacagatccgtgtaggaaaggaaaaaaaataaaactagctttgaacacgctgaaactgaaaacgacctggacactgaatacaaacatcacccaacgccggcgggctctcctcacagctcgtcctccgaccggtacttgtccgcgtccgcccgccggtgcttccccttgccgtcgacggcggtgacgtcgggcccggcgaccctctccttcacctcctccagcctctccttggccgtgtccgccgtctcccgcaccttctccttcaccctctcatacccttcgccggccttctccttggccgcctccaccgtctcccacgccgcgtccttggccgatgccgtcttctccgtggccttccccttggccgcctccttggactcctgcgccttcttgccggccttgtccgccttctcccacgccgcgtccttggccgcctcggccttctccttcgctgcggccgtcgtctcccacgccgcgtccttggccgccgcggccttctccgccgccgcgtccgtggtctggctcagcgtctcctgcgccttgccggccgcgtccttggcgctctcgtacccctgcccggctttctctcgggccttctcctcgaccttggccttgcccttcttcgaccgctcgtgcgcctcggcacccctctcgctcgccgcctcggcggcctccttggtcttctgcttgccgtactccgccttgctggacgcttcgccggccgcgcccttcaccgtgtccttggcctggtccttggcttgcccggccttgttcgacgcgccggccgcggcatctcccgccgtctccttggcgtaccccgccttcttccctatct

SEQ ID NO: 21695 - DNA, 823 bp, Zea mays
  Clone ID: LIB3354-075-C4_FLI
aacctccaaccctagccgcgatccgacaacgcctccatccctagccgactgctgcaagcttcagagctcaagagtcagggcgccatggcgacagagacggagaccttcgcctttcaggctgagatcaaccagctgctctcactcatcatcaacaccttctattccaacaaggagatcttcctccgggagctcatttccaactcttccgatgcgttggacaaaatcaggttcgagagcctcactgacaagagcaagctcgatgcgcagccggagctgttcatccacattgtaccagacaaggcttcgaacacgctctccatcatcgacagcggcatcggcatgaccaagtccgaccttgtcaacaacctcggtaccatcgccaggtccgggaccaaggagttcatggaagcccttgctgctggcgctgatgtgtctatgattgggcagttcggtgtcggtttctactctgcctacctcgtcgccgagagggtcgtcgtgaccaccaagcataacgatgacgagcagtacgtgtgggaatcccaggcgggcgggtcgttcactgttactcgtgacacgtctggggagcagcttggcaggggtactaagattacacttttcctcaaggaagatcagttagaataccttgaggagcgtcgcctcaaggatttggtcaagaagcactctgagttcatcagctaccccatctccctgtggaccgaaaagacaacggagaaggagatttctgatgatgaagatgaggaagagaagaaagacgctgaggagggaaaggttgaggatgttgacgaggagaaggaagagaaag

SEQ ID NO: 21696 - DNA, 1268 bp, Zea mays
  Clone ID: LIB3354-075-C5_FLI
cttcaccgcccccacccaaaatcgtctcgatggaaccgctgcggcgcgtgctgcgcctccgactcggacggcctctcgctataaaccccgcccactgaatacggccgttccatttttgactctattccccgcttcccgattcaagtcagcggtttttagggttcgagatctcggcatcgtgtcgcggaagccatggcgacaagcatgcttagtaccgtgaaggtgagcaatgtatcactgaaagcagcacaacgtgatataaaggaattcttttccttttctggtgacattgtgcatgttgaaatgcagagtttcgatgagctttctcaagttgcctacattacttttaaagacaaacaaggagcagagacggcaatgcttctcacgggggccaccatagttgatatggctgtaatcgtcacaccagcaaatgattatgagctaccatcttctgttttagctgctcttgagcccaaagacacaaaaccttctgcccttcaaaaggccgaggacattgttgggaccatgctggcaaagggatttatcctcggtagggatgcactggacaaagcgaaagctttggatgagaagcatcagctgacgtcgactgccacagctagagtatcttccttcgacaagagaatcggtctaagtgagaagatcagtgttggcacttcagttgtaaacgataaagtgaaggaaatggatcagaaataccaagtctctgagaagacaaagtcagcactggcagctgctgaacatagtgtctcgactgctggatctgctatcatgaagaacaggtatgtgctaaccggagctgcatgggtaactggtgctttcagcaaggtcaccagtgcagccaacgaggccggtgcaaggctaaggaaaaaatagcagtcgagcaggagcacaagaatgctgagggtggacctgcacaagcgaacatctcagagacccatgaagcgcacaggggtttggacggcggattctcaaggctacatgactctgaaacccctgaagatatccccatctctactgcgagtgtcccagctgttacggatgaggagcccagcaaggcttctccaccagctggtgttcctgaaaagccagaagctgcgcacgaattggtactataattgatgcggttttgcttcatacatgcatgtaaatagacatgaaatgggatagccctggaactcattctgtggtcttgtggttggcatcttcagattgaaaacctctttgaaggttgaaagttattgggatct

SEQ ID NO: 21697 - DNA, 1619 bp, Zea mays
  Clone ID: LIB3354-075-E8_FLI
ccagcctgacgaaggaattgaggacgctcgagctcgagctacgtcaggatccaacaccaccatggttacgggaaagaagaggacgttcgtgctctacccgtcgctgggcgtgggccacctgatcccgatggtggagctggccaagcacctcttgcgccacggccacggcgcgctcatcgccgtggtcaacccgcccgacaccgacgccgtgtcggccgccgcggtggagcgcctcgcggcggccaacccggccatcgcgttccgcctcctgccggtcccggccagcccggacgccggcgcggactgggtgaagcgcgacctggacacgctccggctcgccaaccccgtgctccgggacttcctgctccggtcccagcccgcagccgacgccgacgcgctcatcctcgacatgttctgcgtcgacgcgctcgacgtcgcggcggagctcggcgtcccggcctacttcttcttcgcctccgcggcgggggacctcgccatgttcctcaacctgccgtacctctaccccaccctgccgtcgttcagggacatgggcgaggcgccggtgcgctgccccggcatgccgccggtccgggcgatggacatgccgctgacggtgcaggacagggacagcgaccggaccaaggtccggatgtaccagttccgccgcatcccggaggggaggggcgtgctggtcaacagcttcgcctggctggagcccagggcactgagagcgctcggcgacggcgtctgcgtgcccggccgcccgacgccgagggtcttctgcgtcgggccactggtcaacgacggcagcagcacggcggggggcggggggaggcacgagtgcctggcgtggctggacgcgcagcctaagcggagcgtcgtgttcctctgcttcggcagcaagggctccttccccgccgcgcagttacaggagatcgcccacgggctggagagctccggccaccggttcctgtgggccgtgaggagcccgccggaagaaccggacacggacctggggaagctgcttcccgaagggttcctggacaggaacagagacagaggcatggtggtgaaggactgggtgccacaggcagaggtggtgcggcacgaggcggtccgcgcgttcgtcacgcactgcggctggaactccacgctcgaggccatcatgtctggcctgcccatgatatgctggccgctgtacgcggagcaggggctcaacaaggtgttcatggtggaggagtggaggatcggggtggagctgcgcgggtacgaaaagttcgtcaaggcggaggagctggaagcgaaggtcagactggtgatggaggctgaggaagggaggatcctccgggagaggctcgcggtggcgagggagaaggcgttgggggctactaaggaaggcgggtcttctgaagtggcattcgcggagttctttggagatttggacaagagcagctctccgtcggtaaacggagaatgcgattgaattgatcactggtgtgctggtgtggcagatggactgcgaacgtatatatactttaggattcaatatcacttagtattttgacagtacgagactaaaatattgcatctgtggtatgggaataaaattggattcaagc

SEQ ID NO: 21698 - DNA, 811 bp, Zea mays
  Clone ID: LIB3354-075-G7_FLI
tcccgtcgtcatcctcagccatgtccgggcgcgaggtccgcgagtacaccaatctcagcgaccccaaagacaggaagtttggtaaagggaaggataagatcgacgatgaggacatcaccttccagcgcatggttgcaaagggattttggttctctactcggtggttgataccaacagatgcaagaggttgctggtgataggggaggctaccttcacggacgaggagcattggacagcgatgatttgctttacctgaaagagcaaatggaagctgaggaagatgcagagcgccttcttcgtcatactgagaagcgggcatttgctgcttttaagaaagcagcaattttagctgattctacacctgctgtccctgtggctcttcgtgttgaacctaaacctaaaagtgatataaggcaacaagatcttttgaagaacattgttgggatcaaaccaaagcgaccaaaagttagcagcccttcacagccaccagatagcaataagcctaaacatacggaagaagaccttgtcagcgagttgtcgtcatcacggaatccgttgggaccatctcatgggactgcgaatcctgaccacacagcgccaaggttagatgaacgaacagaggtgaagcaacagaacagagctggaagtttgcttggtttagcttatgagagttcggatgaagaatagttgatcatgcgattccaatgggaactggactatttcttgtcagatgtctgcattccaaacgacaaaatgtagattgtatattaggtttttttaatggactattattaggttgtgtttttgaaag

SEQ ID NO: 21699 - DNA, 1286 bp, Zea mays
  Clone ID: LIB3354-076-A11_FLI
ggctcccccgtcgtcctcgccgggcggctaggtcagagccgggagaggcgggggccggcggcgctaggctaggctaggctaggcagcggcgtacgtgcgtggccgccgcgcgatcggcatgggcgacggcgaggcggcggtgccgagcaggttccgcacggtctgcgtcttctgcggcagcaacgccggccgccgcaaggtgtacgccgacgccgccctcgagctcggccacgagctggtgcggaggggcatcaacctcgtctatggcggcggcagcatcggtctgatgggcgtgattgctcggacggttcgtcacggcggctgccatgtcctcggggtgattcctaaagcgctcatgcctattgagatatcaggtgaaagcgtgggagaggtgagggtcgtggacgacatgcaccagaggaaagccgagatggctcgtcagtcccaagccttcatcgctctcccaggtgccagaccagaccagacgtcccctgctaaaacataaccatcatcgaccgaccgcgctggcaataattcagagccccccactccaacttgcgtttgcttacgtacggctacggcctgttggtctctctgctgccaggggggtacgggacgatggaggagctgctggagatgatcacctggtgccagctcgggatccatgacaaaccagttgggttgctgaacgtggacggctactacgaccccctgctcgccctgttcgagaaaggcgccgccgagggtttcatcagcaccgactgcagccagatattcgtctcggcgccaaccgcgagcgagctgctcacaaagatggaggtggcgagctagctagctagtacatgtacatcttcgatatacatacgctttttttgttcacgtacgctagctgttgtggctctttgcctgtgtccagcaatacacgcgggtgcaccaggaggtagccccagcgacgagctgggagatctcggagctcggctacggcagaggaggagacgccggcgccgccacgccgccagcagcagcagcaggaggagcagaagagggaaaaggcggctcgtagcacccacatccatctcctgaagcgttaccttcctccacctactgcttgctgatgtgatgacgcgtctgttacggtttcctggcaaatttgtttcgtcaaagtcgacctctccaaagtccaaaacccggttgaaccaggtgccgggtcgggacgtactggggagacgacgatgatatctctgtgttgggtgcttggattgtgtaagcttgctgctgctggtact

SEQ ID NO: 21700 - DNA, 1118 bp, Zea mays
  Clone ID: LIB3354-076-A9_FLI
gatccttgttctccaaccataagatataatgctgctcttcgacactttatatctcttgataggttctaacaaattttgtgtgccattgtttgtactacagagctgtattttgacagaggcaacttctacgacttcacttcaatagtgcgtgaattagatgttcctggtgaaatatatgaaagaaagacttatccatttgagttttctactgttgaaatgccatatgagtcatataatgggacaaatgtcagattgaggtacatactgaaagtaacaattggcagaaattatgttggcagcattgtggaatcgcgggacttctgtgtaagaaactactctctagttcccacaatcaacaacagcatcaagatggaagttggcattgaagattgcttgcatattgaatttgagtacagcaaaagcaagtatcatctcaaagatgtcatcataggaaagatatattttcttctggtcagaataaagataaagaacatggagcttgagattcgtcggcgtgaatctacagggtctggtcctaacacatacgttgagactgagacactagcgaaatttgagcttatggatggcgccccagttagaggagaatcgattccggtgagactattcttgacgccgtatgagcttaccccaactcatcgcaacataaacaacaagtttagtgtcaaatactacctaaacctagtcattgttgacgaggaagaccggaggtatttcaagcaacatgagatcacaatgtatcgccttctagaaaccccacaatcttcataggctcctttccttgctttctatgagttggaaccagagctagaggcattttggtttaaccttgcacgaggacgccaaagttggtggccttacttttggtcccgccttgtacataactctcccgagggagcaatgcagttcttaggtaagagacataaaaatgcagttctaccatatggtgttgctttgttactgcctttgtttgaatctactcgggataaagtcatggaaatgtttgtatcaacgtgccttcaccttgtttctttcttgtccttgctggacttgtaaagctttggatgattctccatgtgtatgatgatgatatttgcgtc

SEQ ID NO: 21701 - DNA, 866 bp, Zea mays
  Clone ID: LIB3354-076-E2_FLI
ggattattgtctgatgacaatgttttatgcataagtttcatttgaagcgattgtatgcatggtttgattacagggattctgtagatttgcatgcactcctcaatcatgcatactatgcaaagaatcaggagcatcgtgctgatcacttagggtttcacaaagccttatgtgttcttatgggttggaattattccgtagcccctgttcacaaaaccgcttaccaagcattatcaactgtcgacgctgaagccaatcaaggagaccttatcttatggccaccaacagttataattgagaacacatacaagtcaaagaatgatggagaaaaggatgtcatgagtgataaagaggtggagagcaagcttagagaaatgggctttgccggtgtcaatgtgcagccgctccctgggaaggacgggcagaggtcggtgcaagctaagttctccgccagcctcgatggtctgaacaacgcgtcacggctcgccgagttgttcgagcgccaaggccacgggcgagcagcctgggctcgcgtccggagcgccgtccccacaggcggtgggggcgataacaaccccatgctggtcaaggtggatggcaagggagagcggacatgggtcctctacggttaccttgccacggcatgggacttgaatgtcctggaccctgagtcgaagcagaacgccactgtgaagagcaggaaggaactggatttagattaggacccacctgaatacctgatcctgctagagttgtgcatgttacctgacgagttatgaatccatggacagtgtgattcgagtgtttgtgttcacggcacagcatttaagttcgagaagaaattctttgctgaggaatcagcttcgtgg

SEQ ID NO: 21702 - DNA, 1125 bp, Zea mays
  Clone ID: LIB3354-077-A12_FLI
cttcctctcccttctcttctcttcttcacttcacagcacgatcgagccagttgcaatcacacagacgatgccgaccatcatcgtctcggtggacctggaatgcagccgctgccgcgccaagatccagagggtgctcaacaggatccaaggtctgttcgcgcttgcttgctactcctctctgttgttcgctcttccctttccgcttgtacaggtaggtctcgagacggttcgcgttgatcgcaactgataagtttcctgggacgacggacggacgcctcggcttgcagagaagggcgagttctgcatcgatgacatcgacttcgacgagaagaacaacaaggtgaaggtcacggggcccttcgacccggacaagctcgccgacaagctgtgctgcaaggcgtgcaagatcatcaagcagatcgagatcgtcgagcccccgcccccgccgccgcccaagcccaaggaggagccgaagaaggaggagcaagccccgccgccgccggagaagaaggaggaggccgccccgcccccgccggcgaaggtggagccgcccaaggaggagccacccaaggagaagcccccgccacccaaggaggagccgcccaaggagaagccacccccgcccaaggaggagaagcccgccccggcaccgcccaaggaggagaagcccgccccgccgccgcccaaggtggtggaggtcccctacccgtggccgtacccgtacccgtaccctgcgtggccgtccgactgctgctgccaccacggccacggcgggtgccactgctgctcctgcggcaaggcccccgagccggccccggcccccgccccggccccacccccgccgcagtacttcccgcagtacatgccccagccgtacccctgcaacccctgcggcggcggctaccggatcgtctgcgaggaggacccctcctacgcctgcgccatcatgtgattcgtttattatcaatatcatcccttgatgagtgtaccgtccgtgtgcgtaccatggccttaattaccattatacccaaccccaccctaaaaaaaaccccagtacgtcgtctcatcatcattccgtacctcctcctgtataatcgccgtacagattcatcatatatatactct

SEQ ID NO: 21703 - DNA, 1099 bp, Zea mays
  Clone ID: LIB3354-077-C9_FLI
gacgaaaaggcccaacaaccccccgacccgtcacctgacccagccgatcgagaatacccggaaggccggaacccacctgctgcgcacctgcaagcctcgagtggagctcttccacggccgcggtggagatggcggcgaatctggaggacgtgccgtcactggatctgatgcacgagctgctccgccgcatgaagtgcagctccaagcccgacaagcgcctcatcctcatcggtccacctggctctggaaagggaactcagtctcctattatcaaggatgaatattgcttgtgccatttagccactggtgacatgctgagggctgctgtggcggccaagacacctctaggtatcaaagctaaagaagctatgaataagggagagcttgtttcagatgatttggttgtgggcattattgatgaagctatgaagaaaccctcatgccagaaaggtttcattcttgatggctttcctagaactgtgactcaagcacagaagcttgatgagatgttggcaaagcaaggtgccaatgttgacaaagtcctgaactttgcaattgatgatgctgtattggaagaacggattactggtcgttggatccactcagccagtggtaggacttaccactcaaaatttgcacctccaaagtctccaggagttgatgatgtaactggagagccattgattcaaaggagagatgacaccgctgaggtcttgaagtcaaggcttgaagctttccacagacaaaccgaacctgtgattgattattactccaagaagggcttagtggtgaacctgcctgcagagaaaccaccgaaggaagtgactgctgaggtgcagaaagccctctcgtgatgaaatgtccactcttgaggttaaacatgacatctaccaaaacccctttgtttgggtttcttcaaaatttgcactaggccaacatcatgatgttttttattttcagtatccttattgtgcggatgcaccattttttgttatcacacctttcacaagctcggcaattgtctgaataatttctgtgtctaatgatggaactgtttttcagtaacaaactgatatgattacaacaattcatctttggg

SEQ ID NO: 21704 - DNA, 2043 bp, Zea mays
  Clone ID: LIB3354-077-D1_FLI
ctctctctctctctctctccatagtccatactacaaagcaggaaaaaacacacacacacaaaagaaaggctcacaatacccacctccatttagctactactactccctcgctgtcttccccaaccaacaaatcgacctagctaggcacaagagcgctagacgccgcagcgcagcacgcaccacccaccgagcggcggcggaggcagggcaatccgcagggagcagaggccgcgcgcgcaggcatgggcgcgccggtgcacggcgccctcgccttgttcctcctgctcctggtgggggcaggggcggcgcccgaggagacggcgccgcaggaacccacattgccagccaccggctccggcgctaccggcgcagcggcggtcggagtcaactccaactccgtgctggtggcgctgctggattcgcactacacggagctggcggaactggtggagaaggcgctgctcctgcagacgctggaggacgccgtcgggaagcacaacgtcaccatcttcgcgccgcggaacgaggcgctggagcgggacctggacccggagttcaagcgcttcctgctggagccgcgcaacctcaggtcgctgcaggcgctgctgctctaccacgtcctcccctcgcgcctgccctccgactcctggcccgcggcgtcccaccccacgctgtccggcgaggaggtcgagctcggcgccggcatgcgcgtcggccacgccgccgtcacgcgcccggacgccgtgctcaggcccgacggggtcatccacggcatcgagcgcctcctcgtgccgcgctccgtgcaggaggacttcaaccgccgccgcagcctcgcggcgatctcggccgtgctgcccacgggcgcgcccgaggtggaccccaggacgcaccgcctcaagaagcccgcgccgccggtggcccccggcgcgccccccgtgctcccggtctgggacgccatggcgcccggcccctccatcgcccccgcgccggcgcctggcccgggctccgggaagcaccacttcgacggccacagccaggtcaaggacttcatccagacgctgctcctctacggcggctacaacgagctcgccgacatcctcgtcaacctcacctccctcgccaccgagatgggccgcctcgtctccgagggctacgtcctcaccgtgctcgcccccaacgacgaggccatggcgcgcctcaccacggaccagctcagcgagcccggctcgcccgagaacatcctctactaccacatgatccccgagtaccagaccgaggagtccatgtacaacgccgtgcgccgcttcggcaaggtgcgctacgacacgctgcgcctgccgcacaaggtcgtggcgcgggaggccgacggctccgtcaagttcggccagggcgagggctccgcctacctcttcgacccggacatctacaccgacgggaggatctccgtgcagggcatcgacgccgtgctgttcgcgccggacgacaccaaggccacgcagacagccgaccctaacaggaagcctcccgccatcgtcacccacaagaagaagatcaagctccggcgaggcaagttgttagaggcgacgtgccagatggccgggctcttcggtcagcgatcgcgattcgcgagctgccagtagacggagaaaggatctgttgatctccacgacaccgaaagacgaacgaacgaacgaactgatgggctgccgcaggaggagggggagccgtccacattattgcttgtatttttttttccactcttttgtttattgttgagaataataatgaatcaggtgggggatgtaaactctgtgggttgttgttggtgtgtcgtccagagggagaaaaaaaaggagaaaaagaaaggcagccaaaaaaaaattgtccatacatgaatgaagaagcccaggatcgttgtctttgtataggagaaggaattgaaacgtttttgttttgttttctttttctgtcattctttgcttctgttcccgttttgacaatgagaaatatcgggtaaacacacaaccattcttacttattatc

SEQ ID NO: 21705 - DNA, 796 bp, Zea mays
  Clone ID: LIB3354-077-D6_FLI
aaaaaataaaactagctttgaacacgctgaaactgaaaacgacctggacactgaatacaaacatcacccaacgccggcgggctctcctcacagctcgtcctccgaccggtacttgtccgcgtccgcccgccggtgcttccccttgccgtcgacggcggtgacgtcgggcccggcgaccctctccttcacctcctccagcctctccttggccgtgtccgccgtctcccgcgccttctccttcaccctctcatacccttcgccggccttctccttggccgcctccaccgtctcccacgccgcgtccttggccgatgccgtcttctccgtggccttccccttggccgcctccttggactcctgcgccttcttgccggccttgtccgccttctcccacgccgcgtccttggccgcctcggccttctccttcgctgcggccgtcgtctcccacgccgcgtccttggccgccgcggccttctccgccgccgcgtccgtggtctggctcagcgtctcctgcgccttgccggccgcgtccttggcgctctcgtacccctgcccggctttctctcgggccttctcctcgaccttggccttgcccttcttcgaccgctcgtgcgcctcggcacccctctcgctcgccgcctcggcggcctccttggtcttctgcttgccgtactccgccttgctggacgcttcgccggccgcgcccttcaccgtgtccttggcctggtccttggcttgcccggccttgttcgacgcgccggccgcggcatctcccgccgtctccttggcgtacccc

SEQ ID NO: 21706 - DNA, 1014 bp, Zea mays
  Clone ID: LIB3354-077-E12_FLI
gcccaccgaattccctgcgattcctctcccctcgcctcctcgtctccccctaggggatcgtcggagaggaatcgcaaagagggccgtctcatccgagttaaggaagccatggagcacaaggaggctgggtgccaggcccccgagggacccatcctctgcatcaataactgtggcttcttcggcagcgcggcgaccatgaacatgtgctctaagtgccacaaggagatgataacgaagcaggatcaggccaagctggctgcctcctctatcgacagcatcgtgaacggcagcgacgccgtcatggagccggttgttgctggcagcaacacggtagtagctgttgcccaagtcgagttgcaaacaatgaacgtgcagcagcccgctgatgttgccggacccagcgagggggtggcggcgatctccaaaggggggaaggtagggccgaaccggtgcagcgcctgcaggaagagggttgggctcacgggattcaactgccggtgtgggaacttgtactgcgcgctccaccgctactccgacaagcacgactgcaagttcgactaccggactgctgccagggacgccattgccaaggctaatccggtggtgaaggcagacaagctcgacaagatctagggggggttccctacggttggtgtcaggaagattgtaaaccgcggtaactcgtcatgcggaactgctgccttgccccccgcgcctttctcttccatgtttgctgctacaatcttgttgttgggcattgcagtgcacggtgcacacttgtgtagcccgcctccgagaattctcctgcctctgcatctggtcagttcaaaaatgatttgcatgttggctatgttgtgtaagctctatttatggtggtctcgctgagacgggtatttggcttcgcagttatctagctatgtgatgtactgttgtcttgtccctgggtattatatggtacactgcagccagtaatagtaatctgcaactgtgcgttaaatggtccgtcgttttcct

SEQ ID NO: 21707 - DNA, 997 bp, Zea mays
  Clone ID: LIB3354-077-H4_FLI
gaagcttgccattggaacgctctctatcgacaaatacccacagatacaattcgatttggttttcaataaagagtttgagctgtcacacacatcgaaaactaccagtgtatttttctctggttacaaggttgagcagccaattgagggagatgaaatggatcttgattctgaggatgaagaggaggagctaaacattccagtaatcaaggaaaatggcaaagctgatgggaaggaggagcagaaaaatcaagagaaggcagtagctgctacagcttcaaaatcaagtcttggccttgaaaagaaaagcaaggatgactctgatgattctgatgaggatgagtctgatgattctgatgaggatgattctgatgattctgatgaaggcgagggattatctcctgacgaaggcgatgatgattcaagtgatgaggatgataccagtgatgatgacgaggaagaaaccccaactcctaaaaagccagaggcaggcaagaagagaggtgctgaaaatgctctgaaaacgcctctttctgataagaaagcaaaggttgccacaccgccagcccagaaaacaggtggcaagaagggtgccacccatgtggcaactccacacccagcaaaaggcaagacccctgcaaacaatgacaaatcaacggagaagtctccaaaatctggtgggtcagtcccttgcaaatcatgcagcaagacattcaatagtgagatggctctgcaggctcactccaaggcgaagcatggggccaaatgagttgcaggtccaactgagtccatgaaggagaagcatggtggccaagtgagtcgaaggtccattcgagtccatgaaggtgaagcatgggagatccaagcgagtctggaaagattgtcgatgttagtaggctgtccttattttgtttagagacttgtggctatgtgattgatgtagcgaaacaaggctgtgatgtgttaactctgccttataatattttggttgaacgtgctc

SEQ ID NO: 21708 - DNA, 1322 bp, Zea mays
  Clone ID: LIB3354-078-C9_FLI
gtcccagcccaggccgacgacggcagagagcgagccgccgccgccgccgcaccctcgtgccaggttacacggtgtgaaaatgtcaggaagggctttgaaagatctcaatgtttctcagtcagcagacctggagaacggaaaagacaattctgtgaaatcctgcatcaccaagcctgtgttgaatggcaacaaatgtgccaacaaggaagaaaaggctccgtctgcttgccacgacgctgtgactaatggaaatgcggctgccattgcagatgtggagtacattgattctgaaaatctagtagatctcccagatgtcgatgcagctctaagtaccttagctaaaagattggattcaaaggactgggttatgacatgtgaagctctcaacaatgttcgtcagttggcaatgtatcacaaggaacgattgcaggagcttctggagcctctagtccctcttatcgtgaaatctgtgaagaacccaagaagtgctgtatgcaaaactgcactaatgacttgtgctgacatctttaaggcctatggtgacttaatggttcactcaatcgatccactgctagtacaactgtttctgaaggcttcacaagataagcgttttgtctgtgaagctgcagaggcagctcttatatcgatgacaagttggatctcccctttactactcttgccaagaatgctgccttacctcaagaacaagaatccacggatccgagcaaaagcatcagtgtgtttcagcaagagtgtaccacgccttgatgtggtgggaatcaaagaatatggtatggataagctcatccaaattgcggcaacccaacttagcgaccagcttcctgaatcaagggaggctgctcgcaacctggcactggaactgcaagcattctatgagaagtctcaggcctcaacttctgacgaacacgaggtcgaggcctctgcctcgccagatgctgaatcatgggaggctttctgccagtccaagctctccgcattaagtgcccaagccattcttcgtgtgacctctactactacaaaagagtgcgtcacctctgccccaaaagaagggttggctgtgggttgctagcacaagccacaggggagatattgcgatttttcaccctgttcgctgttttgctgtacatgcttttggtttgtcctgcggtgcacccagtcgtgaaaaggttaatcattggttcaggagttcaggtgtgaccacggtgttaatattggtgtgggatatatatccattatagttggttgtacaatcatttggttccactacttggtattggagtgtagattttttttcaaaaacc

SEQ ID NO: 21709 - DNA, 1425 bp, Zea mays
  Clone ID: LIB3354-078-F7_FLI
ccaactctccatcgcgtctgctacgcctctcctgcaggacgaccaatggcttccaggaagttcttcgtgggtggcaactggaaatgcaacggtactggcgaggacgtgaagaagatcgtcaccgtgctcaaccaagccgaggtgccctctgaagacgtcgtcggtgagtcgtctcacttctcatggcatcatctctccccgcgtttgcagttgcgggcctgtgtcggttgtggtttggtttttgactagaccgatctatgtgctgatctcttggttggctggaactcggggaggtgagcagaggtggtggtgagtccgcctttcgtttttctgcagcaggtcaaggggctgctgcggctggacttcgccgtcgcagcgcagaactgctgggtgcgcaagggcggcgccttcaccggcgagatcagtgctgagatgctggtaaacctgcaggtgccctgggtcattttgggacattctgagcgcagagctctgttgggtgaatccagtgattttgttgctgataaagttgcatatgcactcactcaaggtctcaaggtaattgcttgcattggtgagacccttgagcagagagaggcaggaacaacaatggatgttgttgctgcacaaacaaaggctattgctggtaacttttacagttttacttgctgttatattctgatcatcttatgtttttaacttattcctgcttctgttcagtatagggttcaggatgcatatgctctcttagtcctttttttactttattaaataataaaaattttggtggtggggttgatgtatttgtgtgtttgtgtgtgaattggacacagaaataaatctgaagctattgtcattttaaaaaagaactacgctatacatgatacatatatttgtacctgacaccattttttaacacttcaaactttttagcttcatgtgctcattctagctgctgctttgaattttattccttcacgcagaaatgagggacttctgaatttctctaattcactgtttactgcctctccttttgttttgcagaaaaaatatcagattggacaaatattgtgttggcatatgaaccagtttgggctattggtaccggcaaagttgcaactcctgctcaggctcaggaggttcatgatggtctgagaaagtggctccactccaatgttagccctgcagttgctgaattgacaaggataatttatggagggtctgtaaatggagctaactgcaaagaacttgcagctcaaccagatgttgatggattccttgttggtggagcctcattgaagcctgaattcgtggacatcatcaagtctgccactgtcaagtcttcatctgcctagtgttttgactttcaatgcacctggatgcttgtcgtactgaatgctgttgatcttttaaagctattgccatttt

SEQ ID NO: 21710 - DNA, 1047 bp, Zea mays
  Clone ID: LIB3354-078-G8_FLI
caaagatccaggacaaggagggcatcccacctgaccagcaacgtctcatctttgccggcaagcagttggaggatgggaggacccttgctgactacaacatccagaaggagagcaccctccacttggtgctgcgtcttaggggtggtatgcagatctttgtgaaaacccttactggcaagaccatcactcttgaggtggagtcttcagataccattgacaatgtcaaggccaagatccaggacaaggagggcatcccgccggaccagcagcgtcttatctttgccggcaagcagctggaggatggacgcacccttgcggattacaacattcagaaggagagcaccctccacctggtgctgcgcctcaggggaggaatgcagatcttcgtgaagacattgaccggcaagaccatcaccttggaggttgagagctccgacaccattgataatgtgaaggccaagatccaggacaaggagggtatccccccggaccagcagcggctgatcttcgccggcaagcagctggaggatggtcgcaccttggctgactacaacatccagaaggagagcaccctccatctggtgctccgcctgaggggcggtatgcagatctttgtgaagaccttgactggcaagaccataaccctggaggttgagagctctgacaccatcgacaacgtgaaggctaagatccaggacaaggaggggattcccccagaccagcagcgtctgatcttcgccggcaagcagctggaggatggtcgcacccttgcagactacaatatccagaaggagagcaccctccacctggtgctccgtcttcgcggtggttattaagccatcagtcgttgaagctgctgctgtatctgggttatctagtgtctctgccattgcccatggatggtgctgtctttcaaagtatttgtatggtttgtgtcgtgagtcgtgactgagctggtttcatggaccagttgtgttctcgttacccaaaactatcgtgcgaccgcatatggcttaatcatgaataaatgttgtttgaatttaaact

SEQ ID NO: 21711 - DNA, 1641 bp, Zea mays
  Clone ID: LIB3354-081-F2_FLI
accccgcgcaacccccccgctccgacggcacgcacggacgacgcaccgcacactacccggcggtggaactcctcgcccgcgtcgctgctccggtctccgcgctgctagccgccgactgtaataactataacatttcaggtgtgcttctgaagggagatttcgttgaacaggatgaatgcattggcagcaaccagcaggaacttcaagcaggcagctaagctgctgggcctcgactccaagctggagaagagcttgctcattccattcagggagatcaaggttgaatgcacaatcccaaaagatgatggaactttggcatcctatgttggatttagggttcaacatgataatgctaggggacctatgaagggtggaatcagataccaccatgaggttgatcctgatgaagttaatgccttggcacaattgatgacttggaaaacagcagtagctaacataccatatggaggagccaaaggtggaattggatgtagccctggagacctgagcatctctgagcttgagaggcttacccgagtttttactcagaaaatccatgacttgattggcatccatactgacgttccagctccagatatgggcaccaactcacagacaatggcatggatacttgacgaatactcaaagttccatggttactcacctgctgttgtgacaggaaagcctgtggacctcggaggatcattgggaagagacgccgctactggaaggggagttctgtttgctactgaagctttgcttgcagagcatggcaaaggcattgcaggccagcgtttcgtcatacagggattcggtaacgttggttcctgggcagctcagctgataagtgaagccggtggcaaggtgattgctatcagtgacgtcacaggcgccgtcaaaaacgtcgatggcctcgacatcgtgcagctagtgaagcactcggcggagaacaaggggatcaagggcttcaaggggggagacgccatcgctccagactcgttgctcactgaagagtgcgacgtcctcatcccagcagcgcttgggggagtcataaacaaggataatgctaacgacataaaggcaaagtacatcatcgaggctgccaatcaccccacagatccagaggcagacgaggcaagcccgtagctcaaaacaaaccgactgctttctgcaatgttttctgatcccctctgtatcccgttccatccccagatcctgtcaaagaaaggcgtcctcatcctccccgacatactggccaactctggtggcgtcacagtgagctacttcgagtgggtacaaaacatccaggggttcatgtgggacgaagagaaggtaaacgcggagctgcggacgtacatgacgcgcgccttcggggacgtgaagcagatgtgccggagccacagctgcgacctccgcatgggcgccttcacgcttggcgtcaaccgcgtcgcgcgcgccaccgtcctcaggggatgggaagcatgacctccctccgtgtcgtccgtgtgcccctccctgttgtatcctcttggtcttgggcccttgtttttctttggttaattattgtcgagatcaacggagatccgagaaaaacgggctcagttaataattccaagaagtgcgtcttcttggagataaaat

SEQ ID NO: 21712 - DNA, 2395 bp, Zea mays
  Clone ID: LIB3354-081-G1_FLI
acagcacccccgcagggccgcagaacggcgctccccctgctccgccacactccccagaggttctgaacgcagatctctcgccgcagctcggcctcgcgattccgctggagactgttcagctcctcgccggcggcgccgattcgatctgacggccacgcagcagaaggctgaaggagggcactgggagccgagggggaggctaggggttaggattccggcgtgatgcagcgcccgggacgacttcagcggtcggggtccaagcgcgggctggaacccaccggtggcggcgacgacgacgaccatgcgcccaagcgcccgcgcgtccccgccctcgctagtgtcattgtggaagctctcaagatggacagtctgcagaaactctgttcatcgcttgagcccattctccgaagagttgtaagtgaagaagtagagcgtgctttagccaaactgggtcctgctagaatccaaggaagatcctcccctaaaagaattgaaggccctgatggaagaaatcttcagctccagttcagaagtcagttggctcttccaatcttcactggtggaaaagttgaaggtgagcagggagcagctatacatgttgtgctgttggatgcaaacactggatgtgttgttacttcaggacctgagtcatttgcaaaattggatatccttgtgcttgagggtgactttagtaaagaggaagatgaggattggacagaagaagagtttgaaagtaatattgtcaaggagcgtgaagggaagaggcctcttttgacaggcgacctgcaagtgactcttaaagaaggtgttggaaccataggggagcttacatttactgacaactccagctggataagaagcaggaaattcagacttgggctgaggattgctcctggcttttgtgaaggtatccgtgtccgagaagccaagacagaagctttccctgttaaggatcacagaggagaattgtacaagaagcactacccacctgcgctgaaggatgatgtttggagattagaaaagattggcaaggatggcgcattccacaagaagttaaatgccagtgggatctatacagttgaagatttcctccggcttcttgttagggatcagcagagattacgtagcattctgggcagtggaatgtcaaataagatgtgggacagccttgttgagcatgcaaagacatgtgtcttaagtggaaagcattatgtatactatgctagagactcaagaaacgtgggtgcaatattcaataacatctacgagttcactggtttgattgctgatgatcagttcatttcagctgaaaatctcacagacaaccagaaggtctatgctgatgcattggtaaagaaagcatatgaggactggatgcaagttgtagaatatgatggcaaggcactattgagtttcaagcagaaaaagaaaactgtcacgacaagaagtgacattgcatctgcctcaacaagcaatcctgcttcatatggttcggccaattcacagaaacagttgtctcttccagcaaaagctggacaaacttcctcagcgggtactatgaatgaagcagatggaactagaaatgcatacaacgcaaatggaaaccagtcagcaagatatgcagccaacactcagagcattcctgcaaacgtcggcatgcaatacgacgggagtgcagtgtcgcctgaaatccagtttagtggttcatcccttcagagtcagtcttcaagagggtccaacatgctagcattgggccctccgcagcaacatcaaagtttcgaattcccagcgctcggccagcccgttcagccaacaggcctgaaccctttcgaagagtggccgcagcagcaggagaaccgtggcggcggtgtcgacgactacctgatggaggagatccggatgaggagccacgagatcctggaaaacgaagagatgcagcagatgttgcggctcctgagcatgggcggtgccggaaccagcctagccgaagacggcttcaatttccctccgtacatgcctgcgccttcgccgaacgtgagctacgaggacgaccgcacccgcgcgcccgggaaagccgtcgtcgggtggctcaagatcaaggctgccatgcggtggggcatctttgtgaggaagaaggcggctgagagaagagctcagcttgttgagctagacgactagaaagtattgaaccctcgagctgttcatgtaccagagctttcattgttgatggtgtttgtggatccggacggggctcagctatggccctgccccttaggaggacagcagttctggtcctgagcttaattctggacaaaactattttccgtttcccccctttttgtatgtatagctttttttttgcttaccattttaaatgcgttgcttgtttagtgtg

SEQ ID NO: 21713 - DNA, 1631 bp, Zea mays
  Clone ID: LIB3354-081-G6_FLI
gttttccacctcccatcacgacctcttcctgacgtttccccaattcctccgcgctaagcagagcaacagcgatggcgacgaagtacgctgccgccgcggctgatctggtcacgggccgtccgcggaagcgggcgaggcttggctgggacgtggcgtcggctgccgaggctcagataggaacattttgtgggcaagaagttggtgatgtggccagcctgctattatcagcaaatccttccgaccatacttgttcgtctctgctcccgaagggtgtggctcgaaatgcttcccctccctggagagaagacgataaagatggccattatgtatttgctgttggagagaatttggcctctcgctacaagatatacagaaaaatgggtgaaggtacttttggtcaagtactggaatgctgggaccgagaaagcaaagagatggtggctattaaaattgttcgctctgtaaagaaatacagtgatgcagcaatgatagaaattgatgtcctgcagaagcttgcaaaaaatgatgctgcaggcaaacattgtgttcaaatacggaactggtttgactatcgtagccatatttgtattgtctgcgagaagcttggcccaagcttatatgattttctgcagaaaaccggcttccatccattcccaattgatctaattcgccggatcggacagcaacttttggaatctgttgcattcatgcatcgtcttcagctaattcatactgatctgaaaccagagaacatcctcctcgtttcttcagattatgtcaagttacctgatcccaaggacggatcattctcaaggaaactgccaaaatcaagtgccattaaattgattgactttggaagtgcagcataccatcaccaggatcgcagttacattgtatctaccagacactatcgcgcccctgaagttattttgggacatggatggagctatccatgtgatatctggagtgttggttgtatacttgttgagctttgctcgggtgagacactgtttcagactcacgataacttggaacaccttgcaatgatggatagagttctaggtcctcttccacggcacatgctggaaagagccgaccagcatgcggagaagtacgtcagaaaaggaggattgaactggccacaagcaataacaacagtagagagcgttagagctgttctcaaactgcctcgccttcagaacctggtgatgcagcatgtggatcactctgcgggggacttcattgaccttctgaagcgcctcttagcctatgagccctcgggaaggttgactgctcaagaagcgttgggccatgtcttctttaccagataccggcaataacaagtcgcctcgccatgacatcttcgatgattggctatggcacatttatctgacgaagaattaacaaaatctagagacagttggcgagttctgagtattcagaggcaagagatacagccttgagagaattcagatggtcgttgaacaaagagaacttggcgcgagtgcttgtagacatatctggtatatgtgtgtgtgcacgaagattgcggttggataccaatgtaaatgcaagtgtaactgaattaactgttacaaatttttctttataagctgcaagctcacacacgc

SEQ ID NO: 21714 - DNA, 1287 bp, Zea mays
  Clone ID: LIB3354-081-H12_FLI
ctttatgaacttagatttgttcacaggttgctgcttttgtccccttgatgtatatgtgcatttgcacatattattcattattcaagattggcatgttgatgttctattctctgactccaagacaaaccagctctgtcagcttgcttatgatctgttcaatggttgcaagatatgcacctcctatttcttataactttctgaatctcatccgccttggtggcaatgctaaaactacatttgagaagagaatggggaacattgatgatgcagttcctttctttggcagaggcttcaacaagatctatccactgattatggttgtttatacactattggttgctagtaatttctttgttcgtgtgattgactttttgggaagatggaaaaggttcaagttccaacgtgaagaagagaatatagatggtttagatccatctggaatgattattctacaaaaagagagatcttggatcgaacaagggtgcaaagtgggcgagcaggttattccattggcaaggaatttcaatggtgtgaacgctgatattgaatcacaaaatgtgccattggttgaaaacactgtggagatgaaagtaggggcaacttcttccagaaatgacgggagagctggccagttgaagtatgcaaacaacagggagactatcgccagcaaatacacttctattagagaacagaaccggcagtcagggaaggtagtgagaaaggaaatttcaccgaactctatatctttgctcgaagaaagaaattcagagcaggggtccaatgctggtgtaccaccaactggtgtgtctgcaacatgggcctcgatgaagattggttttcaaaatttcaaagcaaatatgggttctaagaagtttcttcctttgcgccaagatccaggatttgttccaaatttgaatgtctcttcaccagaatctcttgatgacatattccaaaggttgaaacggcggcctgcaaatgtgcctgtggattcccttgacgatgacgatgatgacaacataggagatacagatcttcatttccaagatcaatgaaataggttgtgatattcttttaggtttagaatatgcatacacagaaaaactaaaagaattggtagcaatagatgttcaaaggaagatacaggatgtatagatctgatgatggtttggtgtgcttcctggaagctcatgacgcctgtccatctggaaaactgcaaaatgtaagtacgatatgatgacagcctttacagaaaggtttggaattctcccgccgaaaagggttgggact

SEQ ID NO: 21715 - DNA, 1171 bp, Zea mays
  Clone ID: LIB3354-083-D10_FLI
gctttgctcaagatctggaaagagcatgcagagaccattacagccgaaggtgttgggctattgggtttggcctgaatttcagagtcattgctctttctcctggcttcagaaagctttcttcggagcacttcgtttcttcttataacagggcttctagaagggcaatatttctcgactacgacggcacacttgtgccccagtcgtcaatcaacaaggctccaagtgaagaagtcatctccattcttaacaccttgtgtaatgatccaaagaacgttgtgtttatcgtaagtggacgaggacgtgattccctcgacgagtggttttctccatgcgagaagctccgtctagccgcagaacatggctattttatcaggtggagcaaggaagctgcatgggagtcgagctattcgagtccgcggcaagaatggaagcacatcgctgaacctgtcatgcaggtatacaccgagacaacagacggatcttcagtcgagtcgaaggagagcgctctagtgtggcactatttggatgcagaccatgatttcggttccttccaagcgaaggagctaaaggatcatcttgagagggtgctatcaaatgagcccgttgttgtgaagtgtggccattatatcgtagaagtaaagccgcagggagttagcaagggtcgtgctgtcgacaagctgattcaagcactggccaacaacaacgggaaggcacaggatttcctgatgtgcgtcggcaacgacagatctgacgaggacatgttcgaatgcatcaacggtatggcctccaacgatgcctcgtcgcctgcagtaccggaggtgtttgcctgttcggttggccagaagcccagcaaagcaaaatactatgtggacgacaccagcgaagtaatcagattgctcagggatgcaacccgcttctcatcgtcgcagcggagggaggacgtcaacaccagccgcgggcgtgtgaccttcagagacgcactcgattacgtggactaggcaccagcagcaattcttagttactcgaaatgattagctgcggagcttgtaaattccgctgtcttctgtctcccaatggttttcgttctagagaattgtagtgtagccgacatcgacatggatcgtcgtcaccagtacacgaacagcggaaatgtgagttgaagttcgccgtt

SEQ ID NO: 21716 - DNA, 951 bp, Zea mays
  Clone ID: LIB3354-083-D2_FLI
gctagggacagcctgtgtcccgccgtgggatcggtggaagagcgggaggcaggcatgtgtgatctggtggcccgcacgggccggcacctgcagcgctacgagaacggccatcgccttgtggccgggtgcgtccgtaaggggagccccccttccctacccccaaccaccacggctcttctccctctgccttctcgcatccacacaccaaagacatcaggcatttttatctgccctcgattcgatctgattgggtttgtccggttgcggtgcttgcttggttgggcagcttaaaggtgcataccattcagatatagggatattaatgatggagcttctgatgatgaacaaaagaaacttgttgaagttctcatgatcagctcccaaagtggaccgggtcttctatttccaaagggaggctgggagaatgatgaaactgttgaagaggcagctgcaagggaagctatcgaagaagctggagtgcgaggagatttagtgcaactgctggggttctacgatttcaagagcaagcagcccgaagcaacgtgcagggccgcaatcttcgccctgcacgtgaaggaagagctagcatcctggccagaacagagcacccggcagaggagctggctcaccgttcccgaggcggcggagcggagccgctacccgtggatgcaggaggccctcgtgacaggcttctccgcctggctcgagaactggagaaacggcggcggcggctgcgcggaccgaactgagagatgacaccactttaaagcatcagggttctctgatgctcggtagcttttgtttactttgtcgctttacagccatcttcaggatgacagtctcctcagctgacccgaggattgttggagttgtaagctgctgattctcgcggtcgccagctatatttaactgtcttgtattgaaccttgagacaaagcaagctttgtgtat

SEQ ID NO: 21717 - DNA, 1164 bp, Zea mays
  Clone ID: LIB3354-084-A4_FLI
ctgcggcctgttggagggcagcaccaagtatcacagtctagctactgcctggcaccagcaagcttctgccctgccccgccccgccgccagaatccgaaaccagtaaaccacagcggcaacaacctcgcggcgcccgcgtggaggcaggcggcgcataaagccagccggcgctgctcctgctgcttcttcgatcggtccatggctgtcgtcacgagggacgcggcgtgcctgcccctcgtcctcctgctcctagtcttctccgcggccccgtctccggctgacggctgcgaccgctgcgtgcgccggtccaaggccacctactaccaggcctcctcgctcgccctcaacgccgggtcgtgcgggtacggctccttggccgcgtccctcaacggcggcctgctcgccgcagccagccccgagctgtacaggggcggcgtcggctgcggcgcctgcttccaggtgcggtgcagggacagcgagctgtgcagcgccgccggcgccaaggtggtggtgacggaccaggcgcggacgtcgaaccgcacggcgctggtgctgagcgccgcggcgtacgcggccatggccagtgccggcaaggccgcgcgcctcagggaccggcgcgtcgtcgacgtcgagtacaagagggtaccctgcgagtacgcgaaggaccgcaacctgttgatacgcgtggaggagaagagccggccgccaagcaacctgtccatcaggttcctgtaccagggcgaccagaccgacatcgtcgccgtcgacgtcgccaccgtggggtcgtccaactggcggttcatggcgcgggaccacgggccggcgtggagcacggcgcaggcgccgccggggccgctgcagttccggctggtggtgaccggtggctacgacggcaagtgggtgtgggcggagtcggaggtgctgccgcgccggtgggaggccggccgcgtctacgacgccggggtgcaggtctccgacgtcgcgcaggaagggtgctacccctgcgacacgcgcgagtggcagtgacgtgacgcgcgcacgggctggattgtagtagattgtacagttttttttttttggtcgggaatgggacgaaagatatgaaatgatgatgagcggagccggagagccgaatcaaaccaaatcaaacaaacgtgccgttgc

SEQ ID NO: 21718 - DNA, 942 bp, Zea mays
  Clone ID: LIB3354-084-B5_FLI
ctgaaacagatagtccgtttccgtctcttttaaagctcaatttttattatttttttgcactgaacaaccactctgtgttacagacatcctgaaagatcctggcgaggccagcgaaacatcgcagtctgctgtccgtgactgtagaatcagctcagctggtgcggatgcagatgctattcactcaccgacgcacagagccccgacaagggaagctgaaataaaagacgagatcggcttgcttctcctcagtgacaaaccgttccttagcagagcagctgagctcataggcgttgatgtgtatggggatctgagtaaccagtgtgacaggatctccaaggctagaacgagaaaccgtcggctctatctggacgcggcaggagagcaactggagctgaaacaccgccagcagaacatcctgtggccttacgctaggccgctgggccggagatggaggtcatcgtcatcggcgtacctgtcgctggaggagctgctgagagatgtcagcgacggggttaggaatctggaggatgggtattgcagtggagatgcccgccgtggcagcaaggatagcctggacgtgaagctggagagggatctcacctcctccgcagatgcgttgatcagtagtgtttgggacatgggctggcaaggtttggcttgtgtggaggcggaatgcttcgtcagagatgccggggaggagatcctgtccttgctcgtcgaggaagctgctctagacatgtgtctgcactgccatagtgccatgtgatgatatgaacatacagcgataagttgctgccatcgggacgatctataacaacttgcagcttcagttcttgtagttgtttttctttttttaggtttgaagtagatttcgtccgtgtaatcaccaggattgtagtagtataggaaccagtgaagtgatgtgttcatgagttcatcaag

SEQ ID NO: 21719 - DNA, 874 bp, Zea mays
  Clone ID: LIB3354-084-F3_FLI
catgtctccgcccgtcaagatcctcggccactacgcgagcccgtactcgcaccgcgtcgaggccgctctgcagctcaagggcgtgccgtacgagctggtccaggaagacctgggcaacaagagcgagctgctgctcgccaagaaccctgtccacaagaaggtgcccgtgctcctccatggcgacagggccgtctgcgagtccctcctcatcgtcgagtacgtcgacgaggccttcgacgggccgtccatcctgccggccgacccccacgaccgtgccgtcgcccgtttctgggcgaacttcttggacaccaaagtacgtacgctgctgctgctggccacaggcccctcacccgttcttgtgacttcctgaacgttgtttcgcttggacgcacgtacgcagttctcccagccgttctggctggcgtactgggcggagggcgaggcgcagaaggccgtggtgaaggaggccaaggagaacctggcgctcctggaggcgcagctcggcgggaagagcttcttcggcggcgacacgcccgggtacctcgacatagccgcgtgcacgttgggtccttggatcggcgtgctcgaggaggtgactggagtggccttgctggacgccgacgagttccccgctctatgccagtgggccagggactacagctccagtgaagcgctcaggccatgcctgccggacagggaccgactcgttgcctacttcaccgagaacaaggagaagtacaagacgtttgccaaggcaacgttgcatcagtagctgctagttgggtgcaaaccgcttgtctatctctgtggtgtggaataatgtatacgtacgtgctccctcgatatcaaataaatcagctaccagagttgactg

SEQ ID NO: 21720 - DNA, 1159 bp, Zea mays
  Clone ID: LIB3354-084-G11_FLI
tttataaaaagaattgataatgcttaaccctgcttagaaactgaaaaatcctttgttttcaaaaagaatgatgtggaacattggttatgggctttttgattcgaaaatcaaaacaaactaaagtgatggatcctctacggccggagtggactcgtcactcgaaaagagtatccctgtcgggtaccaaaaatggggaaatggttaataaatctagaccagcgctgagcagacaaagtcacccgtctgtgtcgattaaggatcgtaccgttgactggcctgttgtggttgagactttgcaactagccacataccctggtatgggacagggaaagcttgaacccggctattccatatgtgaagagacaatcgcgcactgggagtggagagatggcgggactagcatgtaccctcctggcatagtaggacgcctagtagggtaatgttctctcgggtggcgtggacctattcatgtagtggaggactccgtgggaacggttgacatatgcaagggttaagtgctacatatgtcgtgtggttagagatccccagctgggtataatcggttcgaatcgtcgttgctcctcggttatggagactcatcccggtgaccatcatcatagttagcaagtgaaatatgagaatgaataaaatgcagctagtataggccaagtgcttgaactagactaggtaaatataaattcaggtaataacctaactagtgaaataaaacttggcttaaggatcaactggtagcaagcttttctgcaaaaggagtcttcgatcattgataaaccttaccttgattcccaatcaactagcatacccttgagagtcttttctttagtcgggtaagtcttgctgagtaattgcgtactcagggctttattccctgttgtttttcaggttataagtttgttctgttgtagatggtgctaagtgtcgatgggcttggccttcttatataagtatatcccatctttagctttttattgaggattgtcacttaagctaacatgtaatttaaaacttataaatgctttatacattttaaagtgtaattcttttgaatcactttcttttgtaatcactccgataattgtataatgtaaacttattgtaacatgtaatcattttgcaataaagaatttatttccgctgc

SEQ ID NO: 21721 - DNA, 762 bp, Zea mays
  Clone ID: LIB3354-085-A4_FLI
gcttgcgccgcccctagccccaccatcgtcctccccatgaagccgccggttgagccgccccctcttgtgtcgcctccatgtccgcgcagatatgcctcgctcgccaccccgccgtgttcctccccgagacaccgtggccagcctctagcccgcgctcttcctcgtcacggcgatgtcggcttcccggaccccttccggcttgcttccatgccttcgcttcggtttgttcgggcgcaggagaggctacacttcctctatgagtcgaggttggccgtcggcaagagctccgaagggttccaggcgctgcagcaatctacaccagggccagcttcgcgtctacttctgcacagatgagtgcggctaattgttccaagtttaagcttcacctctagtcatgggtaaagagaagtcacatttcaacattgtggttattggccatgtcgactctggcaagtcgaccaccactggccacctgatctacaagcttggaggcattgacaagtgtgtgatcgagagtaaataagttatgcttatttataggttcaggatcttcaggttgagcttgagaatgagaagcaagaaaaaacaaaactttgacaagtgttggataacttgaagacggaatcagaaacttcaagggtaaaacattatgaggaaatagaagttgtaaagatgacatcacaagaaatgcacgtcctcctttgttaaatgctaaaattcaaccagggccagcacaatctaaggccataaagtttctaagcc

SEQ ID NO: 21722 - DNA, 872 bp, Zea mays
  Clone ID: LIB3354-085-C2_FLI
gaaggacaaaatggctcagccatcatcatggggtaccaatcctcctgttcaggctgagatgagatcttcctcttttatgcctcgtaacgccaaacacaatggatttctctctggagactctcaaattgatcatgaaatgctaaatatattggaagaaaatgctcgactactcaatcaaatagaagtaaatattttaacatctcaggctcataacaacattaatcttttccatcacataagaaggaatattaatggtcttctacaaagcatgtgccagattcccggaataatgagcaagatgcccccattgcctgtttctgtggatgaaaggctagctagctacatactccctcgtgctcatacggtaaatttcctctggcacaagttcttggcagcagtcatttgaaagaagaaccaagagtgtggtaggccactgctagacagacagcagcttaatttgcagcgacagtttgatactgtagaaaaaatatctgaagagccatgtgcttgggaatctgcatggagaagcataggtgaaaagaaggatctggcttttctgatgtctgaaagctatagaagcaatacgatccacttttcaccacatggccttaaaaaacgctgtccagcttatgagtttgagatagggagagtttccgtaatctgcagttttcctcaccttggttgcacatatcgattcttttttcgggttttgtcctggcgatcgatgttaacggaagcgtagcatagaaactaagcttggtatgaataattagcaggaaaagcttagcctttttgccagttactacaaaggtaactaaccttctgtgtgtatctagttttctagtataatgcatatgcaagcctggtcctct

SEQ ID NO: 21723 - DNA, 1098 bp, Zea mays
  Clone ID: LIB3354-086-B10_FLI
agagagagagagagagagagagagagagagagagagagagagagagtgagtgagggaggcgccgccgcgccgacgccgagtcctttctccatcctgcatctgccgctgtttccgacaggatgtttctcacgaggacggagtacgaccgcggggtgaacaccttctctccggaggggcggctgttccaggtcgagtacgccatcgaggccatcaagttgggatccactgcgatcggtttgaagacaaaggatggtgttgtactcgccgttgagaaacgtgtgacctcaccactgctggaaccaagcagtgtggaaaaaataatggaaattgatgagcacataggctgtgccatgagtggacttattgctgatgctagaacactagtggaacatgctcgtgttgaaactcagaatcataggttctcatacggagagccaatgactgtagaatcttcgacacaagctatctgtgacttagctctgcgttttggcgaaggtgacgaagagtcaatgtcacggccatttggagtctctctcctaattgctggacatgatgagaatggacctagcctgtacgtatgatccaattagctaactgaactgggttttctttaactgcaggtactacactgacccatctggtacattttggcaatgcaacgcaaaggcaattggatcaggttctgagggagctgatagttccttgcaggaacagtacaacaaggaattgaccctccaggaggcggagaccatagccctttctatcctgaagcaggttatggaagagaaggtgaccccaaacaacgtcgatattgccaaggttgcccccaagtaccacctctacacccctgccgaggtggaagccgtcatcgcgaggctgtgaaacgcttccgagctcttgctatccacgtcatcaatcggtaatagacgacccttgtacgaagcgtgggcaccatggtccttgattatggcttgattatggcaaggacagtcgatgttagtttgattcacagctcagccgggctcacttgtctttttaaatttttatgaattagcgttgagaactttgtactgccaaaaaagttcattttttttaccc

SEQ ID NO: 21724 - DNA, 1131 bp, Zea mays
  Clone ID: LIB3354-086-E3_FLI
gggagagacccaattagctgcagggattggtcgggttcggctccgccttcggagagtcccaagagatgggtggcgcggcggcgggtaccaagtggatccaccacatccagcgcctcagcgcggccaaggtgtcggcggaggcggtggagcggggccagagccgcgtcatcgacgcctccctcaccctaattcgcgagcgcgcaaagctcaaggcagagttgctgcgtgctctgggtggcgtgaaagcttcagcgtcgctcttaggggtccctcttggtcacaactcatcctttttacaaggccctgcatttgctcctccacgcatacgggaggccatttggtgtggaagcacaaactctagcacagaggaaggcaaagaattgaatgatcctcgggtgctaactgatgttggagatgtccccattcacgagatccgtgactgtggtgtcgaagatgacagattaatgcatgtaattagtgagtctgtcaaaacagtgatggaggaggagcctcttcgaccgttggtgttaggaggcgatcattcaatatcttatccagtgaataatggaaggtggttatgccaggagactgctacaggttggattgagatcaatcaccaaagaagggcgtgaacaagggaagagatttggtgtggaacagtatgagatgcgaaccttctcaaaggaccgagagaagcttgagaatctgaaacttggggaaggcgtaaagggtgtgtatgtctcagttgatgtggactgccttgacccagcgtttgctcctggggtctctcacatcgaacctggaggcctctccttccgcaatgtcctcaacatcctccagaatttgcagggtgacgttgtcgccgctgatgtggtggagttcaacccacagcgtgacacggtagatgggatgacagccatggtcgccgcgaagctggttcgggagctcactgctaagatctccaagtgaaacggtcaggattgcaccactcttcttgaagcaaagcgaaagggtgggttttgatgtcccggtggttattggtcatggtttctatgtatcgagcaccaaattgttcgacatgtgacaggtttatatgttaattaggttgcaataacaccataatggtttatt

SEQ ID NO: 21725 - DNA, 707 bp, Zea mays
  Clone ID: LIB3354-086-H10_FLI
cccagccccattccccgtcggccgactccagcgagcgacttcgccccggtcggaagcaccaccagccaccagcgatgtctggcgaggaggaggagaacgccgcggagctcaagatcggcgaagagttcctcaaggccaagtgcctgatgaactgcgaggtggcgatcatcctggagcacaagtacgagcagatccagcagcacgcgtcgtcggagtcggacccgtcgtcgcaggtgtcgcaggtgttcgagaagtcgctgcagtacgtgaagcgattcagccgctacaagaaccccgacgccgtgcgccaggtccgcgagacgctgagccgctacggcctcgccgagttcgagctctgcacgctcggcaacctctgccccgacaccagcggcgaggccaccgcgctcgtcccctccctcaagtccggcggcaggttcgtcggcgaccccggggacgagaagatcgagaagatgctcaacgacctctccctcatcaagaagttcgagtagagcgggagccctctcttctcttatcttcttttctcttggagtagcgagcatccagagaggaggggaattcaacatcaagacgatgtactgataaaattttacttgccttacactactatcgttgaggttcacgtctgcgtattgattagaaccttgtttgatcgataatccaatatactagtagtatgtgtgtggttg

SEQ ID NO: 21726 - DNA, 867 bp, Zea mays
  Clone ID: LIB3354-087-B10_FLI
ctcgcacgcacgctccggcgtcatgtcgtggatcgcgcgctccatcgcggccactctctcctcgccgcgcagctccgacgccgacgacgccgactacgaccctgcctccgcgcagagcggggcagggccggaggaggaggagtcccacggcagcagccctaacccgggccctgaggccggggaacccgagcagcccggcacaccgagccgcggcgtcaaggacgacatatccgagctcaccgaaacgctcactcgccgcctctggggcgtcgcatccttcctcgcaccgcccccgaccccgccggaggcctccaccccgcgcgccgcgactccggcacaaggggaagatgaggggattgaggatggggaggaggccgcggtgctgtccccccggactgcggggatccgcagcgatctagccgagataggcggaaggatgtggagcggtttctcgatgctgcagaacaacttggccgtggccgagatctccaagatcgcctcgtcgctcctgccgttcgggcaaggggaggcggacgagggggagtccgtgcccggcatcaccgaagaggtggtggtgttcgtcaggcacatctccacgcggcccgagacatggctcgattttcccctcttcatcagcgagcgctacgcggatggtatagctaaggctctccgcacatgtgtactctacttcagcatttggtcgttattaacgtggaagggaagtgattggaggggggcttggttcagaactaatgattgatttttgaaagataattaatgatcgttagattctttccactttattttaatgagggggattgctcctgccattactcataaataaataaataaaatttattggattgt

SEQ ID NO: 21727 - DNA, 891 bp, Zea mays
  Clone ID: LIB3354-088-A1_FLI
tttgcaggtaggtaggtagctagccgccatagcaagctaggccgaagcagaggagtgatggccaaggtccaccccaacgccgcggagtccgtccaggcagaggccgagggagagctgcccacggtgctgacggtgtggcgcaagtcgctgctcttcaactgcgacggcttcaccgtctacgacgcccgcggcgacctggccttccgcgtggactgctacgccggctcgttccgccgccggcgccgcgccgacgtcgtgctcatggacgccacggggaagccgctgctcaccgtgcgccgcaagacgcggttcggcttagcggagcgctgggtcatctacgacggcgacgccgacgacggcacgacggccggggccacgccgctgctgtccgtccgccgccgccgcataggcgcgtgctgcaagacgctggcgctcgcccgcccccgcccccgctccgccgccgcgggaaccgacgcaccgtcgtacgtggtggagggttcctacggtcggcgcgcctgcgcggtgcgcgacgcccgcgggggcgccgtcgtcgcggaggtgcagaggaaggaggccgtcggcgacgacgtgttccgcctcgtcgtggccgggccacgcctcggcgcgccgctgtccatggcgctcgtcatcgccctcgacgacatgttccgcggcggctggtcggcgcggtcgctgctgcgcatgagctcgccggcgtagtactttcactagctatagaagccacgagatggagtggagcccatataccagggactctccctgttacacgtgtaccgttacagtgaccccgggcccagttgtcagcgtcagcagagtttataatgcaggctgcagcaggggcagggctaacccaagcaatatttagatact

SEQ ID NO: 21728 - DNA, 1534 bp, Zea mays
  Clone ID: LIB3354-088-B1_FLI
cccccgctgctctgctcatcgtcctccgctccagcagctgccacagagacatcagagagcggtcctccttgtgagtctgagctgaagaggaggaggaggaggaggagaagcagcagcgcagccggaggagggagagcgaagatgcgccgcgtcgcgctgttgctcgtcgccgccgtgtgcgcgctggcggcgccggctgccgcggtcgtcactgacggtcttctcccgaacggcaacttcgaggatggcccgcccaagtcggcgctggtgaacggcacggtggtgtcgggcgcgaacgccatcccgcgttgggagacgtcgggcttcgtggagtacatcgagtcggggcacaagcagggggacatgctgctggtggtgccgcagggcgcgcacgcggtgcgtctgggcaacgaggcgtccatccggcagcgcctggccgtggcgcgcggcgcctactacgccgtcacgttcagcgcggcgcggacgtgcgcgcaggcggagcggctgaacgtgtcggtgagccccgagtggggcgtgctcccgatgcagaccatctacggcagcaacggctgggactcgtacgcctgggcattcaaggcgaagatggacgcggtgacgctggtcatccacaacccgggcgtggaggaggaccccgcctgcggcccgctcatcgacggcgtcgccatccgtgcgctgtacccgcccgcgctcgccaggcgggcggggggaaacctgctcaagaacggcgggttcgaggagggcccctacttcctgcccggcgcgtcctggggcgtgctcgtcccgcccaacatcgaggacgaccactcgccgctccccgcctggatgatcgtctcgtccaaggccgtcaagtacgtggacgccgcgcacttcgccgtgccccagggcgcgcgcgccgtcgagctggtgggcggccgggagagcgcgctcgtgcaggaggtgcgcaccgtgcctgggtggacctaccgcctcgccttcgccgtgggggactcgggcgacggctgcgcgggctccatggccgccgaggcctacgcggcgcgcgccacggtcaaggtgccctaccagtccaggggcaccggaggctacaagcgcgccgtgctggacttcacggccatcgccaaccgcacccgcgtcgtcttccagagcaccttctaccacatgaagcccgacggcacgctctgcggcccgctcgtcgacgacgcctcgctcgtcggcctgcgcaagaagaagcccgcgcgccgcctcatgcagctcctgtaagcggtgcttccacgtgcactacgcccggacggaccgcgcaagcgatggtgtaatacggctggtatgtgttttttggtttggtgtgtgcgtgcgtggtatacgcgtgccgtgcgcgccctgtggctgtggctgcagtggcgtcgcgttgggtgttttcttgttgtgacgaagaaaaaagggtatgggttggggtggtccgctggccggcgcaccggggttttaatcaacttatattaacctgatgaaggtgaaggtg

SEQ ID NO: 21729 - DNA, 604 bp, Zea mays
  Clone ID: LIB3354-088-B7_FLI
gttctctcgtcaagcagatcttcgtccacgggcggcatggatggcccgagaggcctcgcgccggggcgcgggcgcgggcgtggggaagggcggacggtgccgccggaatggatcggcggttccgggtccgggcagggcgccgtccccgatggctcgtggagttacagctgggggtggacatcgggccccgaaggtggctggggctatggccacggctcggcgcagccccccgcggcgctgcagacgggtttgcctacggcggcagcggtggtggaggaagcgggcgtggcggaattgaattcagcttcggtggcctatctggcggtttcggctggggagccggtggcgggccgtttggggttggaggaggccacggcagctggagcgcgcgtggtggtgggttcagcggcggcgggaggcagcggccaccgcgaggccgcggacgtggcagcaactgaagaaggcctattagcatctgggagcatagtctatactggttgtggcatcatggcatgaatgactgtacccgtaaccgtaagcaatacgcctttgcttcaaactgtgttcaacagttgacactcttctaatatatattactccatct

SEQ ID NO: 21730 - DNA, 419 bp, Zea mays
  Clone ID: LIB3354-088-C9_FLI
gaccattcgtttctcgcgagccatcgcttctgtaattctcaggcaccccgctcgatctcatcctaatcggcatccggaagaaatggccaagtcgaagaatcacacggcgcacaaccagtcgttcaaggcgcacaagaacggcattaagaaacccaagcgccaccgccagacctccaccaaggggatggaccccaagttcctgaggaacctgaggtattctaggaagggcaacaaaaagagtggtgaggctgaagctgaggagtaggaaggaaagcatggctttgtttcctctgtttttagctcagttccacctttaggacctggggttttgctaaagatggaacttaagtggtgttactgtatgatggcaaggaccttttgctgccgaaggttatgttttgaagttcatgctacctttt

SEQ ID NO: 21731 - DNA, 543 bp, Zea mays
  Clone ID: LIB3354-088-D9_FLI
ggatttcatgaagcgccccaagggataggaaagtctacggaattcatgcagttctcttttcgctgctgaggagtttattttgtatctgggagctgggagtggctgggaccttgggttaagctctagtgctagatcgttcgttttggtctgcactctgcacagtgcacagacccttcccccgtgttcccgaatcccgaatcgcgacccaaacagagaggccaggagcggaggactatggccgtagccagacatggcggtgcatccacgagggcccggacaccatcgaggagctgctggaccggcacctcgtgaagaagcccgcggcgggcccggacgaggagtcggcggaggcgcggcggcggctgacgagctcccggcgggaggcgctggccctgtaccgggacatcctccgggcggcgcggctcttcgcgtggaccgacgaccgcggggtgccgtggcgggaggtgctgcgcgccaacgccaggcgcgagttcgaggatgcccgcggggagcgcgacccggaggtggtggcgcgcctcctca

SEQ ID NO: 21732 - DNA, 848 bp, Zea mays
  Clone ID: LIB3354-088-E12_FLI
cggggagccggcattcagcgtgctcgtctccaggttcttcctcggcgagcacttcccggcgccggtctacttctccctcctccccatcatcggcggatgcgcgctcgccgccgtcaccgagctcaacttcaacatggttggattcatgggggcaatgatctccaacctggcattcgtcgtccggaccatcttctccaagaaggggatgaagggcaagtccgtgagcgggatgaactactacgcctgcctctccatcatgtcgctggtgatcctcctgcccttcgccgtcgccatggaggggcccaaggtgtgggcagcgggctggcagacagcagtcgccgagatcggtcccaacttcgtctggtgggtggcggcgcagagcgtgttctaccacctgtacaaccaggtgtcctacatgtccctggacgagatctcgccgctcaccttctccatcggcaacaccatgaagcggatctccgtcatcgtcgcgtccatcatcatcttccagacgcccgtccagcccatcaacgcgctcggggccgccatcgccatcctcggaaccttcatctactcccaggccaagcagtagccgcccttggcgcgcgcgtctggctctcaggcctcagttcagttcaccgccgaatcagctcggcgctcgaagatataacagattatataacttttgaggatatctacctagcttgtataatagtattattactagatcctctcttctttttttccgtattttctttttcctaggactagcttattactagatcatttcgtcgtcgtgttttcactatgactatgatggcgtagagagagagagatggatccatctaaat

SEQ ID NO: 21733 - DNA, 1584 bp, Zea mays
  Clone ID: LIB3354-088-F10_FLI
gctttgctttgcttacgtgctgcgctgcgcgctccgaccaggcccgccccgaccggcgatgcagcggtggctcccggcgctcctccgccgcgcggcgcccggcggcggcgcggcgcggctcctcgccacgtcctccctcctcttcgacgacacgcaggagcagttcaaggagagcgtgcgcaagttcgcgcaggaggccatcgcgccgcgcgccgcggccatcgacgcctccaaccacttcccgcgggacgtggacctgtggaggctcatgggggacttcaacctccacggcctcaccgcgcccgaggagtacggcgggatggggctcgggtacatgtaccactgcatcgccatggaggagatcaccagggcatccggcgccgtcggcctctcctacggcgcgcactccaacctctgcatcaaccagctcgtgagtcgtcgtgactgccgctctggttgtttatggcaggcagaggacacgcgcggtaaccaaatcatttgattactcacccaagcggcaatgctacttgttgtgtgcaggtccggcacggaaacccggagcagaagctcaagtatctgcccaagctgatcagtggggagcatatcggggcactggcgatgagtgaacccaactctggctctgatgtcgtcagcatgaagtgcaaagctgagaaagtggacggtggctatgtccttaatgggaataagatgtggtgcaccaatggcccgtctgctcagacactggttgtttacgcaaaaacagatctagctgcagggtcaaaaggaataactgcattcataatcgagaaagggatgcccgggttcagtactgctcagaagttggacaaacttggcatgagaggaagcgacacgtgtgagcttgtttttgagaactgctttgtgccatgcgaaaatgtcctcggtgaagaaggcaaaggtgtttatgtcatgatgtcagggcttgatctggaaaggcttgtattagctgcgggccctattggccttatgcaggcatgccttgatgttgtacttccatatgttcgccagagggagcaattcggccgtccaattggtgaatttcagttcatacaggggaaaatggctgatatgtacacttcgttgcagtcgtcaagatcatttgtatactcagttgctagggactgcgataatggcaaagttgatcgcaaggattgtgcaggagtaattctctttgctgctgaaaatgcaacccaagttgcacttcaggcaatccagtgtcttggtggaaatgggtacataaatgagtacccaactggtcgtctcctgagagatgcaaaattgtttgagattggtgccggtactagtgaggtaagaagaatgataattggccgtgagctcttcaaagaggactgaaacttctattttgcaagccagatatcagagcatattgttagctggaggaggtgagggcgatttagatatttagcaaatcacccctgtggttcaatgcttttgtataaccgcagacatacatcaaataaagttcacttgtacttgctgcttgcagtggctctatttttctgtcaataaagttttttatgtctc

SEQ ID NO: 21734 - DNA, 1323 bp, Zea mays
  Clone ID: LIB3354-089-C10_FLI
gggcatcttgcggtgaagcatctaatctgagcagtcagtcgtccccccgctcgcggccgggctactgctggtcgtcaagtactcaagttgtaggcgtgcagccggggcgtcggccgctagctgctgtcagcacgcgcacacagcagcagggtggtcgcccgcgggccggtagccggcacgcggtcgcgacaagccgatagcaacagcaagcgaggcccaagttcagtccccagagagcggcaagctaggtctgtcatcttctctggagggttcagaaccaccgagaattagctgtctttgaggagtacaataggaatggatgatgctcaagggtatcaagaaggagatgatcatgacttagtgctgcagaaacaagaatggatcaaaacacaagacatgctcaagagtaaacttattcttgaagatgaatttgcctggagtttaccttcggtgggctcaggtttagatgaacctgagtggtgcaaactgaagtatattggtgggactgacatcagcttcttgaaggaagacccatccacagcatgtgccgcggtggtagtcctcaatgtcgatactttagaagttgtccatgaagagttcaatgttgtccgactgcaagtgccatatattcctggttttcttgcattcagagaggctccagttcttcttggactcttggaaaaggtgaagatcaatgcacctcatttctgccctcagttgctcatggttgatggaaatggattgctccatccgcgaggttttggtttagcttgtcatctcggcgttcttgcagacattcctactgttggagttggaaaaaatctacatcacgtagatggccttaaccaatcagaagttagaagactgctcggatcaaaagagaactgcaacagggaactggttttgttgactggacagtctgggacaaaatggggcatggcggtgcgctcctgccctggttcgtcgaagccaatctacgtctcagttgggcatcgcatctcacttgattcagccacggcgatagtgaaatcttgctgtagataccgtgttcctgagcctacaaggcaggcggatataagatcaaaggtcttcctgcagaagctccaaaagccacggcagtgacaggacttcctttttgttttttttcctcaagtatgttacaaactgggatcctgaccgtcttgcttgctgtagtcgagttttcagaaacaaatatgtaacatgatagaattgtcacttgcgaggttgccgcaccgtagtttgtaaaacagaccgatgatttctctgaatttgtaaaacatcaccaggcaaatagccgacagc

SEQ ID NO: 21735 - DNA, 859 bp, Zea mays
  Clone ID: LIB3354-089-C8_FLI
gggggcggcaagcaaccacgggcggagctcggagcgtcctcctcctcccgtctataaattcccctccttttcttcctccatatataggggccatcagatccaagaagagggaagagcaccaaggaccttcggcgcccgttcaggatccacatcttcccgagcgagttcttggttgacctcttcctcttcggaccacctccaaggctcttggtgtagcttgccactctcaccaatcaagttttcatgtctgatctcgacattcagatcccaactgccttcgatcccttcgctgaggccaatgctggggactctggtgcggcagcagggtcaaaggactacgtacacgtgcgcatccagcagcgtaatggtcgcaagagcctgactaccgtccagggattgaagaaggagttcagctacagcaagatcctcaaagatctcaagaaagagttctgctgcaatggtacagtggtccaggacccagaacttggacaggtcattcagctccagggtgatcagaggaagaacgtctcgaatttcctcgtccaggccggcattgtgaagaaggagcacatcaagattcatggtttctgagcaaccgccgggtccatagcaaaccaaccctgcatgcagggccagcttattatatataatatctgaggtggagcatatctatctggctgtgtactacaagcaggcctagtacgccgcctgcgcgttcctcctattacacataacacatatagccccctccctgcgtgtatgcttgttgccgtcgtgtcgaatcttgtactacgaggctccgtcgaacctcgatggcttgcttctttatcagaacatgtttgaataaacgctatttggt

SEQ ID NO: 21736 - DNA, 1034 bp, Zea mays
  Clone ID: LIB3354-090-B4_FLI
gagagagagagagagagagagagagagagagtgagtgagggaggcgccgccgcgccgacgccgagtcctttctccatcctgcatctgccgctgtttccgacaggatgtttctcacgaggacggagtacgaccgcggggtgaacaccttctctccggaggggcggctgttccaggtcgagtacgccatcgaggccatcaagttgggatccactgcgatcggtttgaagacaaaggatggtgttgtactcgccgttgagaaacgtgtgacctcaccactgctggaaccaagcagtgtggaaaaaataatggaaattgatgagcacataggctgtgccatgagtggacttattgctgatgctagaacactagtggaacatgctcgtgttgaaactcagaatcataggttctcatacggagagccaatgactgtagaatcttcgacacaagctatctgtgacttagctctgcgttttggcgaaggtgacgaagagtcaatgtcacggccatttggagtctctctcctaattgctggacatgatgagaatggacctagcctgtactacactgacccatctggtacattttggcaatgcaacgcaaaggcaattggatcaggttctgagggagctgatagttccttgcaggaacagtacaacaaggaattgaccctccaggaggcggagaccatagccctttctatcctgaagcaggttatggaagagaaggtgaccccaaacaacgtcgatattgccaaggttgcccccaagtaccacctctacacccctgccgaggtggaagccgtcatcgcgaggctgtgaaacgcttccgagctcttgctatccacgtcatcaatcggtaatagacgacccttgtacgaagcgtgggcaccatggtccttgattatggcttgattatggcaaggacagtcgatgttagtttgattcacagctcagccgggctcacttgtctttttaaatttttatgaattagcgttgagaactttgtactgccaagaaagttcattttttttaccc

SEQ ID NO: 21737 - DNA, 1892 bp, Zea mays
  Clone ID: LIB3354-090-E10_FLI
gtctgcaagcaatctacgcagcacactcgttctagaaaaactaacgcgataaggctcaagtgggtcaacaaaaaaaaaggaaggaaagaccaaacgataaggctggaggcttagctagaaaggtccctagcgccctgcgacgacgcttggtaaatagatccttttctaaagtacacttcgattttctcagtttgttgctcagtgcgggtgtcgcggtccccgctttttccaggatcacagcgttgttggacgactgcgcatctaccttcgcagttatctggaatttggagttacagtccacgttcgcatgaattggaactttcaactgccaaaacatacaattatctggattttggagttatagtccacgttcgcaaaaattggaactttcaactgccaaaacatacaagatggcagtaaaaacacttgctgaactatctctacaagacagagatgtgaccattcaagtccaagtcaacaggaaatgggaatttaaaggaaataccgatgatggtcctatcttacatgttgacatggttctaacagatgcaatgggaaatgcaatctatgctgaaatgcctagcaaattaatagagcaaaaaggttcattgttacagttaggcaaagtatactacattcgacgcttcagagttgcaaattcaaagtcacagtacaaagttctcaatgcccctctcatgatctatttgactctttactcgatcattgatctttgtcgtgatccaccatctacttttccactttatgtctacaatcttaccacgtatgatgatatagatgcaaatggaccaaaaagtaaagactttcatgcatctctatatctaaatggtggtgcagcttgccactggaatccatccattactgaagctgaaccatactatgaaaggatgaaggttgtaagtgcactgtcaccattactagaatacttgatgatcaaccgtggtggtacagagcatgtaatgcatgtccaaataaaccatccatgcaatcagcagtgtcctcatgtcgtacatgtggctctacagatgctattctgaggtacaaactgaacttcatggcttccgatggcactgctgaaatgcgaatgttctgtttcgacaacattgccaagagaatcattggaaaaccatgcgcttctctcttaacatcagctacaagcacttccaatattccaccagatttagcagcgattgtgtccctcaaattcacatttgttgttgtttacaatgaaatgtcgtttcaagtttcagaaaaagaactcttcatcaagtcagtcatagcttcacatggaagagatctaactttcccgtcacccaaactaaagattccagtgcaaccgtcaactccaacgcaactactaggtgcagcaaaacagcaagtttcaccttcttcagcactgtccaaactatcgactgccatttctccagagaatagtcctcaaactgaagacaatcttcaaaatgaagaccagaacatactggcttttgaatcaccaccaaaaagggctaggcgtaaatccttgaagtttgactgtgacaaaaatctacacgatgaataaaaatgaaacaagtctggcttcaaagttggaacttctacgcagcagcacatgtatatagcttttaccttacttggaaaaaaatgtctagacaacttttgttgatgcatcctactatatatgtatgaagtctcatgtactcctaaaaatatatgtatatatgagtactactaaacaagaactgtttgaagcttgctacaccctatggtgacaatttactatgtaatgcttacagtcgtccgtatcgctctatatacatgtgtaatagtataataatgtcccttctatatgatttagatataaataagtattaaatttc

SEQ ID NO: 21738 - DNA, 820 bp, Zea mays
  Clone ID: LIB3354-090-F10_FLI
ctcgtctcgtctcgtccacctccccagcggcgcgtgcgcgtgaagcttgaggcaatccccgctccgtctagcggccctgcgcaatcagtcagggttccatggccaacagcaacctcccgcgccgaatcatcaaggagacgcagcggctcctcagcgaaccagcgccggggattagcgcgtcgccgtcggaagagaacatgcggtacttcaatgtcatgatccttggccccgcacagtcaccctatgaaggtggagttttcaagcttgagctattcttgcctgaggaatatccaatggctgccccgaaagttaggtttctcaccaaaatttaccatccgaacattgacaagcttggtaggatatgcctcgacattcttaaggacaaatggagtcccgctcttcagatacgtacagttctgctcagcattcaggcacttctgagtgccccaaatccagatgatcctctctcagacaacattgcgaaacactggaaatcaaatgaagctgaagcttttgagacagcgaaggagtggactcgcctgtatgcaagtggggcattgtaaccaagtgttgtttcagatgtgatgttataacatttccatagtttggggccgactgaatacccctcttgcttgatgagagcaaatttgtgaaatgttgcaatggggtcaaaaaaaattgtctaatcgtgctttgtacttgtggctgtacctcctcgctgcagtgcccgtgagcatcaaagcaggtgttcctttgtataccccctatctgaccatcagttgcatgtgtttcttgtgctgtgctctgaggattcagattt

SEQ ID NO: 21739 - DNA, 1309 bp, Zea mays
  Clone ID: LIB3354-091-H8_FLI
ccgatcagtgaggatttcactctaggcgctccgattccgggtacttctggtgccgcgaagggtatgaattcgtttaccttgcctcatccgcccccaaagtttcacggttctctgtatgatggtcatccatttcatccgattgctcctgaattattggggaagttgccgaagctgccgtttccagtcttcgatggcgataatccacgtctgtggatctcgcgttgtgaaacatatttttaacatgtattttgttgatcatgtggcttgggtgcgtgtggcttttatgcatttgtcacctgttgttgcctgttggtttcaatttgtctagcgcaagtatatggatgtgtcctagccactgttgtgtaagttgctgaatgagtgttttgggagggatcagtatcagtttttgcttcgtcagttgtttcgcatcagacagagtggcacagtggcagaatatattgagcgattttccactttggttgatcagttgacagcttatgaagcagcgcatgatcctttgtactttaccacacgatttgtggatgggctccgaggtgacatacgtgccgttgtggtgattcattgaccaacagatttagacacagcatgcactttagcattgttgtaggaagaagtatctgaaccagcccatcggaaagaggtgcgcaagtttgagatgactccttggagcaaaaccacaacatctggcccactgtcgttaccgatgccactaggggttgacaagggtgttcggtctccatctcagcttgagaaacctgtggggagacctcaacgtcctgccgaagataagatgggagcacttcgagcttatcgtcgtgctaggggtctgtgtgataggtgtgccgagaagtgtgtcacacccggttttggaaggcaaaccgaatgtgaaacatgtacgtgacaggatcagaaactcacgtacacagtgattatataattggacgtcatcacacaatgctcaaagtaaatagcggaagagtattttattacaacaagatgtctgttgggggtatgcttcgtagccgaagatcctgaagaaagaaacaccttcagcagatcctctcaaaagcagtgctgaagctatcacctataaagctttggcatagcgacatgtctcaagacgaaggagtgaaccgacttaaagatgaaatgaccaataaacccatgatagtttgtgtcatgactgtaatcgattgtaaagggcttaaatgtaatttcacacaggctacgccctgtgcttataaatagatgaacagtacacccgtactgttcacgcaatcttgtaatc

SEQ ID NO: 21740 - DNA, 1278 bp, Zea mays
  Clone ID: LIB3354-092-A6_FLI
caagttctctggtttaattcagttctgaatcggagttcagaatggggtgtatccttcatgcttttgtgaaactacattatatttctttcctcccccagatattagtttgctatcatatcttcctttatgttgcttttctgagcgtgctgcctgttccactcaatttatgcatttaccaaaataacaaaacatggtacactagtgctgatgtgaatcacctacctctgttctccttgacttgcttaagacccattcaattcattggtactttacatcggcgcttccccgttccatgatagtggcataccctctctgcatggttggtgctcttcttgatagaaggatagtaccatacatgtttccggtcttcttatttgttgtgctctattcaaaacttccacataaggaactccgtttcataattggctcaattcccatgtttaatgtgtctgcttcactaacagctagcagactatataataaccgaaagaaagctgggtggaatttgctttttattctcatgcttggtgcctttcttgtcagtctaggatattctactgtgactttcatggcatcctacaacaattatcctggtggctatgctttaaaggctctacatgaagcagattcttcagtgaaggaaaagatggtacatattgatgccttcactgcaatgagcggggtttctcgtttctgtgaaaatgaatatccttggagatactccaaggaggaagaaattcccatcgaagaatttgagaaaaggaatttcacctatctactgaatgagcaccgctccatcggtggctaccagtgcctgttcgctgtggatggattctccagagtaaaacttacgccccaaatccccccgctctctctggtgaaagaacccaaggtgtttgcacatgggaatacgagagaccctgacattctttcactgagttggcccggttgtccttgagggcatggggacaccggacacccagattcctgtggcaggaccactaactgccagcagtgaagatgtgtttgagtcagtccgcgtgacacatatatggtatacatctctgggtcttgccatgaagctaccttacctgcaaatctagaatggggcccctcctcccctagatcccacggcttcgaaaccacagctttaaggaacactgccattttcaggtgcaaatttgtgtaacattttagagccggaagaaagacagaaagcacacggggggtggggggaatcatagcaattagcaaccttgtatttacaagttggtcgat

SEQ ID NO: 21741 - DNA, 773 bp, Zea mays
  Clone ID: LIB3354-092-A7_FLI
ccgacagcaacgacacgacggacgagcgcaagcggaagcggatgctgtccaacagggagtcggcgcggcggtcgcgcgcgcggaagcagcagcggctggaggagctggtggcggaggtggcccgcctgcaggcggagaacgcggcgacgcaggcccgcaccgcggcgctggagcgcgacctgggcagggtggacggcgacaacgcggtgctgcgcgcccgccacgccgagctggccggccgcctgcagtcgctgggcggcgtcctcgaggtgctccagatggccggcgccgccgtcgacatcccggagatggtcaccgacgaccccatgctccgcccctggcagccgtccttccccccgatgcagcccatcgggttctgagaatctgagcctcagccggcgggagagagccaatttctgtcgtcgtgccgctgtctatctcgtattggtatctattcataaatcatcgttgtcatggtttgctcttcttgtcagtgttataaatttgcttcttgttagtgttataaacttggccatcggaaagtagtaataatgatcagttcgtcgtggttctcaactttgtgtggtgaatgtgaatgtcaaaaaagatgtgtttgtagttgtaatatcttgtttggagttgtaatatcttatcttgcttgtgaaatcgaataggcctatatatgttatgctgtacgagtatgtggctccaaatttgtgagccttctgtctgttatgaatccaatttgtgagcacacatgaatcaatttcgag

SEQ ID NO: 21742 - DNA, 736 bp, Zea mays
  Clone ID: LIB3354-094-A3_FLI
gcaccaaggaccttcggcgcccgttcaggatccacatcttcccgagcgagttcttggttggcctcttcctcttcggaccacctccaaggctcttggtgtagcttgccactctcaccaatcaagttttcatgtctgatctcgacattcagatcccaactgccttcgatcccttcgctgaggccaatgctggggactctggtgcagcagcagggtcaaaggactacgttcacgtgcgcatccagcagcgtaatggtcgcaagagcctgaccaccgtccagggattgaagaaggagttcagctacagcaagatcctcaaagatctcaagaaagagttctgctgcaatggtacagtggtccaggacccagaacttggacaggtcattcagctccagggtgatcagaggaagaacgtctcgaatttcctcgtccaggccggcattgtgaagaaggagcacatcaagattcatggtttctgagcaaccgccgggtccatatcaaaccaaccctgcatgcagggcatcttattatatataatatctgaggtggagcatatctatctggctgtgtactgcaagcaggcctagtacgccgcctgcgcgttcctcctattacacatataggcccctccctgcgtgtatgcttgttaccgtcgtgtcgaaccttgtactacgaggctccatcgaacatcgatggcttgcttctttatcagaacatgtttgaataaacgctatttggt

SEQ ID NO: 21743 - DNA, 924 bp, Zea mays
  Clone ID: LIB3354-094-B7_FLI
gatttgcgaagcaagggacgggagaggaacccgaggaaggcgaaaatgatctaccgcaactggtcgctgctctcgtccacagtcgtcatttggggcggcgtcgccaccgccggcctcgccggtatcttcctcttgggcggcaaggagaaattcaatggttatctgtgccgcgaaggcgagaggcttaggcagcaggacagagccacgatgggccgaagctaagcgttagcttctttggtatctcaagggagcaatagcccttggaaatttcacaagattcctgcgtccctaccagaacaagtccctatctaggatggaatccatccttctgcaggctttcactttcctgataataacagtaacaataaattgacaatggtttgtgttcttctgcaacctttttggctccctggtttcgcaagggttccgtgctttgtttgaagtcatcacttgcatgcgttggtataaaaaggttgctgttgcatttggcgtacgggactaaaaaaaaactgggtcctgtctttgacacgtagccgacgattttgccacatattgtacctacccatgatgttcagtgttgcttacgcgcgataaatgtgcagcagcaaggagtcagtgttgctacagtggcatttgagtgatgtgcagttactaaccaaccaatcatccactgcacgcggctcttctcgccgtggtttaggctctgtttgattatataatccagcttatggattatataagtacacctaatgacttgtttatagattatcataatctagttatctagattatataatccatctaataaaatgtattgtttgtttatctttcgacttatttaagatggattatataatttagagggcaaataaatatggccttaggctccctctaggatggattatatgatctagcttatgtatt

SEQ ID NO: 21744 - DNA, 962 bp, Zea mays
  Clone ID: LIB3354-094-C6_FLI
gatgagctgaccagcctcaaggactacgtgaccaggatgaaggagggacagaatgacatatactatatcactggtgagagcaagaaggcagtggagaactcccccttccttgagaagctgaagaagaggggctatgaggttctgtacatggttgatgccattgacgagtatgctgttggtcagctcaaggagtttgagggcaagaagcttgtctctgccaccaaggagggtctgaagcttgatgagactgaggacgagaagaagaggaaggaggagctgaaggagaagtttgaggggctgtgcaaggtcatcaaggaggttctgggtgacaaagttgagaaggtggtggtgtctgatcgcgttgtggactcaccgtgctgccttgtgactggcgagtatggctggaccgccaacatggagaggatcatgaaggcacaggccctgagggactcgagcatggcgggctacatgtcgagcaaaaagacaatggagatcaacccagagaaccctatcatggatgagctccgcaagcgtgccgaggctgacaagaatgacaagtcagtcaaggatctcgtgatgctgctgttcgagactgctctcctgacctccggcttcagcctggatgaccccaacaccttcggcaaccggatccaccgcatgctcaaactcggtctgagcatcgatgaggacgagcctgttgaggcagaggctgagatgcctcagcttgaggacgacgctggtgaaagcaagatggaggaggtcgactaagtgtcgcatcgcatgcttgccgtttatcttatccctagctaagctacctgtgatagcttaattttcactattgttcgaggtttttggcacgttatcggttgtcctgctggccaggctataagtctggtttatctgttatgtttaccctttttaacagtttgtcgttattattcgtaatggtaaaaatgtagtac

SEQ ID NO: 21745 - DNA, 1691 bp, Zea mays
  Clone ID: LIB3354-094-E12_FLI
ccctccggaaccctagcatcctccctcctcgctcctgggatgccccagtagctccgatcggcgcctcaccgccatggatccgggcggcgggggcgggatgctcctggaggacttcggccagcgcgtggacctcacgcgccgcatccgcgaggtgctcgccaactacccggagggcaccaccgcgctgcgggagctcatccagaacgccgacgacgctggcgccgggcgcgtccgcctctgcctcgaccgccgatcgcacgggagggcgtcgctgctgtcccccgcgctcgcgcagtggcagggtcccgcgctgcttgcttacaacgacgcggtgttcaccgacgaggacttcgccagcatctcccgcattggagacagcaggaaggtcgcccagacgtggaagactggccgcttcggggttggttttaactcagtttaccacttgactgatttgccatcgttcgtgagtggcaagtatgttgtcctattcgacccccagggtgcttatctaccaaatgtgtcggcatcaaatcctggaaagcgcatcgactatgtcagttcgtcagcaatcacaatgtaccatgatcagttttcaccctactgtgcgtttggctgcgacatgaaagcatcatttcagggaactctgtttcgttttcctttgaggagctctgagcaagcatcttcaagtcggttatcaagacagtcatacacagaagatgatattttatctctttttgcccaactgtaccaagaaggcgtatataatctgctgttccttaaaaatgttctatcacttgagatgtatgtgtgggaatctggtatgaccgagccaaaaataatatactcttgctacttagggccacagagtgaaaagctgtcctggcatcgccaagcccttgtcaggttctctggcactcctgttgaatcttctaagcagaagctggactctttctcgatggattttatatcagaagcattcttgggcaacaagattgagaagaagagctctacctattttatcatccagggaatggcatctgcatcaagtaaaattggtatttttgcaactgcagctgccaaggaatatgatcttcacttactgccttgggcttctgttgctgcttgcatctccaacacagggcttgaggatactgttctcagacagggtcaagctttctgttttcttcctttgccagggtggtaagcttcgctctgattggaacaggctactgttggaagatgttgtcgctccgttgttcagagaactgctgatgaaattgcggacgctttctgactccacaatatcatattattcactgtggccaactggtttatatgaggatccctggagtatccttgtggagcaaatttacaaggttatttacacctcgccagtcttgcactcagagattgaaggcgggacctggatatcaccggctgatgccttgcttcacgatgagggattctcaggaagcaataatcttaatgaagccctcgtgttggtaggcatgccaattgttcgtgtatctaatgcaataggcgatatgttttcaaaattttatatgcagtctatgctcaaaatagtaagtcctgctatagtgaggcatttcctcaaggattatgctaaacttgctacgctaggaaagtctcataagttaatattattggaatattgtcttactgatgtttac

SEQ ID NO: 21746 - DNA, 619 bp, Zea mays
  Clone ID: LIB3354-094-E7_FLI
ctcgcccagatccgaccgcggctctgattttccaactgacgcaggagcggtgggtctgaccgggcgcgacccgtcttctcatgggcgagacagcgtgatccctgcggctcgattgtaaattcgtgatctttcggggcattccttggtttgtctgtcggtgctggtggtgctgcgtttggagggccgcggagatgggcgtcggcggggagaagttccagctggggacggtgggggcgctgagcctctccgtggtgtcctctgtctccattgtcatctgcaacaaggcgctcatgagctccctcggctttaacttcggtgtgagatctgactgtgttcctgccacggtttcttgattattatgtgtatgctcgtgctggatgttatgtgattcgtgtagatctgcgttctccattgggggctgcagttctgttctggtgcatgagatgtgtgtgcaaggttcagcacttcagatggtgctttagggcttaagcttcagtggtaactttgaggcagggctaggagtgtcaattggtagttgtcgaaacttcaactgtcgttgccatttttttattgtgaatggtgaaacatgtgtgaccctggtgctaacttgctttctgtc

SEQ ID NO: 21747 - DNA, 1571 bp, Zea mays
  Clone ID: LIB3354-095-C11_FLI
atggcgtccaccgcgctggtggcagtggggggcgccatttctctcggtctcgtcgcctcctctggcgtcgcgtcctgctccctgcgcgccggcggcgactcccggcggtttggcccccgactcgtcctcctgcggagaggaggcgccgagggggaggggacgaggacacggaattgcccaatatttcgttgtgccaataaggtggacgttgtgaccgaggatgacagcgtcgatggtgacgttaccgacgatggagaagaccttgaggctgcagctgatgacgccattgatgctgatgttggtaccgaagatgaactggagtcttcgctgcctgaggacgttgagtggataaagcagcagccacttccttatcctttggatgctctggagccatacataagcaaggagacggtggagcagcactggggagttcaccagcagattcacgtggaccggctcaatggcatgatcggtggcagcgagtgggaaggcatgtcgctggggcagatgatgctcgcctccttcaatgagggcagggagcagccccatcctcccttcttccatgccgcacaggtatggaaccatgatttctattggcgatccatgaaacctggtggcgggggcaagccaccggaacggctcctgaagtttatcaatagagactttggctcctacgagggtatgatccggcaattcatggatgctgcactaactcagttcggttctggatgggtttggctttcctacaaaggaagcggtttgccttatgtgaaatcgagaagccccatcccgtcggacaaccatggtaggctggtgatctcaaagactccaaatgccatcaaccctcttgtctggggccactctccactcctcgcgattgatgtttgggaggtatattttttacattgtacttttcctttcctttgcttttcataaagtttacatctttactaacatttatcttcacttccggggacagcatgcatactatctggattacgaggatcgaagggctgactatgtttctgcgattctggagaagcttgtgtcgtgggaaacagtcgagtccaggctcgcgaaagccgttgcacgggcggtagaaagagatgagcatctccgcagaaggattctaaggaaacagcgtttagctcaggcaaacggacagagcagagctaggtctcgcgctcggcaagggaggcaaggagaccaggaagtcgccaggagccgtcccgtggaggcatgacaacgcagctggtaaatggggtgcatcaggacaccgttatgtagctgaatggcgatcaaccttttccctggtgacagtcttgagagcttgcatggtcatattggtctgttttaggccgcatccaccctcagcactgcgaggagggtgggataagttttgctaagtaggattaggggtagaggtagagatgtaaaatagacagaatttcgtcagacttggactcttggagaattcgttttgctcgttattctttgtgggatgtgagtgacaatgtaagaggacatgattgtgtgttctgatttctacaatccagtgctcggttttggtg

SEQ ID NO: 21748 - DNA, 1134 bp, Zea mays
  Clone ID: LIB3354-095-F4_FLI
cgccgccgaccaataaggagcctcgcacgccacgccaccaccgccgccgcaacccacgcgatggcgccaccggactccatctccacgtgctcctcccttcccctcgccgctgcgcccatgtccgaaccgacccccttccccttcgctgcgtcgccgcttccaaacccgctcgtagccaccgcctccttcctacagcaccacctctcccgtttggcttcccacctgaacgtcccgcgccccgccctcgctgccgcggctgcgcgcacgccgggcccccagggcgcctccctatctctctctctcgcgcccgatgaggtcgcgcgcgctcttaccggcactcccgtcttcactgtctgcaactccagcaacgagttcgtgcttgtctccgaccctgccaccggcctccgctccctcggcctcctctgcttccgttcggaggacgccgacgccctcctgtcgcatgtgaggacgcggcaaccggtgctaggcaagggggcaaaagtggtgcctattacacttgatcaggtctatatgttaaaggctgaaggtatcgcatttaggttcttacccgaccctcttcaaataaagaatgcactggagatgaaatcgggcttaactgcttttgatggtgttcctgtttttcagtcagatctgctggttgtgaagaagcagaagaagcgctactgtccagtatattttcaaaaggaagacatagaaagagaacttacaagggcttccaaaggttcaagagggtcagccttatctaagaaaattatggttggaagtttggaggatgtcctgaagaaaatggagataaatgaaagagattctggctgggatgatttgatctttataccccctgggaagagcctcaaccaacatatcaatgaggtatcagcatgattttgttccacggtgatagctcagagtttgaacagactattcactttaaatgctatgatggtcagccaaacgaaatatcaaattgctgcctgagcttttcctttggatagctattttcatggtcagctttgtcagggaaaattaactaaagtgatagaatatggctgtgaaacaattttcttgttgcttcgattcacaaaattaacacaggttacacaagaagatttgatg

SEQ ID NO: 21749 - DNA, 1095 bp, Zea mays
  Clone ID: LIB3354-096-E8_FLI
ggctcacggctccttgctgcacgccgtatgctgtcgcccgcaccacaagtccacgaccagcactcccttcatagaccccccctccggcgaatccctcaccaatccagcgttcacacgtccttcttgcttcagtccactccaaggttaggtggacaatatgtcaagctctaaccagatgtgttctgatggcaagtttgggagaggtcctcgggagcttagtggtgctgtggacttaattagtcgctacaagctgctgaatcatcatagtttcttttgcaagaagcctttgccattggcaatttcagatacaaattaccttaacaatgttgtgggtgacacagaaattcgtaagggggaagggatggagttggaccaactctttcagaactcatgttcaagtgagaagactgcttacattcagccatttgacatggaaacactaggacaagcatttcagctgcgagaaactgcaccagtagacttgccttctgctgaaaaaggtacaccaaccatatctgggaaatccaaggtcaagtccaaggataaagtgaagaaacataagaaacacaaagagaaagatagagacaaggagaaggagcagaagaaacacaaacatcggcataaagatcggagtaaagataaagataaggataaagacaaagaaaagaaaaaggacaagagtgggaatcatgattcaggtggtgatcattccaagaaacatgagaagaagagaaagcaagaagtaactggaagttcagcaaatgtccaaaatcacaagaaaacacaaaagcacaaaattcagtgaaatgtatgatggacttcgttaattgtcagcagtgcatgtttctattttagttcaactccatttatgttgttaatgagtggctctgaagtgttccttttccatatcttttctggcaaagacgcagttatcacagatggaaaatatttaatactacgactgctacagaggaaacaagatacctgtaccgatggaatatgattcgtgtattattccttgggaacttgaacttatcatatggagttgtaaattattttgtcatttcgacttatgttcacttcatcattgccttg

SEQ ID NO: 21750 - DNA, 1165 bp, Zea mays
  Clone ID: LIB3354-096-G6_FLI
cacgatctctcctcgacggctaacccggattgccgtctcaggctcgggatccgggcgctcgcggcgatggacggcggcggcggcgctggcggcgcggagggggagctcacggcgcaggagacagcgctctacgaccgccagatccgcgtctggggcgtcgatgcccagaagagactaagtaaggcgcacgtgcttgtgtgtggcatgaacggaaccaccatcgagttctgcaagaatattgttctagctggagttggaagtttatccttgatggatgataatgtagtcacagaggaggatctgaatgcaaatttcctaattcctcctgatgagagcatatatggtggtagatctcgagcccaagtttgctgcgagtctttgatagatttcaatcctatggttcgagtttttgttgaaaagggtgatccatcattaattgatggagaattccttgacaagtttgacattgttgtacttagccgtgcatctcttaaaacaaagaaaaagcctggaggagcaactgaacaacaggagttgacatattctagccttcaggaagctatctctgtgccttggaatagtctaccgaagaagacggcaaaattatactttgctatgagagtactggaggattatgaattatctgaagggcgcagccctggcgaaacaacactttctgatatagatgcagttctggctcggaggaaggatatgtgtgataaaatgtctttgaatgagtctcgtattcctactactctcgtggaacgactgctagcagctggaaagaaggagcatcctcctgtatgtgctatccttggtggtattcttggtcaggaggtgatcaaatcgatatcctgcaagggcgatccagtcaagaatttcttctatttcgatgtggctgacggtaaaggtgtcatcgaggatatcccaccaccaccacctgcaaaataaagcactcagctgcgtaactctcgactcgacttggttcactaatcgttttctgtacccactcagcttcgaacatgtagtagcaacttttagatctagagccatgtgaaaaaaggcaggtttgactttaacccagatgtttagggatttttcgagcagcaaactgtgacagtatgtatgcattgacaatttaaagctgaagtctggaccggtttcc

SEQ ID NO: 21751 - DNA, 1430 bp, Zea mays
  Clone ID: LIB3354-097-E1_FLI
acgagatcacgcttctcgttggatcgaacagctagggtttccaagatgttcgggcgcgcgccgaagaagagcgacaacacacggtactacgagatcctcggggtctccaaggacgcgtcccaggatgacctcaagaaagcctaccgcaaggccgccatcaagaaccaccccgacaagggcggcgatcccgagaagttcaaggagctagctcaggcttatgaggtcctcagtgatcctgaaaagcgggagatttatgatcaatatggtgaggatgccctcaaggagggaatgggaggtggtggagggatgcacgatccctttgacatattccagtcattctttggtggtggaagcccttttggaggtggtggcagcagtaggggcagaaggcagcgaaggggagaggatgtggttcatcctctaaaggtttctctggaggatttgtacaatggcacatcaaagaagctctctctgtcccgcagtgtcctctgctccaagtgcaatggtaagggttcaaagtctggagcttcatcgaggtgtgctggttgccaaggttctggctttaaggtccaaatccggcagttggggcctggaatgatccagcaaatgcagcatccttgcaacgagtgcaagggttctggagagacaatcagcgacaaggatagatgcccacagtgcaagggtgataaagttgtgcaggagaagaaggttcttgaagtgtttgtggagaaaggcatgcagaatgggcagaagatcacattccctggtgaagctgatgaagcgcctgacactgtcactggagatatcatttttgttctccagcagaaggagcatcccaagttcaagagaaagggcgatgacctcttctacgagcacaccctgaccttgactgaatctctgtgtggcttccagtttgttgtgactcacttggataacaggcagctgctgatcaaatcaaatccgggcgaagttgtgaagcctgattctttcaaggcgatcaacgacgaaggcatgcccatgtaccagaggccgttcatgaagggcaagctgtacatccacttctcggtggagttcccagactcgctaagcccggagcagtgcaaggccctggaggctgtgctcccgcccaagccggtgtcgcagtacaccgacatggagctggacgagtgcgaggagacgatgccctatgacgtgaacatcgaagcggagatgcggaggcggcagcagcagcaccaggaggcctacgacgaggatgaggacatgccgggcggcgcgcagagggtgcagtgcgcccagcagtaggcagcagcttggtagcagtgataaagtatttgacggcggcggaaaaatttgtgcgactactgttaggtccaacaaccgtccaagtttacacgcgcgtattaatataatgatcatacttctctttgttt

SEQ ID NO: 21752 - DNA, 2884 bp, Zea mays
  Clone ID: LIB3354-098-A6_FLI
cttcttgcgagttgcgagaacccaccccacccccaaggcgacgacacacacacagagagaggcaagggacggagagggcgaggacgccagccgcagtgggcgcgccacaagcggagcggggggcgcacgcacgcacgcgactctcccgagatccaagacccgcgagatccgcttgccctcgtcgccagccagagcccggagcggatacgtgtccatggcggccggagaggagcaagaagagttctttgactccagggaggtgctgtcgccggcgtccgtctcgtcgtcgccgtcgagttccggtcgccacgacgacggcgggtggctcttcgcccagcagctgctcgaggtctgggtccgggacccgggcagcgtccacgagcgccgccagaggttcgtcaagtccctgggcctcatggatccgagcccccacggcgcgcggcccggcgaggagacgtgctcgaggcctgaggccagagaagaaatcctaccggcaagccccagcaccgagctgttctcggccgtccctacctttgcgagcatgggaggggagccgacagcctccggcggcgacggcgctggcacggaagaggagccggagtgcgtgttcaagaacctggacgatggcacagtgttcgtggtcgacgagatgggaaaggacgggagcttccggagcctcagggagaggctctccaaccggacagtaacagctgcagaattcgagcaggcctttggctcatcacctttcatccgtgagctgatgaggagggtggacgattccgacgaaccctccaccccggagaagactgtgctgaggagaaggaggcggcggcggattgggtggctacgaaggctgggcatcggtgtctgtgttgtcgacgccgacgcagaggaggaagacgatgaggtcaattcgacatcatccacttcttcccggggttgctctaggaaggttgatagggtcaaggtgagaccttacaagaagcggtcaaaggaattatctgcagtgtacaagggccaagtcatcaaggcacatgaaggtgctattgtgaccatgaagttcagctccgatggccagttgctggctactggaggtgaggatggggttgtccgcgtttggcgggtggtggaaggcaagaggcctgatgaccgtcattttgttgacgatgatccttcatgtgtgttcttcactgtcaatgaaaattctgaattggctcccatcaattcctgcgaagggggtaagggcaagcacaataacagctcaaaggtggctactgatccagcttgtgttgtgattcctcaccagacctttgcgctatccgaggaccctgtgcatgaattccgtgggcaccatgatgccatcttggatctttcatggtcaaaaaatagggaattgctttctgcgtccaaggacaaaactgttcgattatggaaagttgggtgcgatagctgcctgaaggttttctcccataataactatgtgacatgtgtacagtttaaacctaccaatgacaattatttcatcagtggttgtattgacgggatggtacgtatttgggatgttcctagatgcctagttgtggactgggctgacagcaaagagataattacagcagtttgttaccgtcctgatggaaagggtgcagtggttgggacaataacaggaaactgccattgctatgaagcatcagaaaaccatctagcactggagtcacaagtccccctgtatggcagaaagaaatctccacttaaaagaatagttggattccagtattgcccatctgatccaaagaaactgatggtgacatctggtgactcacaagttcgcattctcgatggggctcatgtcgtttccagctacaaaggattacgaagtccaagtcaagtccctgcagcatttacaccagatggagatcacattattgctgctagcgatgactctagtatctatatgtggaattatgcaaaccaacttgccccagtcacgagccgtgtgaaaaccgtatggtcatatgagcacttcttctgcaatgacgtgtccgttgcaataccatggaacgccttgcctgcaaggagttctatttctcttgcttgcaacatccccctttcacggcaagaggtctctgaggagctccacaactcgcaagagtctgtgtcatgctgcagtgctgaaggctcacctaaagctgatagctcgtgccggctgccatccggcaatttcactcttagcaatgcattctccgcggagttggcaccaagggggaaagcaacatggccagaagagcagctgccatcatctgattcagtgacaccgtcgtcgtcgtctgctttgcgtaaatctcagtataagttcctgaagacttcttgccagagtgccgccacgcatgcctggggccaggtcatagtcactgcaggttgggatggaaacatcaggtcgttccagaactatggtttacctatgcaagtgtgacacatggtacaagacatgcatctctttgctaattgcttggtcagtggggtatcccaggaatggcagacgagaagtcgcttgcggaacttttacgcctccaggaacttggtttgctgaagggcgacgccccgtccagattatggttacagtacaaagagtttacatgggtgtgtggctgtgctgtgttgctcgtggaccagaagttgtatgtagtccagtggtcctgcgagatctcggcggcacattgcgagagaagggccggggaagatggatcccctcgcagacccaactaactttgcgcgaagagtggttgtatggctgcaatttcattgcattgctgtttgctgcttttctttgttttggcctccctttggggggatctgcagtaaatatatatagagtggatggatgaac

SEQ ID NO: 21753 - DNA, 850 bp, Zea mays
  Clone ID: LIB3354-098-D10_FLI
ggaaaacgaaaaagcccccagccgaacaccactctctctcactctcccggacttcagaggccgaggacgctggagcacgcgtcggtccggcgcccccatggacccagcctgcgaggagctcgagcgccgcagccgctacctcagcgcgctcgtgcgccgcaccaagttcgccgacccgccccagcccgagccggaggccaaggcggacgtggagcctcctcagctgaaggcgccgccgcacgtcggcggtgagggtaagggagggaaggatgaggccaaggcggaggagaggacgccgatgaagaagccgaggggggaagcggcggcggcggaggcggaggggaggaaggtggcggtgtgcgtgcgggcggcggacatgccgctgccgctgcagcggcgcgcggtgaggatcgccctcgaggccgtcgccgccatgccgcggctcgagagcaagcgcctcgcgctcgcgctcaagaaggatttcgatacaacatacgggcccgcatggcactgcattgtcggcacaagctttggctcctacgtcactcactcgttggggggtttcctgtacttctccgtcgacaaagcctacgttctcctcttcagaactgccgtccagccacttgtccagctacaatgagacctgaaacatgttttactcgaactggtgtagatgcagcgcaaatgtaattttgaacagaatagacgacgctcagcacaccgtgtcttgccgcgtttgagtagcagaggtaatttgatctgtacacaagactgtagaacagccgtgcctctaacgttgtactgcccgaagtcctgctttgtaaacgttcttgtgcaatcgtttggagtt

SEQ ID NO: 21754 - DNA, 1240 bp, Zea mays
  Clone ID: LIB3354-098-D7_FLI
cgtggagatccaggtcggcatgggccctgccggcgagctgcgctacccgtcctacccggagagcgacggcacctggtcgttccctggcatcggcgagttccagtgctacgacaggttcatgctgagtagcttgaaggcggctgctgaggccgtgggcaagccggagtggggcaacgcgggtccgggcgactccggcagctacaaggactggccggaggacacgggcttcttccggcgcgagggcgggtggagcacggagtacggggagttcttcatgagctggtactcgcagatgctcctggagcacggcgagcgcatcctgtcggcggcgacgggcgtgttcacgggttcccccggcgtgaagatctcggtgaaggtggccgggatccactggcactacggcacccggtcccacgcggcggagctgacggcggggtactacaacacccggtcgcacgacgggtacgcgcccatcgcgcgcatgctggcgcgccacggcgccgtgctcaacttcacgtgcgtggagatgcgcgaccacgagcagccgcaggacgcgcagtgccgccccgaggcgctggtgcagcaggtggccgccgcggcgcgggaggccggcgtgggcctggccggcgagaacgcgctgccgcgctacgacgacacggcgcacgaccaggtggtggccacggccgccgacagggccgccgaggaccgcatggtggccttcacgtacctgcgcatggggcccgacctgttccagcccgacaactggcgccgcttcgccgcgttcgtcaagcgcatgacggagccgggcgcgcgggaggcgtgccgggagcaggtggagcgggaggccgagggcgtcgcgcacgccacccagcccctcgtgcacgaggccgccgtcgcgctcaccaactgaccggaccggccggcgttccccgtcgactgtgttcgatcgctagacggggtggcacgctgcgatgactacctgtatggcgagtccctatacttactcatacataagctgcgccgccgtgtcgtcggtgcgtgcaccgcgcagtagtgtgcgtacagcggaagctgcgactgcgagcgaggtagggtgtggggtgggtgactggggtacggtacgtaggtgccacgttggaggctttggcgtttgctcagagcctggcaggagatgggtttgatgttctgctgctgtgttactgtatcctacacctacagaatgtgctatgatttgtactgc

SEQ ID NO: 21755 - DNA, 1178 bp, Zea mays
  Clone ID: LIB3354-099-E5_FLI
cccccttgcaagtatagtctcggcggctctagaagacgatgggcaaggacgacgtgatcgagagcggcgctggcggcggcgagttcgctgccaaggactacacggaccctcccccggcgccgctgatcgacgcggctgagctggggtcctggtcgctgtaccgcgccgtgatcgccgagttcatcgccacgctgctgttcctgtacatcacggtggccaccgtgatcgggtacaagcaccagacggacgcgtcggcgtcgggtgccgacgcggcgtgcggcggcgtgggggtgctgggcatcgcctgggccttcggcggcatgatcttcgtcctcgtctactgcaccgccggcatctcggggggccacatcaaccccgccgtcaccttcggcctcttcctggcgcgcaaggtctccctggtgcgcgcgctgctctacatcgtggcgcagtgcctcggcgccatctgcggcgtcggcctcgtcaaggcgttccagagcgcctacttcgacaggtacggcggcggcgccaactcgctcgcctccggctactcccgcggcaccggcctcggcgccgagatcatcggcaccttcgtgctcgtctacaccgtcttctccgccaccgaccccaagcgcaacgcccgcgactcccacgtcccggttctggctcccctccccatcggcttcgccgtgttcatggtgcacctggccaccatccccgtcaccggcaccggcatcaacccggccaggagcctgggcgccgccgtcatctacaacaaggacaagccctgggacgaccactggatcttctgggtgggccctctcgtgggcgctgccatcgcggccttctaccaccagtacatcctccgggctggcgccatcaaggccctcggctccttcaggagcaacgcgtgatgagcggggcttggctgtggagcaatggcgggcgacctacgggcgggggaagtcgtgagcgaggagaatgacatcatcgatcgacttgggtgccggtggttggttcgggtcgccttttttgtttcagcagctgctgcgttgcgcgcgtgcgtgagatttggtttggtttcgttcccctgcaatgtaatcatgtcgtgactctcaagggattattccgctctgctcttatggtctctgttttctatttaatgattgttattaccatgt

SEQ ID NO: 21756 - DNA, 818 bp, Zea mays
  Clone ID: LIB3354-099-F12_FLI
gccagatttcgcaagatcacaagggcaaccacagtggcaggggctgtttccccacatgcaacagaagccagacagaagacagcccgtcagcccctctcgtttttcatccgccttcgcctccaaccgcgtgcgctccacgcctcctccaggaaagcgagagcttctgcataagaacaacaaatcaaaagcttgatcagctcggtgcctacaaaacctcaacaaccaagtttcatgtctgatctcgacgtccagcttccatctgcctttgatccgtttgctgaggcaaatgctgaggactctggtgctggtcctggaacgaaggattatgtgcatgtgcgcatccagcagcgcaacggcagaaagagtctgactacagtccagggtctgaagaaagagttcagctataacaagatcctcaaggatctgaagaaggaattctgctgcaatggtactgtagttcaggacccagagctaggccaggtcattcagctccaaggtgaccagcgcaagaatgttgctactttcctagttcaggctgggattgcgaagaaagagaacatcaagattcacgggttctaagggacctgtaaatgcttgtgccctatattgtgtgcctccacatattggggagcttgaagcatcgacagttactagtcattgcttacttatataagaacataagtagtatttgctattgtcaagtgtgccttgcttgatgcaagttgtgttttcgtatcattattattatgcacggccatcgtacgtgtatggcttgtatgggttattgccaacttaataaaagcacactctgtttgcct

SEQ ID NO: 21757 - DNA, 1101 bp, Zea mays
  Clone ID: LIB3354-100-C7_FLI
aacaatggcgacagcgagtgagatcgcggcggtgggcgtaataggcgcggggcagatgggctcgggcatcgcccagctcgccgccggcggcggctgtgccgtacttctcctcgacgccgaccccactgccctctcccgtgccgtcgtctccatctccgcctccctacggcgcctcgccgccaagggccagctctcccaggccgcgtgcgaggactcaataaagcggataaggtgcgtctccgccgtgcaggatctcagggacgcggatcttgtgatcgaggccgtcgtggagaacgaagatgtcaagaagaagctattcgtggagctggataaggtcacgaagccctcggccatcctcgcctccaacacgagctccatctccataacccgcctggcttcagctaccaaacgcccctctcaggtgataggcatgcacttcttcaaccctcctccggtaatgaaactgatcgagattatccgaggagccgatacgtcagatgaggtgtttgctgcggtcagatctttctcggaaagactcgggaagtccgttatatgctcgcaagattacccaggattcatcgtgaaccgcatcctcatgccgatgatcaacgaggccttctgggctctgtacaccggagtggcaaccaaagaggacatcgacgcagggatgaagctgggcacgaaccacccgatgggcccgctgcagctcgccgacttcatcggcctggacgtctgcctctccgtacttcgggtactccacagcggtctgggagataacaagtacagcccctgccctctcctcgtccagtacgtcgatgctggccggcttgggaagaagcgtggagtaggcgtgtattcgtatgggcacaggccttcgtccgtcaggccaaagtcgtctctgtaggcgtgagagcaaactgttgggcgaataaaaccaggtgcgtgttgcaattgtacgtcagagaaaaagggagcacagcctagttcagaggtactcagtcggacgcttcaggtcgtgcagattcgtaatggcagggtttgctgctctatgtagaaaagatggttcagtgtttttaatctgataagtggaagtcatgaaac

SEQ ID NO: 21758 - DNA, 793 bp, Zea mays
  Clone ID: LIB3354-100-C9_FLI
gacgtagagatcgacgctaacatatagctcaagtttacagtacaatgatgataacatggggtcttttttcgacgctgttacttgtcttctccctcgactcactgcgctgcagctaatatcatatcactgcttatctggcaccatctacagttctacacgtagtagcgcggggactccgttccggccaaaaaaaatcctaaggaaacgcggccgaggacgagagtgggccagcggggtcgaggaggtaaagaaaactaatggcagcgaaggagggaggcagtggggaaggtgggaagcggctgcccaaagccacctccaccaccaggccttcttctacccccatcccaacgcccaggccacaccagcgctgcgagctctctcctcgtagtcgtagcggagtcccagcccctcacgccctcccgatcgcgctcgtcggcgccctgtcgactcgagcccgcttctgggccgatcgacagcgagagcgagcgcagcggcgcgccgaggagagctctttcggtgctgtataacgacgacgacagcaggcggcagataacacataaaggcgcgcgatgtgcgacgcggcggccgtggcggctccgcggtacaggggcgtgcggaagcggccgtggggccggttcgcggcggagatccgggacccggcgaagcgcgcgcgcgtctggctcggcaccttcgactccgccgaggccgcggcgcgcgcctacgacatggccgcgcgggccctgcgcggcccgctcgccaggaccaacttccccgcgctcacctcccgccctcc

SEQ ID NO: 21759 - DNA, 961 bp, Zea mays
  Clone ID: LIB3354-100-G2_FLI
tccgccgcctccccgtctctcgccgatctcccccaaaccctagcctcgacctgaccgccagcgggcccgcaggccggagaaggagtcggagtcgcccccacccacccaccctctgccgcgggcggggagcgggcggcggacgagatgccgtcgcacggggatctggaccggcagatcgcgcagctgcgcgactgcaagtacctgcccgaggcggaggtcaaggtgctctgcgagcaggccaaggccatcctcatggaggaatggaacgtgcagcccgtgcgctgccccgtcaccgtctgcggcgacatccacggccagttctatgacctcatcgagctcttccgcatcggcggcgactctcccgacaccaactacctcttcatgggcgactacgtcggtacctcatgaaggacccatgtgtgatcttttgtggtctgacccagatgaccgatgtgggtggggaatttcacccagaggagcaggttacacatttgggcaagacattgcacagcagttcaaccatacaaatggtctctctctcatttcaagggcccatcaacttgtaatggaaggatttaattggtgccaggataagaatgtagtcacagtcttcagtgcgcctaattactgttaccgctgtggtaacatggctgctattcttgaaatcggggaaaacatggaccagaacttccttcaattcaaccccgcacctcggcaaattgagccagacacaactcgcaaaaccccagactactttctgtaattgtggtggtgaccttaactttctggtgtttgatgctcctctcttccgcagcatcagggtatgtagatcttgtccttagatatgggtcccatgtgcccggccttaacgtctccctattcttttgtttggagattttgtttctgcttctcgatcttgatacaagatgttagaagttgaatgccagtgtatttttttctt

SEQ ID NO: 21760 - DNA, 623 bp, Zea mays
  Clone ID: LIB3354-101-A5_FLI
gttcttgagctggttgatgagatagcaactggatcaaagttgtactctcttgcctccccgtgaccatagtgaatcgccctctgcgttcgatttatgttgctcttgcggtagttcccccaactgccaccatgcagaacgaggagggtaagactgtggacctctatgtccccaggaagtgctcggccacaaacaggatcatcactgccaaggaccatgcctctgtccagatcaacattggccacttggatgcgaatggcctgtatgatggtcacttcacaacgtttgctctctctgggtttgtccgtgctcagggcgacgcagacagctccttggacaggctgtggcagaagaaggctgatatcaagcagtagattttacatctagtttaccaagaattggacactgccttagctatgttttgaattcatgtcactatatgcaatgttgtgatttcagctggtaccttaaatctgaagatttagtatctttgttgggttccttctgagtttgatgtgtggtgttcaattcaaccgtccagtctccagtggcaccgaaatatgctgttggtgtagtttcattcaaaaaacgtgccattcaattcaactgtccagtgccattcaatg

SEQ ID NO: 21761 - DNA, 1325 bp, Zea mays
  Clone ID: LIB3354-101-A9_FLI
cgccaggccggcgcgttcgacccggtagcccgaaaccgcccatatatcttgccaactttttgcgacacggtggaggcgtggagctaactacccccgcgctggctcgccaccaccgccgcagcaggcgtgggaatctgggcagcgccccgcggagaagaggaggcagcgcgctctccgtccgccatggcgggctcttccgaccccgacaagctcatgagcaaagccgacaaactaacaaaattgagttttacaagatggaatgctgattggaaaagcgctacctccttgtatgagcaagctgcaattgcgtataggttcagaaaggacaatgagaaagcaaaagatgcttttgagaaggcctcaaaaggacaggaaatgatctcctcaccatgggacgctgctaagcatatggaatctgctgctgctttagcaaaggagcttgggcgctggaatgaagtatctgatttctatcacagagcttcagaattataccgtgaatgtggaaggccacaacctgcatctgatgctctagcaaagggtgccagtgcattggaggagaaatctccagaagaagctatcaaaatgtatgatgaggcttgttcagttctagaagaagatgggaaggaacagatggcttttgacttgtaccgtgccgcagcagctttgtatatcaagatggagaaatattcagatgccgctgctttgtttttaagacttggttcagctgctgataagtgcaatgccatcaatagccaatgcaaggcctatctgagtgcgatcatcatctatctttacgcacatgattttcagcaagctcaaaaatgctacaatgactgctcagaggttcaagccttcctcaatagcgaccagaatcgatgtgcaacgaagctattgtctgcttatgaggaaggtgatgctgaagaaatcaaacgcattgctcaatcaagtgccttcaatcaccttgaccatgtggtaattaggcttgcacggaagctaccaacaggtgatctgcaggccatcaagaaagctgacgatggcgaggaatccttggacgaggatgacctgacttaaaacgatctcccgagccaaaaggtgaacgtcatagtttgccatcggtgggggaacagctgtaaaaagaggttatgcgagttacatactaaaaacttgtgggcagcattcccagatctataaacatgaaatttgtagggcccaattatgttgtatccgtactggtggtttggtgttacctaaactttagtggtatgtttatggtgccctgtgctacatgattcttgcaaatccagcatggtgtatatttgttggcc

SEQ ID NO: 21762 - DNA, 1341 bp, Zea mays
  Clone ID: LIB3354-101-B4_FLI
gcgagaccgcgagagcgagacgatgggaatgctacaaattccccttctgagtccgaccctcctcatccaatagtaccacctgctcgctgctccgccaccgctctcgctcgatcgccccctcgttcgtcggccttcgcttccagacctccgagtcctcaatctgcagctttggtaattggtcgtatagtccctcatcatcggaatggtggggtcacttatctttcccacacctaatgtggatccgaaggcagagaatcctaatgagatggttacagcgggtgtgctttcaagccttcagaatttcctacgcatgtgcctcatagccatcctctcatatggcccaatgccgaagcacattgcatttattatggatggcaatcgtcgatatgctaaattcagaagcatgcaagaaggagcgggtcacaggatgggtttctctacccttattgcaagtctaatgtactgctatgaaatgggtgtgaagtacatcactgtctacgcattcagcatcgacaattttaaaagggacccaagtgaggtggaatccttgatgcagttaatggaggaaaaaatcaacgaactcttagagaaccgaagtgtaatcaacaagattaactgtaagatcaacttttggggtaacttggacttgttatatgagccggtgcggttggcggctgagaagctgatggcgagcacagctgggaacacagggctggtcttttctatctgcatgccatacaactcgacttctgagattgtcaatgctgtcagtgaagtctgtgcagaaaggatggaaatgtttcagagtgaacatattggcgactgcaatggtcatgctgcaaataacggtgtgcgttcagagatttcagtggcggatttggatcgccacatgtatagtgccggatgcccagatcctgatatcgtcatccggacttcgggcgagactcgattgagcaatttcctcctttggcagacgacgtttagtcacttgcagaatccagatcctctgtggcccgagttctcttttaggcaccttgtttgggctatcttgcagtatcagagagtttaccctgctctggagcataacagaaagttggctaagaagcagttgtgattccatgttacttgcaaggaggtatcatgaagggctattaacatcaaacttttccttctcaatttcctggtaatggtaaatgcaaagaagaacatactagcatataacattatgaatagatcaccatgtaacttaagtgtgattgctaccgtaaccatgtaacttatttgagctcgtacaaatgctgtgattcctatatatatatatatatatatagtgcctggggt

SEQ ID NO: 21763 - DNA, 586 bp, Zea mays
  Clone ID: LIB3354-102-E10_FLI
gtgttgcagagggaggacgatctgaatgaaattgtgcagcttgttggtaaagatgcgctggcagaatctgacaagattacgctggagacagcaaagcttttgagagaagattatttggcacaaaatgcattcaccccatatgataagttctgcccattctacaaatccgtttggatgatgcgcaacattattcacttcaacacattggcaaatcaggctgtggagcgggcagctggtactgacggccataagataacatacagtgtcataaagcatcggttgggggatctattttatcgcctagtatcccaaaagttcgaggatcctgcagaaggcgaagaagctttggtcggcaagtttaagaaactttatgacgaccttaccactgggttccgcaacctagaagatgaggcacggtgaactgctgtagattttgtgtaagacaataatggctgccaaatgttttataaggtacggaagttgtagattgcgaccatgtatgagaattttccccaccgctactcatctctttgccaccactattttagtcatcagtgctggatgggcaccctgtttatttcgacgt

SEQ ID NO: 21764 - DNA, 871 bp, Zea mays
  Clone ID: LIB3354-102-E7_FLI
ctcaagcatcagcggcagcggcagcggcaggagctctgggcagcgtgcgcacgtggggtacctagctcgctctgctagcctaccatggctgatcaccaccggggcgcgacgggaggtggcgggggctacggcgacctccagcgcgggggcggcatgcacggcgaggcgcagcagcagcagaagcagggcgccatgatgacggcgctcaaggccgcgacggccgcgaccttcggcgggtcgatgctggtgctgtccgggctgatcctggccggcaccgtgatcgcgctcacggtggccacccccgtgctggtgatcttcagcccggtgctggtgccggccgccatcgcgctggcgctcatggcggccgggttcgtcacctccggcggcctcggcgtcgctgcgctgtccgtgttctcctggatgtacaagtacctgacgggcaagcacccgccgggcgccgaccagctggaccacgccaaggcgaggctggcgtccaaggcccgcgacatcaaggatgcagcacagcaccgcatcgaccaggcgcaggggtcttgagagaagaaccacactcgagcggaccgcgcgcgcgtcctccttgaaccactgccggcgcggcggcatatggcccttaaaggcggtggctgctgctacgtacgctgccgtagagtctcggtcgccgcgatagctctagctagtcgtttatgtgttgtgctttgtgtgtgcatgcatgtgtctgggggcatgcagtgcagtgcagtactatatgctgtatgcgtctctctttgatcggagaggcggatgtacagcatgctcgatatgtctagtttggatgtcatgtttatgatgaggaataaaatgcagtgttcaggtg

SEQ ID NO: 21765 - DNA, 1286 bp, Zea mays
  Clone ID: LIB3354-103-A2_FLI
gagggaagggacgaggcgccgagccggcaaccgttttcggggttgctggcggcgattggctgcggttccgcatcaaggctggtcgaacgctgcccctcctgattggtaggtagctcgagatggatctgattcttccatataaggttggggacctcgcggagtccaaatccttggtgagcggttacagaggtgcatggtttcgctgtaagatacataatatgcgtgtcaggcttggatacctggagtgttacttggaatacattgattatccaggagaaaaaaaggaatgggttaggctctttcgaaagaactctgcaaggtccaaccaaaattcaagtgatagtattcacaccatgataaggccttcatttccaaaatggaaggttgttattggtctgggacaattactaagataatcaatgaagatctggtcgagatagagctgccggcacctcccataggtgaaggaaaatgttataaagctaaatgtagtgatctgaggcctactctcgagtggtctctagcaagaggttggatggtccctctttcacaggcaaatggaaaaggttggcatgctgctcgtctacttcagcattataaatctgaatcagatgatgataatgacgacaacgatagctgggatgcccggcaaacggtgtgcagagcttcaaacacgcctgaggaagctccaggccccatggtccctgcacctccgtcagccacaaacaacgctcccagccacatgtatcagaaggatgctgctgtcacatccacagaggacctgctgaagcccagctcaacatccaagtcgccagaccccaggcacgacgcccaagctagcactcaacctgcaggtacgggggtctccatgaagccggaaccggttattggagtctcaacaatcaagaaagaggactcctccttgacagaaggtgaggttgatggcggcacggaagagtgcctggagaagctgggcgcgatcaaagccaggctcaaatacctcatgcagggcacgcggctggaacatgagcgcagcgccaccttccgtgggtagtcaggcagatgaagctgcatcaaaggtgcaacttcacgcaggggtttagggtttagggccatctaacgcctgttgtggttgctgaattttgtgtcctgtggttacaggtattattgtcctgaataatgacgttgtgaataagtggtttgtttttttgagtgcggcaatttgtaggagctaagaggaatgtgttgctgagttaagttatgaattagaccgtgtccagcagttc

SEQ ID NO: 21766 - DNA, 739 bp, Zea mays
  Clone ID: LIB3354-103-B10_FLI
ctggcttctcctccccctcttaccaagtcctcctcgggttagggttccttagggttttgtggaggggcgatggcggcggctgatgtggagtaccgttgcttcgtcggcgggcttgcctgggccaccagcaacgagtcgctggagaatgccttcgcctcctacggcgagatcctcgactccaaggtcatcaccgaccgggagacggggaggtcccgcggcttcggcttcgttaccttctcctccgagaactccatgctcgacgctatcgagaacatgaacggcaaggagctcgacggccgtaacatcaccgttaaccaggcccagtcccgtggcggtggcggtggcggcggtggctacggcggcggtcgcggcggcggcggcggttatggtggcgggcgccgtgacggcggttatggcggcggtggcggctacggcggtcggcgcgaaggtggcggcggcggctacggaggcggtggcggctacggcggtcggcgcgagggtggcggtggcggctacggcggcggtggcggcggcggctggagggactgatgtgtgggcccatcctggcttcggccgagttatcttatctatctatagtatcgtgttaccgttcgcttctgtcaccgtgttagtgtccgttctacctttggattaggtgttggtaccctgttgttcgctttggttgctcccgctatgaaacgagacgagagaagaatgagcaaggtttttgttcgcagct

SEQ ID NO: 21767 - DNA, 1420 bp, Zea mays
  Clone ID: LIB3354-103-C8_FLI
cgcaatcaaacccaagacaaatccaaccaaccaagctattccccatctccggaccagcgccgcctccagtcgctgtccacgggcaccccgggcgcgcctcctccgagcccagactcgagctccatcccgccgtggatcaccgcgtgaggtggggcgcaccgaccggaccccggagggccagatggtgtccggcgccggagggggcgagtagcgcggtcggcggccacgaacggattggcggcggcgcggcgaggcgtcggtcggagcgggggccaccatgtctgctgtagtgtgcggcaagaggtcctcctccatcttcggcgacgagcttgtaccttccccttcctcccctccgtccccttcccaccaccatcaccccgccaagagggcccgctgctccccgtcccgctggagggagggtctactccaccacctcctcaccctcttccccgacatggatccccagttacttgaaaaagctcttgaggcctctggagatgacttggactctgcaataaagagattaaacgagctgcgactggagtcagctggggctatcctatctgccactgtttgtgaatctgagaaggacatatcatcagctcataacttattggctgaaggtaccaccagtaatggccatttagacatagctactgaaaatccacctgcaattgataactctcagacaagtcatcatagctctgaatgggttgacctatttgtcaaagagatgatgagctcctctgacatagatgatgcgcgagctcgtgcatccagggctttggaggtgtttgaaaagtccatcatggatcgagttggacctgaagcagtgcagaatttgcatagggaaaatgtgatgctaaaggagcaacttgcaataattctccgagagaatgctgttctgaagcggggcgttgcgatacaacacgaacgccaaaaagagtttgatgtgaggactcaggaagtcgacagccttaaacagttggtactgcaatatcaggagcagataaaaactcttgagataaataattacgcacttagagtgcatttgaagcaggctcagcagggcaattctatgcatggacgtttcccgcctgacgtcttctaatgtctgccatggctcaacagaataattatgcatggacgttcgttaatatttgatgctgtacagttggattttgaactaagcagtgtcaaataaaaaaaatcgaggtagtacctattaagataagtagactcaggacctcaagttcgactcaaatgctgcatatacgatcgtaccccatcattggagtcgacaacactaaggtccaactacctggaagctgagatgaaatagcatgttagggttggcagtgcactggtccttgcatacttgttgtaataatggatcttgcaggggaagctcggatgaagt

SEQ ID NO: 21768 - DNA, 624 bp, Zea mays
  Clone ID: LIB3354-104-B1_FLI
ggcatccgcagagagcttgttccgtccaggcaaccaaaaagcaagttgccccgccgcgcagaggaagaagagagcagaggaggatggctcgtacgaagcagaccgcccgcaagtccacgggaggcaaggccccccgcaagcagctcgccaccaaggcggcgaggaagtcggcgccgacgaccggcggcgtgaagaagccccacaggtacaggcccggaaccgtggcgctgcgcgagatccgcaagtaccagaagagcacggagctgctgatccgcaagctgcccttccagcgcctggtgcgcgagatcgcgcaggacttcaagacagacctccggttccagagccacgccgtgctggcgctccaggaggccgccgaggcctacctcgtcggtctcttcgaggacaccaacctctgcgccatccacgctaagcgcgtcaccatcatgcccaaggacatccagctcgcccgccgcatccgtggcgagcgcgcgtagccatcatctccggggatctgatgaatgtctagttaccaaacaaataggctgtattagcgtcgttgttctgtattcgttattttggattcggttgcagtgaaaaacagctttactaatcttatttgtgatc

SEQ ID NO: 21769 - DNA, 1024 bp, Zea mays
  Clone ID: LIB3354-104-C11_FLI
gttgcacgtacgtagtagctagacagccgaatcggctctctagctagctcctcccttccgatcgatatcatcgccatgtcggggatctcgctggcggtggcgccaaggtccgacccggaccacgggtcggagcggcagccgacggcgatgctgggcggcgtgatgggctcgctccgcgtcatcgagctgcagctggtggccttcatcatggtgttctcggcgtcgggcctcgtcccgctcatcgacctcgtgttccccgtcgccaccaccgtctacctcctcgccatctcccgcctcgccttcccgccgctgcacgccaccaagtcgtccaagcctgatgacgccgccggctcgcccgccgcctcctcccagtcgtccccagagatcttccgcggcagcaagctgttccaggcgtacgtggtggtgggcacgacggtgggcctgttcctgccgctggcgcacgtgctgggcgggttcgcgcggggcgacgacgcggcggtgcggtcggcgacgccgcacctgttcctgctgtcgtgccagatcctgacggagaacgtggtggggtcactgggcgccttctcgcctcccgtcagggcgctggtgccgctgctctacaccgtgcgccgcgtcttcgtcatcctcgactgggcctacgacgcgtgggcctccaccgcgcaggacgccgcctgggtgtggttcggcaggtgcctcgccgccgccaacctgctctacttctccgccaacctcttcgtcttcctcatcccgaggttcctgccccgcgccttcgagaagtacttccgcatgcgcgacgagctgtgcgccaagacggccgaggacaagcacgcgcgcgagggtgtcgtcggtgcggccaagttggaggtgtcgtccaagaaggcggactgagagctctcggctctcgcagtcgcagactcgcagtcgcagggcggggtgtaatttaaattcggtagcctgtggtgggcctgctgtaatttctccctgcgttatgtttaattgtcatcggttt

SEQ ID NO: 21770 - DNA, 1267 bp, Zea mays
  Clone ID: LIB3354-104-F9_FLI
ggttttcgctgtctcgctgccgtcctaggtttggagccaggtcaccggcgctaggagggcgtgaaatcgagtcgacggtcggcactcggcactcacgcgttctccacctactgctggcgctcctgtgaggcgacgccggaccggccaccccgcatgcgaacagcgcacggaccggccaccggtgtgacccctccatccaaggcttcagctccagaccgagccgccccgccaatcgccgtccgccgaaccgcctaggtccttgctggagacaggcacgagcgtggcctaggaggtgaggaccgagaggtgtcaaacctacaagtgctggcacaacagcacacatggttgtctcctcctttcaaagaaacggaatttgttttcctcatctaaagttactgcattgtattccatagaaatggctatggggttgattaatgctaatcctataatccatgagaaaaaagaaagacgcatccgacaggcaccagagaccacagatgaaaatgcggtagagtccatagaccagctggaaatatttgatcacattagagatataaaggatccagagcacccatactcactggaacagcttaatgtggtgactgaagactcaattgaactcaatgatgaaagcaatcatgtcagggttattttcaccccaacagtggagcactgcagtatggcaactattattggcctttgcatacgtgtgaaacttgtacggagtctccctccttattacaaggtggacataagggttgcccctggatcacacgcaactgaagctgctgtgaataagcaactgaatgacaaagaacgtgttgcggctgcattggaaaacccaaacctactggacatggttgaagagtgcttatcaccaacattcgattgaggtctcagttattgcacatctgggagccatggtgtttcatgttcagaagccacacaagcttattgccataggaattcactcctgaatattatatttgagggccatggtgtttcatgtgcatgattttttttgtcctccgtccctttgagttaatacaattgttatctttttggacatttgttggtgcttgtgacctccctgggcaaagggacatgtaatcagatcttgtgtagtagctttcagagcgtttccagtgccacgccattttgtggctgtgtacccccagtcaactgaacttggtaggtgaatcctagaatcctcaagcacgagttgtttatgtctctatacgcaggaaatgttttatcttctcagctc

SEQ ID NO: 21771 - DNA, 1351 bp, Zea mays
  Clone ID: LIB3354-104-H7_FLI
gtagctttgtagcaaccatgggaagcgcttgggccaacgtccgcgagatctgccgcgcacagcgtgccgacggccccgcagccgtgctcgccatcggcacggccaacccggcgaactgcgtgccccaggacgagttccccgacttctacttccgcgccaccaagagcgaccacctcactggcctcaaggaaaagttcaagagagtttgccagaagctgggcgtgcagaagcgctacctgcaccacaccgaggagctgctgagcgcgcacccggagttcctggaccgctcctcgccgtccctcgacgcgcggctggacatcgtcaagaccgccgtcccggagctcgccgcgcaggcctgcaggaaggccatcgccgagtggggccgcccggccgccgacgtcacgcacctcgtcgtcgccaccaactccggcgcgcacatcccgggcgtcgacttccagctggtctcgctcctgggcctccgcccgaccgtgcgccgcaccatgctctacctcaacggctgctccgcgggcgccgccgcgctgcgcctcgccagggacctggccgagaacaaccgcggcgcgcgcgtgctcgtcgcctgcgccgagatcaccgtcctgctctttgacgggcccgaggagggctgtttccagacgctcgtcaaccagggcctgttcggcgacggcgcgggagccgtcgtcgtcggcgccgacccggcggccccggccgagcgcccgctgttcgagatcgtgtccgccgcgcagaccgtcataccggactccgagggcgtcatcaccatgcacctcaccaagggtggctacggcggcaacatctccaccaggcaggtccccgtactcatcggcgaccacatcgagcgctgtctcacggacgcttttgcgccgctcggcgtcggcgccggatggaacgacctgttctgggacgtgcacccgggctcgtcggcgatcctggaccaggtcgacgccgtgctcaagctcaagcctgagaagctggcggcgagcagacgtgtcctcagcgagtacgggaacatgttcggcgtcacggtgatcttcgtgctcgacgagctgcgccgccggatgacgaatggggaagaggagggggcgcctgcagagtggggggtcatggtggcgtttggacccgggctcaccgtcgagacgatggtgctccaccgatcaggcaccccagccgagacgaaactaggtgaggcatgaaaaggtggacgtgaccaatttgtgttggaacttggatcaggattgcatcattgcatgcatgttacttggtcaacatattccgactatgtcactattcttgacttcagcctataataaattcaact

SEQ ID NO: 21772 - DNA, 1161 bp, Zea mays
  Clone ID: LIB3354-105-A3_FLI
attcatccaagctgtataatttcatcattagcttcaagcacctgttaacttagagtgctccaatacgcttaggcccaattacaaagttacatataccaaaataaaactcgacaaggaaaattatctagtaccctagagtaaattttgaatagttggcgccaagcaggtaacatagagtgctccaatactcttaggccctttcacttgaaacatcgagggggaaatagctatgaagtatggccctttgacctatgtctcttccatggaggacaccactggagcctccaacgccgtgcagatttggcgacacagggtgtggaggcacactgtgactcaccatgccatgccgaggacgaagacgccgatggagacggcgatgcccaaggcagagaagatgaagggcgatatctgcaccacgggtgagcggcctctgtcggggtggggcgagaaacacgtatggggacgctggggacgcctgctccggcctcggctatatactgctccatcacaggtgtctgcctgctgtgcaacgacatccgctgagttgttgccttgccttcgtaagcttctccatgcggcaaaggggttgtctccctccgtgaaactcaatcccaaagtgcaaggcgacgggctcgtcccacgacgcctccatgaagtccaagctgcctatctcggatccagacccttgcttttgccttgaccatctctagcgcgagtccagcctctagtgatccctcacccgcacgggcgcagttgacgcagtttttgctgaacacccccaaatatagtttgggaaattaactgcacccagcaccttagtggattgatatcgtgcactgaagaacgagaaccaattggggaggtggatgggggcgaggcgaaggggccagctccgcctgatgtgcagcttcgggggccggatcgtcccgcgcccgaccgataagtcgctctgctacttgggcggggagacccggatcgtggccgtggacaggcacgcgtcgctcaccgaaagcaaatatggcgggtcggtcttaatgttcaatgatttaacatgtccctcatgtagaggctacgacaagaagggctcacctcatgtagaggctacgacaagaaggggtgcaataatgcagttgtacagtaacaactattttaattctgaac

SEQ ID NO: 21773 - DNA, 1302 bp, Zea mays
  Clone ID: LIB3354-105-A5_FLI
ccgctccacgccctccccctccgcgcagagccagccaagccaaccagccagtcagaagaggaaccggggagcggcagctgcagcggccgagggcggagcacgcgaggttcaagattatccggtttaaagacatcagaagaggctgcggcatggatagataccaaagggtagagaagcctcggaatgacacgccaatcagccagaatgagatcagaatcactactcaggggaggatgaggaactatatcagctatgggatgtcgctgcttgaggaaaatggacatgatgagattagtatcaaggccatgggacgggccataaataagacagttatggttgttgaattgatcaagagaagggttggaggtcttcatcagaacactgctactgaatctgttgatatcacagacacatgggaacctttggaagaaggccttctcccactagagacaactcgccatgtgtcgatgatcactgtgacactgtcaaagaaccctctggatacatcatctccaggataccagccacctatcccagctgaagaggtgaaacctgcttttgactatgatcatgaagaatcgtatcccactggtcgtggaagaggacgtggtggtggcagaagaggcaggggaagaggcatgagcaatggcccccctccacctgcttatggttacaacgaagagtgggaggaggaaggagattattataacagagggcgcgggagagggcggctacgtggacgaggtgggagagggcgtggtggctactacggaggtgggaggcgtggtggctacggttatgattatggctatgcccccagaggcgggtactatgaagagcaagacgaatactatgatgagcccgaggaatatgctcctccccctggccgcggacgtggcagagggagaaggggcggcatgccttggcgtgggcgtggaggccgcgggccaccgcgcggtggccgagggagctactactaggcgcgagaaatgcgacgtgccgaatgcgtgtgcttattagttatctgttagcgtttgctgcagtgctcttctatggagctccgaccccggactggaattatctcgtaggcccttccaggtgctactctacttcagctgctgtccctgtgcaactcgtccgggcaagttttgtggctcgctcgtggttttgtagctaggttaagcgagtgaagttacactcggtagcgcagtatttcctgcgagattgtttattcttctgttaatgtacctaccttactatttcgtttggattatggatactgggtgcatccgtttcatgttt

SEQ ID NO: 21774 - DNA, 1862 bp, Zea mays
  Clone ID: LIB3354-105-B12_FLI
tcccctgcaactgcaagtcgtcttcttccccaagcctaaaaccaacaacagtttggcagatcgcccggctcgatcgatcgcagccatggtgctctccaaggccgtctccgagagtgacatgtccgtgcactccacgttcgcgtcgcgctacgtccgctcgtctctcccaaggtaccgcatgccggagaactccatccccaaggaggcggcgtaccagatcatcaacgacgagctcatgctcgacgggaacccgcgcctcaacctggcgtccttcgtcaccacctggatggagcccgagtgcgacaagctcatcatggccgccatcaacaagaactacgtcgacatggacgagtaccccgtcaccaccgagctccagaaccggtgcgtgaacatgatcgcgcatctcttcaacgcgccgttgggcgagtccgagacggcggtgggcgtcggcacggtgggctcgtcggaggccatcatgcttgccgggctggccttcaagcgcaggtggcagaacaagcgcagggccgagggcaagccgttcgacaagcccaacattgtcaccggcgccaacgtccaggtttgctgggagaagttcgcgaggtacttcgaggtggagctcagggaggtgaagctgcgcgacggctactacgtgatggaccccgagaaggcggtggagatggtggacgagaacaccatctgcgtcgccgcgatcctgggctccacgctcaacggcgagttcgaggacgtgaagctgctcaacgacctgctccaagccaagaacagggagacccggtgggagacgcccatccacgtggacgcggcgagcggcggcttcatcgcgcccttcctgtacccggacctggagtgggacttccgcctgccgctggtcaagagcatcaacgtcagcggccacaagtacggcctcgtctacgccggcatcggctggtgcatctggcgcagcaaggaggacctgccggaggaactcatcttccacatcaactacctcggcgccgaccagcccacgttcacgctcaacttctccaagggctccagccaagtcatcgcgcagtactaccagctcatccgccacggcttcgaggggtacaggaacatcatggagaactgccacgagaacgccatggtgctcaaggagggcctggagaagacgggccgcttcgacatcgtgtccaaggacgaaggcgtcccgctggtggccttctccctcaaggaccgcagccggcacgacgagttcgagatctcggacatgctgcgccgcttcggctggatcgtgccggcatacaccatgccccccgacgcgcagcacgtcacggtgctccgcgtcgtcatccgggaggagttcagccgcaccctcgccgagcgcctcgttctcgacatcgagaaggtgatgtaccagctggacgcgctcccgtccaggctcccgccccctcccccggcggcgccgctgctcaggaaaaagacggagctggagacgcagaggtcggtcacggaggcgtggaagaagtttgtgctcgccaagaagaccaacggcgtctgctagtgacgcttccaccgctacacacaacactaccatggtcaacgggccttcttccgtgctgatttgagtgagcaccgcgatatctaggtagtctaatatgcttcgtgtctttccgtaatttgtgcatgcagttgctatgcaccgagtgagttgctatatatgttcgatagcaacagtttttttctccccaatgcaaggaagagagtaatagttgaggctggtgtcgattattgttatccatgcccatgcgcgtgcagttattacctccattctaaactgtaatctattttaatttcttcagagagtc

SEQ ID NO: 21775 - DNA, 579 bp, Zea mays
  Clone ID: LIB3354-105-E8_FLI
ccgaaagccggcgagaagatctttaagaccaagtgcgcgcagtgccacacggtcgacaagggcgccggccacaagcaaggtccaaacttgaacggtctttttgggagacagtcgggtaccactgcaggctactcctactctgcgggtaacaaaaacaaggctgtagtctgggaagaagacactttgtatgagtacctgcttaaccctaagaagtacattcctggaaccaagatggtcttccctgggctgaagaagccgcaggagcgtgctgatctcatcgcgtacctgaaggaagcaactgcatagttcattgacatgccttttgccatgaagagaaaaattgttttgcagtttaataaaaaaacattttagacaatttgggtcaccctgtttgaacagggtgcaaccacgtctcattattttcgttcttatggtgtccgtatggaatgcctaggtgtttagctgtgcacaaataacagttaaactttgacggctcctatttcaactgctggagaaatgccagtgccctatttttgaccaccagggtgtggaatggaaatcggtaatgcgtccattttg

SEQ ID NO: 21776 - DNA, 1116 bp, Zea mays
  Clone ID: LIB3354-106-A3_FLI
gccgctcccagtctccacgcggaagcagcgcctcgcaccgctcctacccaatggcgccgacgtcgaagctgtcgatgggcatcaagcgcgcgtcgcggtcgcacgcgtaccaccgccgtgggctctgggccatcaaggccaagaacggcggcgtcttccccaaggccgagaagcccgccgccgccgcggaacccaagttctaccccgccgacgacgtcaagcctcgcgttcccagcacccgcaagcctaatcccaccaagctcaggtcgagcatcacgcctgggacggtgctgatcctcctcgcggggcgcttcatggggaagagagtggtgttcctcaagcagctcaactccggcctgctcctcgtctctggtccattcaagatcaatggagtaccgatccgtcgtgtcaaccagacctatgtcattgctacatcaaccaaggttgacatctctggtgttgatgtcgccaagtttgatgacaagtactttgccagggagaaaaaacagaaggtgaagaagaccgagggtgagctttttgagacagagaaggaggcgtccaagtctctgcctgatttcaaaaaggatgaccagaaggccgtggatgctgctctgatcaaggctattgaggctgtcccagagctgaaggcctatcttggcgctcggttctcccttagggatggcgacaagccccacgagatggtcttctaaaccgagttttggagttcggaggaagtcgttttggctgtgctctctttgtgacaagccccacgagatggtctcccagagctgaaggcctaccttgtttcattctgcttgaagtctgtcaaatattatgagaagatctaattaagttttatcgggtattggtggttcagcatggcgttatctgcttttggttctttgtgtaggtcaatgttgtcttaagatcctattttgtttgaattgctgactgtcgtgtttttttgctatctttgaacgccttaaccgttcgacactaagagcatgtttggatgagttaggttttagttactagttgagctaaggctatctccaggacattttccatttcaaacttctccgcaaacattgttaactgttaaacagtgttattcat

SEQ ID NO: 21777 - DNA, 1777 bp, Zea mays
  Clone ID: LIB3354-106-E3_FLI
ggcctcgcctcggttggcttcagctgccacctgccgcgcggccactatccagcctccttcggtccttccccttccccagcagcaggctccggccgcagccatgcccaagccaccgccgcccacctccgacccctcgctccccaccaccaccaccacctcgacccccaagtcgtcgtcccgccctgcccccgcggggctcctcgatccgctcgccgcctccgggcgctccctcctcgcctcggcgcggcgctccccggtcaccacgctcgccggcgccttcttcctcctcgcgctcgtcatgtacggagaggacgcccgcaccatcgccgagctctccatcgacgactacctctacccggacgccgatctctacaacgtctccggcctgccgccccttgcgttgcccccgcctacctgcgacctctccagtggccgctgggtcttcgacaacgcctccgtcccggcgtacagggagaaagactgcaccttcctcaccaagcaggtcacctgcctcgccaacggccgccccgacgatatgtggcagtactggagatggcagcccagtgactgctccctccccacgttcgacgcccggagattcatggaggcgatgcgcgggaagcggctcatgttcgtgggggactcgctgaaccgcaaccagtgggagtcgctggtgtgcctggtgcagcccatcctgtccaagggcaggaagaagatcgtcaagcggggctccctcaacaccttctacgccaaggagtaccgggccacgctcgagttctactgggcgcccttcctcgtcgagtccaactctgacaaccccaacttccacagcatcaaggaacggatcatcagtcccgagaggatcgaggcgcacgccaggaactggaaggacgttgattacctcatcttcaacacctacatctggtggatgaacaccgccgacatcaaagtcaggagaccgaactcgaggtattggtctgagaacgacgaggttcccaggattgaggcgtatggtcgggtgttcaagacgtggtctgattggctcaataacaacatcgatcctgcccgcacgtccgtcttcttcatgacgatttctccaattcacatcagcccgcagaattggggaaacccgggagggatcagatgcgtgaaggagacgcttccttatcagaactacagccaacccctggatctttaccatgatatgcggttgtatgacctagtgatcaaggttgccagctccatggagaaggtcccggtgtcagtgatcaatatcacaaagatgtcagattaccggaaggacgcccacgcgtccgtgtacaccatccggcaagggaaactgctgacgccaaagcagaaggcagacccagagaaattcgcggactgcatccattggtgccttcccggcgtgccggacgtgtggaaccaaatactctacacgaggattctttcaaaatcaccatggcgttctaattttagtccccctccgtcccagtccacacctcttcctccccaatgattggagaatgtaggattatcctttttgttttactttttaggttagattgagtataggttagcggagaaaggaaaatggatgtgctgattactgatggtatgtaagaaggttcagctgaagtgtaagttagttgtgagtcagccaattcaggaaacaacagcgatctagtacaaggtgcaccatggatatgatactatactatacaccaagtatatgccactgcgttgctatggaatcattatatctatatgttcctac

SEQ ID NO: 21778 - DNA, 711 bp, Zea mays
  Clone ID: LIB3354-106-F7_FLI
gcgcccttgcccatccaagtccaacctccctaaactactcctgcgtgctgcctgagcgagtgagcggcgatggaatccttgggtgtgctgctcctgcacccgctcgacacatacctggagcaagaactggatcgccgctgccgcctcctgcgcctctgggaggtgccgcatgaccgccgtggagaattcctccgtgcccacgcatcatcgatccgcgccgtggtcattggcggcggctcgggcttcggcggcaacccggctctcatcgacgacctcccgcggctcgagatcatcgcgtgctacgccgtcggctacgactgcgtggaccttaccagatgccgcgagcgcggggtccgggtcaccaacacccccgacgtgctcaccgacgacgtcgcggaccttgccgtgggactcgccatcgccgctctccgcaggatcccgcacgccgacagctacgtccgcgccgggctgtggaaggccaatgatggccactacggtctcaccactcgggttcgtttttgcttctattcgttaagtatcctgcgcttctacgccgtgagcattgcttcatattacttataattggaaaagagacagagacatttttttaaactctagctagaaaaggactttagcaaaaaatatactactccattagtaattagaaaagctgtagacctcttttttttaatatcaataaacttttaattt

SEQ ID NO: 21779 - DNA, 1034 bp, Zea mays
  Clone ID: LIB3354-106-H12_FLI
gcgaggcggcgccggggcgccggaaggtgacgtacgggttccacctggtggagggccggatgccgcacggcatggaggaccgccacgtggccgagttccggaagctggacgacggcaacgaggtcggcctcttcgcggtcttcgacggacactccggcgccgacgtcgccacctacctccgcgagcacctcttcgacaacatactcatggaccaagtaatataatataacccacacgctagctctctgttcatttcattgtttagttcagaattcagatactagcgtcgcgttgggttgcgtcgcgtcgattatgtttcttctcgggacgcgtgtcgcgtgctcggctccgcagtcgggctccgatttctggacggacccgacggaggcgatccggcgcgcgtaccaccgcacggaccggaagctgctgaagaaaacggcgggcgacgacagcggcgaggggatgaagaagggcaggcggcgcggcgggtcgacggcggtcacggcgatcctgatcaacggagaggagctcgtggtcgccaacgtgggcgactcccgcgccgtgctgtgcgacgcgggcggcagggccaggcagctgtccgtggaccacgagccgctccgggagcgccgcgccatcgaggcccgcggcggcttcgtcaccgagatccacggggacgtgcctcgcgtagacgcgcagctggccatggcgcgcgcgttcggggaccggtcgctcaaggagcacatcagctcggaccccgacgtggccatcgaggacgtcggagacggcgccgagctgctcgtgctggcgagtgacgggctgtggaaggtcatgtcgaaccaggaggcggtcgacgaggctcggggcatcgaggacgcccggaaggcggcggtcaggctcgtcgacgaggcggtgcggcggggcagcaaggacgacatctcttgcatcgtcgtgcgactgcactagctagtgaacatctgctcggtcgtcgggcgaatgtgtgcactgttttagcatcatatgtgcaagtttacatg

SEQ ID NO: 21780 - DNA, 1527 bp, Zea mays
  Clone ID: LIB3354-106-H3_FLI
cctcgcctccccgttactccccccgccatcaatgccctcttcctccacctgcgtccctctcctcctccgccgcttcgttctcctcctctgctccgaccaccacttcgcagctggctcgctctcgacggcgttgccgccaccgagcccgtcggcgagacggaaatgaagcctctgcacctgcggagcagcggcagcttcaagcgcctgctgctcctctccatcggccaccggtcgccgccgaccacaaatccgccggtggcggacgccgacgccagggagtccccggaggagccgggttccccgcggtgtagcagcagcgggcccgcgtggcgctgcttctcgtacgacgaggtcgaccgcgccacgggcgggttccacgagcgcaacctggtgggccgcggcgggtcctcggaggtgtaccgcggcgagctccccggcgggcgcgccgtggcggtgaagcgcctgctgggcgcgtcggcgtgcgagcggcgggagcgggacttcctggcggagctgggcacggtggggcacgcgcgccaccccaacgtgtgcggcctactggggtgctgcgtcgaccgtgacctctacctcgtcttcgacttgtcccgccgcggctccgtcgccgccaacctacacgacgaggcgttgccggcgatgggttgggcggcgcggtacggcattgcggtgggcacggcgcgggggctggagtacctgcacaaggggtgccggaggcggatcatccaccgcgacatcaaggcctccaacgtcctgctcaccgacgacctgcagccgcagatctccgactttggcctcgccaagtggctgccgtcggaatggacgcaccgcgccatcgcgcccatcgaaggcaccttcgggtgcctggcgccggagtactacacgcacggcatcgtggacgagaagacggacgtgttcgcgttcggcgtcttcctgctggagctcgtcaccgggcggaagccggtggacggcagacaccggagcctcctcagctgggtaacagtggcccggccgctgctgagcggcgacggcaaggtggaggcgctggtggacccgaggctcggcggcgactacgacggcgagcaggcgcggcgggtgacgttcgtggcgtcgctgtgcgtcagggcggcggcgacgtggcggccgtccatgaccgaggtgctggagctgctggaaggcggcgagatccggcaggaccggtgggcgatgccagagacggcggtggccaacgacgacggcgagcagcagccatggtggttcgacgttctcgacgacttcgacgacgacgacgacgaccaagacgcaggcggcgaggagttcagcaccccgtccccttcctcctcctcgtcgtcgtcaaccacaagcaattagccatttacatccccagatacctggactcactgtgacgtggagttctgctagtttgtcctgataggggggagggcgggtcccaccacctgtaaatacaaaaaaaggttatctcttgaaaatgtttattactgggtgacgatg

SEQ ID NO: 21781 - DNA, 1381 bp, Zea mays
  Clone ID: LIB3354-107-A1_FLI
cgatacttcgggtgtaggggagcatgcggaagaaagggcgggcggtgccggagtggctcaacagcccaatttggtccgctaccccgcccgcgcccgcccagccggacccctacggcgccgacctcgctccgccgccacccccaaagccgccgccgccgccagctactgcctctcccgtaccgccgccgccgtcgtacgagcaggccgtaggggtgggtggtggccggagggaggaggaggacgacgagggcgccggggcggtgatacgggcacacctgctctcggacttcaaggccgcgctatcgaagaaggtggtgaacatgggagagctgcggcgcttagcctgcctcggcgtccccgacggcggtactggtgtccgacccgtcgtctggaagtcagaaaaactacgaatgattgaggaaacaaagctgtcaagaaagaaagacacaagtattgagaggattggctttctttcgagattcgaagttactaatgaagagcatcctttaagctctggtaaatctagcctgtggaaccaatattttcagagttactagaacagatagaccgagatgtaaagcgaacacatcctgatatttcatttttctcatcaaagtctaaccaggaatccctgaggagaattttaattatattttcaaaattgaaccccagtataagatatgtgcaagggatgaatgaagttttggcacctttattttatgtattcaagaatgaccctgacccaagcaactcagcgtcagctgaagcagacgcatacttttgctttgtcgaattgttgagtggctttagagacaactattgcaagcatcttgacaatagcagcgtgggtattcgatctacactttcaaaattatcacaactcttgaagcgacatgatgaggaactatggcgtcacatggaggtcaccacaaaggtttacccacaatattatgcctttagatggatcacactgttgttgacgatggagttcagctttaacgtgtgtatacatatctgggatgctatcttgggtgatccagaaggcccatcggtacattaccaccactggaataaatttgtggacatcttacagtgctaaaccgttgcatattctaatgcaggacacattgatgaggatatgctgtgccatgctcatcctagtccgaaagcgtctcttagctggagacttcaccgccaatgtccagctgctgcaacattacccagccaccaacatcgatcacctcctccacatcgccaaccggttgagaggaactgtagccggctagtgttttgttgcctttcctgcatacctgtacttcagttttgcccatgtgaccttcgtctggttaagtcgctaaatgcaatgttggtagcttgaaat

SEQ ID NO: 21782 - DNA, 1069 bp, Zea mays
  Clone ID: LIB3354-107-A3_FLI
ttgacaccgaggagctccagaagctatcaggaatcagggcaggtgcagatgtgccagcagctctgctgaacaacatcgcgcagatggcgtccggtgtgcccgctattttcaacacgctaaacgtccgtcgggccatcatccctgccgccaacggccactgctctgcccgcgcgctcgctcgatactacgcggcgctagcggccggcggttctgttcccccgccgcactcttcgggcgccatgccgcccctcggcagccacgtgcacacccccaagttcccgaccgcgccgctcaagaagaagaagaagggcgccggaaagaagaagggcgccggcggcggctccatgggagacctcaaggtccaggatataagcggcggcagcagcgacaggaacgggtactgccagctgcgcaccagcgacgccgacagcgaggcggggagcggcagcggcggaggcggcaggatgttcggcagcgacaggatcctcgacgcgttcatgggcgtcggcgagtacgagggcatggcgcaccgggacgtcaagttcgggctcgggttcaggaggtacgacgacgccagcagcggcagcggcaggctgaggtgctttgggcactccgggatgggcggctcgaccgggttctgcgacgtggagaacggcttcgccatcgcggtgacggtgaacaagctgtctctgggcagcgtcacgcgcggcgtcgtccggctcgtcctcgaggagctgggcctgcccgtgccggacgagtactcggccaccggggagaaggggcctgacatgatgctcaacctgacgacaacgacgacgactacgccgccgcaactgagatgacgacggcgaaactgagattatcaggttgggttcgtaataatctgtggaacaagatatatagcgagcagaaggaaggttggggtacagggatttggtggacagtatatatacgcgtgccattttgattttgacgtggcatgtaaaactcggcaaattctggtatattacgaagctgggtgctgggaattgtggccagcagtacaagaaatggacatgctagtttgttg

SEQ ID NO: 21783 - DNA, 1414 bp, Zea mays
  Clone ID: LIB3354-107-C2_FLI
tcattccaggtcaagtgctgaagatgatttgttttggggcccttctgagcactccaaacaagatacaaagcagtatgtcttgcagcagctcttgcatttgaattgatttaatggtgttgctttcaagatactattacacattttttcaggactccatgcttacaaaggattagtgaattcatcaatattctaaattaacaaaataagatcgaacttcatactagaaatagttgcagaaaggatctcttttgaaatttaatttaaagctttattcccttgtctaatttgtttgagactttaaaaccttttaatagctattttcgttggtgtatttggatcactaaagatggatatacggatctgcaagaatttttatgttttattaccatgatatcgtaaccaggtctgagtttccaagtctgttgagccaaagcagaagttccatgatgaaggatcattctgcactgaatcgtcaaaagtctcaggcaggcagattgccagttccttctgctgctactgcaaaccaatctggcaaagggaaagcagaggctacaaacaagcagactggtatacctaaagttttttactcgtattctttaaagactatcatcatgttcaaatttctaacatctgtcatcatgcagaggcaatggacttcagagattggttggatagtgaatgggccaagcttactggaacaaatggttataactgtgtcttgcttcaagttaggataattcaatcttttgtattacttctgttaattctaatacacttcccctttcagatgtaagcttccttgagttctgcataaagcaatcaactaccgaagcggaaatactcctccatgagaacattggttcccttgaccgcaaccacgagttcatcgacaagttcctcaactacaaggccttcctgtcagcagatgtgatccacatggccttccaagctcccagcagccgtggtgacggtgcagggtgggcaaaccctgctgctgcagctagaggaggcacggtcatagacgcggagctggatggcggcgggaagaaaaaggggaagaaggggaagaaggtgagtgccgcagtgttggggttcaacgtggcgagcaaccgtataatgatgggcgagatccagaacgtggattaggaggatggcggcacaccaacaccaccgtgtatataacatagtttggcctttggttacatgccaccgaagtctcagggctcgagggaagctgggggtgctcggaatggcggtctggtctacctgtttttgccgagggtgggaaactgagcttagatacagggtcatgtgctggtgattttgggttcctgtaacaattggttaggatcctgtaacggacagaaatattttcttcaatagaaactcaccagatggattcagttcagtagtt

SEQ ID NO: 21784 - DNA, 1121 bp, Zea mays
  Clone ID: LIB3354-107-D1_FLI
gtgcagagtctttcgtcatctcttctccggcgaagaacccccagtcgcccaccagatcacttgttaaactttgttgaggggtgatggcggtttctttcgcaaacctcagctccgaggcagggcttaaaaagcttgatgagtaccttctcactcgcagctacatcactggctaccaagtttccaaggatgacttggctgtctacacttcgttttcgtctgctccctcgtccaagtatatcaacgtagcaaggtggtttaatcacattgatgcgctcgtgaggctgagcggaattactgcagagggccaaggtgtgaaggttgaatcgtcagcagttccttcagccccaactccagatgttgctgaagcacaggccccagttgctgaggaggacgacgacgatgatgttgacctttttggtgaggagaccgaagatgagaagaaggctgctgaagagcgtgctgcagctgccaaggcttctggcaagaagaaagaatctgggaagtcatcagttttacttgatgtgaagccatgggacgatgagactgacatggccaagctcgaggaagctgttaggagtgtccagatggaagggttgctctggggcgcatccaagcttgtcccagttggatatggtatcaagaagctgcaaatcatgatgaccatcgtcgacgaccttgtctctgtcgacactctcattgaggactatctgtgcgctgagccagttaacgagtacgtacagagttgcgacatagttgccttcaacaagatctaggcgtgactttcgatcagtccttcccctggggtgctggcgatggtggtggctgggcaatgcaccagcctaatttatccatagctctatgtctgctttgtgtggccagtgatattgccgtgagtatttttggatcctattcgagtcgaatgtaccagtaccagagttaatttgctttaattcgaaacaccgttctgggtggaattctgttacctgtgttctttgcttgcagtttctctatttcttttttttttttgcatcggctggtggcggttcctttttttttttgcgttggctgttgtggttctggtcagactgtgttggtctagattcttggttttgtgtgatcgg

SEQ ID NO: 21785 - DNA, 791 bp, Zea mays
  Clone ID: LIB3354-107-F6_FLI
gcccaattgagcccctccgcttccgcccttccgcccttccgccaccaccaccacacctcgtccagcggcggtcggcaaaccctagaaccttagacccatccgccatactgcggttactgggcgcgggctagggccgggcctccgtaatcgcagcttgcggcgatgccgcttttcatctccgacgaggagctccgtctcctcggcggcgacacggctgccgttgccgagcgggctgatgctgccatccgtgagctccggcggcaggtggataccgtacgcgccgaggcggatgccgctgcgatcgctgccgagcagacctgcgccctcctcgagcaacggtacgcctccctctccgcggagttcgatcgctccaaggccgaggctgccgagctcaccgcctctgccgagcgccgcgctgccgagcttgcctcctctcaggcggagatacatcagcttcgcatccaggcgattgctaaggatggtgaggtggagaggttgaaaattgaaatctcggagctgcacaagtccaagtgccagtcgctggagttgattgagcagagagatgcagaaattaaagagaaggacgacatcatccagagctactacaataaaattgtaaacctggcagaaacttctgctggtaaagaggccaggatacaagaggtcgaagcaaagtttacccattgtcaagcaatttgcaatcgcatgactcaggagaaggagctgcttgaaaagcacaatgtctggcttgatgaagaactgaaagcaaaagtgaagaacttggctgaact

SEQ ID NO: 21786 - DNA, 1270 bp, Zea mays
  Clone ID: LIB3354-108-B3_FLI
ctccatttccctcacctcccgcagcagctagccgccgccagccaacaaccgaaccaaccaaccaacccacagcgagcgaggaaagcgtccaatggtagcgatggcggccgtgcagcagcagcgccgcgacgcggaggcggagctcaacctgcccccgggcttccggttccacccgacggacgaggagctggtggcgcactacctctgcgcgcgcgccgcggggcgccgcccgccggtgtccatcatcgccgaggtcgacctgtaccgcttcgacccgtgggacctgccggagcgcgccctcttcgggcgccgcgagtggtacttcttcacgccgcgggaccgcaagtaccccaacggctcccgccccaaccgcgccgccgggtcgggctactggaaggccacgggcgcggacaagcccgtggagcacgggggccggacggcggggatcaagaaggcgctcgtgttctaccacggcaagccgccgcgcggggtcaagacggagtggatcatgcacgagtaccgcctcgccgaagccggcggcgcccgcgccaagaagtccggcgccggcacgctcaggctggatgactgggtgctgtgccgcctgtacaacaagaagaacgagtgggagaagatgcagcagcagaaggagaaggagaaggagaagaaggcgatggagtcggaggcgtcgctctcgcactcccactccgacacgcggacgccggagtcggagatcgacgacgacacgttcccggagctgggctccctgccggcgttcgacgacatgggcccagccccagcagcagcagccactgccggcgtcgtcctgcccaaggaggaggtggaggacttcggcgacctcggcggcgacgactggctcgcgggcatcaacctcgacgacctgcagatgccgggggacgccgccgatttctacggctccatgctcgtctcgccgatggccgccaagatggagccggacggcggcttccccttcttctgagatccttcggcgactccggggacgaccggatgcagcgcaacgcaaactgtgtatagttcagattttcttcatggaaccaacaacaacaacaaaaaaagttctgctaatatcttgttctagtggtgtagtgcagaagtagcagcaggcatgattgaagttccattgtagtactgatgttcatcgccacttgatctgtgacaagtgacggcattctttcgtttcttggctgcaaattcttcgttgttcagaatataatttcagatgggtaatgcc

SEQ ID NO: 21787 - DNA, 1426 bp, Zea mays
  Clone ID: LIB3354-108-B4_FLI
gcttgcgccaggagtagcgcaccgacccagcgctggtcgccctccgcgatgaggtccatgccggctccaaggccctgccatgggcgatcgtcgacgatctgctacagtacagcgggcggctgtatgttccgccggcctccccactccttcaggaactgctgttggcggtccatgatgcgggacatgagggcgtccaacacaccttgcatcggatcaggcgcaatttccattttcctaacatgaaacggattgtgcaggactttgtacgagtgtgctccacatgccagcgctataaatcagagcacctccaccctgtcggcctcctcctacctctaccagtgccacgggggtctggacggacgtggcactggacttcgtcgaggcgctttttaaagtgcgtggcaagtctgtcatcttgactgtggtggacaggttcaacaaatactgccacttcctccccttggcgcacccgtactccgccgtgagcatggctcaagctttcttcaccgacatcgttcgccttcacggcgtgccgcagtccatggtgtcggaccgtgactcggtcttaacctccaggtttttgcgcgagctgatgcgggtaaggcttggcgcttaaagatacccttccctagaccccgcacagtgtgggaagtctacgacactaggtggagtacatgctgcgatggtgggatccctgcatcctactccagttgccacactgccatttctcgctccacactctgctgtggtacctttctgtgaaggggtctacaaatacgccacagcttgggacgctttgagaaaagatgctgcagtattaactcaagatgtaacacttttggcagaagatgctgcacagaaaagcgggatcaccatcgaacaagtcagggataggttacggtcagtgttgtctttgactgatgtcactcgatttccagtcccaaagaacccacaggcggtcatctttgttggtgcaacggacgatggttatattcccagacattcagtgatggagctccagaaggcatggccaggctcagaggtccggtgggtaacaggtggccatgtctcctctttcttcctccacaacgatgcattccgcaaggccatcgtcgacgcccttgatagattgtaacaccagaaggtgagagagaggccatccttgtgatggcactttatgttgtgtgacatttctgaacttggggttgcggcatgagctgaaccctctgtaactgccaacctaactgctcttagtgacgctgagattggaggtagggtggctgtacatgacaattgtagaatgtagcaccccattatttggcaattgttctgcaaaatatttgtttgtcaccatgtatcaatttgaatgctacatcttctgattgtctgacatgcatgtcaatcagctaggcaatttggcagtttc

SEQ ID NO: 21788 - DNA, 721 bp, Zea mays
  Clone ID: LIB3354-108-D10_FLI
gttggcttctcctcccccaccggttcgtgttcaggttctggttcgtgggcgagagggaagagatggcggcgtcggacgttgagtaccgttgcttcgttggcggcctcgcctgggccaccgacgaccactccctcaacaacgccttcagcacctacggcgaggtcctcgagtcgaagatcatcctggatcgggagacgcagaggtcccgcggcttcggcttcgtcaccttctccacggaggacgcgatgcgcagcgccatcgagggcatgaacggcaaggagctcgacggccgcaacatcaccgttaacgaggcccagtcccgcggcggccgtggaggcggcggtggcggatacggtggcgggcgccgtgatggaggcggctacggcggtggcggtggaggctacggcggtggtcgtggaggctacggcggcggtgggggatacggtggtgcaaaccgcggcggcggctacggcaacaacgacgggaactggaggaactgagcggtggggtccgctgaggcctagttatcttgttcgcttctgctaccgtgttcaccctagtctagagggggtttatcttcgtctgtggtcgtctcgtgtccgtatgtttcgtttcgtgttcgttgttgttgttgcccatctgtgtttttgaccgcaagctcgctcctctgatgttgttagtgatgtctacaatcgtccaatcccgagcctgcattgagctc

SEQ ID NO: 21789 - DNA, 1224 bp, Zea mays
  Clone ID: LIB3354-108-D3_FLI
cccttctttaaccccgccacccagatccagccgcgccgcactccaccacggcccccacaactccaccgctagcagcagccaacagactcccgtcgggatggccgtggcgctcctcctcctgctggtgacgcccgtcgggctgctcgccgcgctcgcgctcctcacgcggccccgggccgcgcgggtcccgctcaaaggccgccacgtcttcatcacgggcgggtccagcggcatcgggctcgccatggccacggccgcggcgcgggagggcgcgcgggtctccatcctggcccgcaacctcgcccgcctcgaggacgcgcgcgccgccatccagcgcgactcgggcagggacgacgtcggcgtccacgcggccgacgtgcgggacgccggcgccgtcgcgcgcgcgctccaggaggccggccccgtcgacgtactcgtctgcaaccacggcgtgttcgtgccgcaggagctcgaggggcaggacgtggatgagatcaagtggatggtggacatcaacctcatgggcagcttccacctcatcaaggccgcgcttccggccatgaaggcgcgcacccgcgagacgcgcctccctggctccatcgccatcatgtcctcccaggccggccaggttggtatttatggttacactgcctactcagcgagcaagttcgctcttcgcggattgggtgaggcgttgcagcatgaggtcatcgcggacaacattcatgtctcgttgatattccctcctgacactgagactccaggattggaagaggagcataagaggaggccggaattgacaaacatcatagcaggatcatccggtggaatgaaggccgacgatgttgccaagaaggctctggacggcatcaaatccgcaaaattcattgtcccctgtaatttcgagggcgcaatgttagccgtagccaccgctggtttatccccgcagagctccccgttaatggcattcctagaagtggttggcgctggactcatgcggtttgcggcaatttgtttccagtggaattggttctccaccatcgagagctattatgccaagaaaaagaagagcgagtgatagcacaaaccacagctggacattattttcctagatcccgtgagagtcaaaagaaacaaataagtcacgtctgacctaatgtaaatgtagcgtggtagtactagagaagttgaagttatcttcttcattttaatggttttttcatc

SEQ ID NO: 21790 - DNA, 862 bp, Zea mays
  Clone ID: LIB3354-108-D7_FLI
ctcgagacctccccccctcgctggtctcagccatggtgagatctctctcgtccttgctctagcgcttgttgcatcttcgctgcgctgcagccatggatttggcctcgcccttacgaacccctgacgtgcggcggctcttgttttgtggttccaggtgaaatattcgacggagccgtccaaccccaccaagtccgctaaggccatgggccgtgacctacgtgttcacttcaagaacacacgtgagacagcttttgcccttaggaagttgtcactcaccaaggccaaaagttaccttgaggatgtgatcgcccacaagcaggccatcccgttccgcaggtattgtggtggtgttgggcgcactgctcaggctaagtctcgccactcaaatggtcagggacgctggcctgtcaagtctgctaaattcattctagaccttctcaagaatgcagagagcaatgctgaggtgaaaggacttgatgtggataccctctatgtgtcgcacattcaagttaatcaggctcagaagcagcgacgcaggacataccgtgctcatggacgcatcaacccttacatgtcctccccatgccacatagagctcatcttgtcggagaaggaagaaccagtgaagaaagaggccgagtctcagatcgcaaccaggaaggcttagagaaggggctctatcttctgtgattggcttagtacaagttttggctgattatttgttgtctcatactgtttacctgagtattgtttgcaagtgctttatcactgtccgaactgtgcatgcaattcactggtctagagtattgttcgtggattgtttcatatttgtgcgtatggctcatgtctgttgctttgcttt

SEQ ID NO: 21791 - DNA, 736 bp, Zea mays
  Clone ID: LIB3354-108-F3_FLI
cgcctatcctctgcaagctctctcatcagccatggccgccgggcggcgtctggcagacacggcgccggcggaccgccctcgcccgcggcctaacattaggctcggggactatggtgcagccaaggatgacttgccgatcgacgtgacgcctcttgatctcgtcgtcgtcagatcgtcgccgatcatcggcaagttgttcttggctacaccgtggctcctgctcctgatgtaaggctccgtctacggcgacacttggccgtcagatgatcgacgacaagcaaggccaatcaagttcggagaggccagccagacggacaagacacgtccaaaggaaatctgccgccgatcacggacggatctgctacggattttacaccagcgccgaccgcgccggaccggaggagcaggaggacctggaccgctgcggcggcgcgcgcggtggccgccgaagaccgtcccttcttgtgcctcgcccgtgcggtgcggcctcggatgcgctcacgtgcgcacgtacgggtacggctcgggtgtcgacataccggctggcttgagcggttcttgttcatcctcgtctcgtcgcccttcggcgtacggctggcacgggagcacgggacacgtacgaccgattcgccgcaagctgtctatttctaaatattaaagccggagcttctcgcattgtatccacgtcaacattttgcatttcagccaatattaaagtcaggagcaaatctgctct

SEQ ID NO: 21792 - DNA, 1050 bp, Zea mays
  Clone ID: LIB3354-108-F4_FLI
tccgccaataatgctgcgccgcaacccaacccgcatcgagctcacctcctccgaccgcgacgagctcgaagaccacctccgcgccgccgcggcagccaccaccaccaaggatccttccggttacaccactccgtctccagtccttggcccgcagacctccaatcccctgctccaattcctccacccgaagcccggcgccgtgccatccaagtcccaacgcatcggcatcggcctctccaccccgccggctccggccccgaacccgcgaccaccccatccaccccatggaggttgagatcaagctccgcctccccgacgccgccgcgcaccgccgcctgtccgcgttcctcgcgccccgcctccgccgcacccacgcccagcggaacctcttcttcgacgacgccgcgcgcacgctcggagccgccaccgccgcgctccgcgtccgcctctacgacgggcccgacgaccgcggcccctcgcgcgccgtcctcgcgctcaagcgccgcccgcggatcgaggccggcgtcagccgcgtcgaggagatcgaggagcccctcgagcccgcgctcgccgtcgcctgcgccgacgaccccgcccgcctcggcggcctcgactcgccgatcatccgcctcgtcgccgccgagtacggcgtcggcggggacgccgcccccttcctctgcctcggcggcttcgggaacacgcgcgctgtctacgagtacgagcttgaggacggcggcggcggcctcgtgctggagctcgacgagacgcggttcgactttgggaccaggtacgagctcgagtgcgagacggcggagcctgaccgggtcaaggaggtgctggagcgactgctcacggtggccggcgtgccctacgagtactgtcggaacagcaagttcgcctgcttcatgacagggaagctgcttccttgactaggcatagccttgtccgttcttggtatttcccttcttcgtgccattaagctgcatttgaacaacttgaatggaatgtcagtgacgctttgaataatgacaaaaataagtgtggcttctc

SEQ ID NO: 21793 - DNA, 845 bp, Zea mays
  Clone ID: LIB3354-108-H3_FLI
ctgcgccagccaacccaccacccatccgtttctcgttctccggcccctgcctgactcccctcctcccccccttaacaatggcagtacaggcgcagtacccatccaatctcctcttccacgacagaggtgagccggacaggaagaaggcgatggacatgcccaagccgccgcagctcgccggagtctcgccggcggcggtctacttctccggcggtggagcgagtgggaataatcggaggaagcgagccagggaggccatggcgccgccgccggcggtcaaggaggattacgtcaatctgttcgcactccagcagcagcagcagcagcagtcgatgcccttcgccaacatggcgctcttccagaaccagaacagagtctcgtcgtcgccgtccccggccgcgacggcgctcgtgtccaccggcctccgcctggcattcgacgagcagcagcaacatctgctacaacagcaggagggcaagcagacgaatgccttgcgctattcgtcgccgccctcgctgttcgcctctgtctccgacgagctcgccgcgcaggcgaagcagcacgaagaggaggtcgaccggttcgtccgcgagcagggcgagcagctcaggcgggcggtggccgatcggctgcggcgccacaaccgggcgattctggtcaaggccgaccagtccgcggcgcgcaggctccgcgagaaggcggcggaggcggagcgcgaggcgcggcgcggcgccgagctggaggagcgtctggcgcgcctccgcggcgaggcggcggcgtggcaggccaaggcgctctccgagcaggccgccgcggtcgccctgcacgcgcagctgcagcaggcc

SEQ ID NO: 21794 - DNA, 574 bp, Zea mays
  Clone ID: LIB3354-109-B9_FLI
cagagtggaatttacatataggtatgtggataagtaagctgctagagattgtcttagttcaacctcttaaaaaaaattggctccatccttgcatataacattagttaaaagttagataaatctgattcataacaaaggtaagctgacctatagttttaaatggaaggaaatagtaacgttaacgtaggttgagaaatgtaagacatgtattgcaggccggccgagttcgttgcgcatcgagttcagttcactccttgtccttgcaaaggagacgctagcgggcagggcaggtgcaaagtagtagtcgaaacgggcggtcgatagaatcagcagttcagcacccacccgtgctgctggccctgccttgacccgtctcggctcgtctcgccggaagataaccgaacttggtgggcacagactccgttcctcgctgtgagccgtcgatggtggcaagcaatcccggcccgccggcaaatcctcccaacccctcgcgcgcgcggctcccgtcgttggctgcgcctgcaaatcatctacagcgcccggcggcctgacacacgctggccgtccgttcgtg

SEQ ID NO: 21795 - DNA, 1074 bp, Zea mays
  Clone ID: LIB3354-109-C8_FLI
cttcgaagttcgaatcgaatcgcgccgcgatcacccacctcatggcggacaaggagcctgtcgtggagcggccagaggcgggtgaggaggaggaggacgcctcagccgccgccgccgcgggggaggaggaggacacgggcgcccaggtggctcccatcgtgcggcttgaggaggtagccgtcaccaccggcgaggaggacgaggacgtcctgctcgacatgaaggcgaagctgtaccgattcgacaaagacggtaaccaatggaaggaacggggcacgggcgctgtcaagcttctcaagcacaagcagaccggcaaggtccgcctagtcatgcgccaggctaaaacgcttaagatctgcgcgaaccacctcgtggcctccaccacgaagatgcaggagcatgcgggcagcgacaagtcgtgtgtttggcacgctgctgactttgccgatggcgaacttaaggaggagatgtttgccatcaggtttggttcggtagaaaggccttttttgtttgagcccaggcatccaattttggtggcctggggttgacattgctgcctgggaagcttccaaccaaatccaaaaactgcaagaagttcaaggagttggttgaggagatagctgagtcgcttacaaagaacgagggcaaggaaggtgaagatggtggttccacggctggattgctggcgaagctcactgtgagcgagggcaaatctgagggaagtggcaagtctgagtccactgattctggcaaagtgactgaaaccaaagccgactcagccccagctgagtagttggtgtggttgcacttgcacgcagattcgcctggtgctgaactagtttgtctgtccgcgtccagtggaagtttggtgccctttagccatggaatacgattgctatcatttgggcccgggccgagttggaggagtctcaggtgttcggtctggtttggtccgggcttgattttgctaaaaacttgggagtccatgggggttgggaacgtttgatatgtgagtcgctagtatttaactgcatggatcgttgtggattgcggtaaattcataaagtggaccct

SEQ ID NO: 21796 - DNA, 727 bp, Zea mays
  Clone ID: LIB3354-109-E10_FLI
gccggccgacccgctgctcaatccgtcgagttcgacatggtacttgctagctctccttgcctgcgcccttctcgttcctatacgcttcggattttaccggactgctctgttctacgcgatccgaggcaggaaaccggcgtgttggattggattgcacttgcgcatgctcttcccggctactcccttggttgctgggttgtcagtggctgccgctgcattaagcggaagatacatgattagagcatggcaagccttccggacccaggcggcaatgccgcgggtgcgccgcttctaccctggtggattccagggggaaatgaatcgaagggaagctgcattgatcctcggcgtcagagaacgtgctacagtggacaagatcaaggaggctcacaggagggtcatggtagctaaccaccctgatgctggtggcagccattacgtcgcttccaagatcaacgaggcaaaggacatgctgatgggaaaagggaagtccgggtcttcgatcttttagctgacacaaagctcattctgctgtggcgtgatcaggctgtagctttttcaagggactgacagttgcacgtttcaaatttcttaacaatgctctgctgcttgtaccatatatcataaaggatacagatacagatacagaattgaatcaacttattatctgggtcttaagttattgtttggcctgattggaaatagtaaccatgtatatctcagagcc

SEQ ID NO: 21797 - DNA, 1341 bp, Zea mays
  Clone ID: LIB3354-109-F3_FLI
ggagatcaggtcctggtgcagaggaggagccagttgatctcacaaccctactcatacattgtgctcaggccgcggctatcgacgaccacaggaactcaagcgagctgctgaaacagatcaggaagcattcctctgctactggagatgctggccagagattggcacactacttcgccgatgggctggaggctcgcctagctggctctggcagcagcatctaccgttcgcttgctgcaaagagaacttccactggtgatatactgaaggcgttcagtttgtatgtcaaagcatgtccgtttaggatactatcacactatgtcgcaaacacgaccatcttaaacgctacgaagagcgccacaaggctgcacatcatagactacgggataatgtatggtttccagtggccagtcctcatgcagcggctctcaaagagacctggtggccccccgtaccttcggatcactggtatagactttcccctgtcaggattccgccctgcagagcgtgttgaggcgacagggcggcggttgcatgagtatgcccgtatgttcaatgtcccatttgaataccaagccattgctgccaagtgggatactatccaagttaaagatctcaacatgaagagcgatgagttcgtcgtcgttaactgcctctaccggatgaggaacatgatggacgagacggtgaccgatgacagcccgagaacgagggttttgaacacaatcaggaagctgaatccccatctgttcgttcatgggatcgtcaatggtacttacaatgcacccttcttcgtgacgcggtttaaggaggctatgttcttcttctcttcgatctttgatatgctcgaagcgaatgccttacggatggatgagcataggctgctgatagagagagagttctttggccgggaagctgtcaatgtgattgcctgtgagggcacagagaggattgaaaggccagagacctacaagcaatggcagatgaggaacctcagggcaggcttccggcagctagctctggacagggagataatgaagagagcaaggtacaaggtaagcaagagctatcagggggatttcctcgtggacgaagataacaagtggatgctacaaggttggaagggtcgtatcatatatgcactttcagcatggactagctagacttgtaaatattagtgagctactgagctgcttagctgacctcttccattaatttcttgattaatcaccatttcattttgctgtattatgtttacgttgttgaatctagccctcttttagaaaccaaagttttgtatgtttgaattgactgcaataatagaatcttgtccgtgtctgcctg

SEQ ID NO: 21798 - DNA, 1338 bp, Zea mays
  Clone ID: LIB3354-109-H10_FLI
ggaggcctgacgatgaggtccggcaaagcagaccagcgcaaataattccggtgcctctcatattgttgcaatcagttgagcaagcccggacgcccggttgctaactcagctccgacggccatccacacgcagctgcagctgatgtcggcgcagcagaaattcgggatcaactacgggcagatcgcgaacaatctcccggacccgacgcaggtggcgaccctcctccggtcgatgaacgtgaacaaggtgaagctctacgacgcggacccccgggtgctgacggcgttcgccaacacgggcgtggagtttatcatcgccgtgggcaacgagaacctgcagaccatggccggcagccccgccgcggcgcggcagtgggtggcggcgaacgtgcggccctacatcccgggcacgcgcatcacctgcgtcaccgtgggcaacgaggtcttctccggcaacgacacggccacgatggccagcctcctccccgccatgaaggccgtccacgcggcgctcgcggacctgggcctcggcggccaggccaccgtctcgtcggcgcactccgtgaacgtgctcgccgccagcttcccgccgtcgtcgggcgcgttccgggaggacctggcggagtacatgaagcccatcctggacttccacgcccagacggggtcgccgttcctcatcaacgcctaccccttcttcgcgtacaaggcgagcccgggcagcgtgtcgctgccgtacgtgctgttcgagcccaacccgggggtgcgcgaccccagcaccggcctcagctacgacaacatgctgtacgcccagatcgacgccgtgtacgccgccatgaaggccatggggcacacggacgtgggcgtccggatctcggagaccgggtggccgtccaggggcgacgaggacgagaccggggccacggtgcagaacgccgccgcgtacaacggcaacctcatgcagagggtcgccatgagccaggggacgccgctcaagcccaacgtgcccgtcgacgtctacgtgttcgcgctcttcaacgagaacatgaagccagggcccacgtcggagcgcaactacgggctgttctaccccaacggctcgccggtgtacgcgctcagcgccggctccggcggcggttcaggttcgggcgggtcgctcaacccgtactacacatccatgttctcctcctcgtccagatccgcggtgagcgcgaccttcttgacagagagagtgatgctgttactgctgctgcaagcaactgtaatactccgacactactgctagtcagtgaataccttgtaatcttgtatacgaaaaaaaaaatgcatctcaattcaaccc

SEQ ID NO: 21799 - DNA, 1094 bp, Zea mays
  Clone ID: LIB3354-110-A7_FLI
cccgctctcacgccgctccaggtcgagggccgagcgagatggtgaacaccttcttcctcttctgcgggtgcgtggaccaggccagcgtggcggtggtggagaagtggggccgcttcctccgcctcgccgacccgggcctccacttcttcaaccccctcgccggggagtgcgtcgcgggctccctcaccacacgcgtccagtccctcgacgtccgcgtcgagaccaagaccaaggataatgtcttcgtccaactgatctgcacaatccagtaccgtgttgtcaaggaaaatgcagatgatgctttctatgagttgcagaatccccagcagcaaatccaggcctacgtctttgatgttgttcgggccatagtgccgagaatgaatctggacgatctctttgagcaggagaacgatgtggccaaagctgtattggaggagcttgaaaaggtgatggcagattatggttacagcattgagcacattctcatggttgatatcatccctgacgctgctgttcgtaaggcaatgaacgacataaatgcagcccaaaggcttcaactggcaagtgtttacaagggagaagcagagaagatccttatggtgaagaaagcggaggcagaagcagaggcgaaatatctttctggtgtcggtatcgctaaacagcggcaggcgataaccgacggccttagagagaacatcctgaacttctcacactcggtgtcgggcaccagcgcgaaggaggtcatggacctgatcatggtcacgcagtacttcgacaccatcaaggagctcggggacggctccaagaacaccacgatcttcataccccacggaccaggccacgtgaaggacatcagcgagcagatccgcgacggcatgatgcaggcctcaagcagcaacgtgtaaatcaccgactctctgcacgattggagacggctcggctcaggatgaggcctggagtaccatgttcatagtgttaggttgttgttagtggtaaataatgagtgctggggcttttggcgagtcttgagttacatgcggttgtacaactagtgtggtttgttttatatataaaaatgtatatttacatggttc

SEQ ID NO: 21800 - DNA, 639 bp, Zea mays
  Clone ID: LIB3354-110-C5_FLI
gtagcttgccactctcaccaatcaagttttcatgtctgatctcgacattcagatcccaactgccttcgatcccttcgctgaggccaatgctggggactctggtgcagcagcagggtcaaaggactacgttcacgtgcgcatccagcagcgtaatggtcgcaagagcctgaccaccgtccagggattgaagaaggagttcagctacagcaagatcctcaaagatctcaagaaagagttctgctgcaatggtacagtggtccaggacccagaacttggacaggtcattcagctccagggtgatcagaggaagaacgtctcgaatttcctcgtccaggccggcattgtgaagaaggagcacatcaagattcatggtttctgagcaaccgccgggtccatatcaaaccaaccctgcatgcagggcatcttattatatataatatctgaggtggagcatatctatctggctgtgtactgcaagcaggcctagtacgccgcctgcgcgttcctcctattacacatataggcccctccctgcgtgtatgcttgttaccgtcgtgtcgaaccttgtactacgaggctccatcgaacatcgatggcttgcttctttatcagaacatgtttgaataaacgctatttggt

SEQ ID NO: 21801 - DNA, 1044 bp, Zea mays
  Clone ID: LIB3354-110-C6_FLI
cacgaatactttttctctgatgatacaacagaggtcatccgtagtgtcaaagagcttggttatccggaatacaatccgatcttcgtcaagaagctcataacaattgctatggaccgcaagaacagggagaaagaaatggcatcggttcttctcccttcattaagcatggagctgttctcgtctgaagacatcgccaagggatttgtaatgctccttgaatctgcagaagacaccgcgctggacatattggatgcctcagatgagctgggactgttcctagccagggctgtgattgatgacgttctcgcacctctaaacttggatgagattagcagcaagcttccaccaaactgcagtggggctgaaacattgaacatggcacgctcccttgcgtcggcccgtcatgccggtgagaggcttctgaggtgctggggcggtggaaccggatgggctgtggaggatgccaaggacaagataacaaagctcctggaggagtatgagagtggaggcgatgtaggggaggcatgcaactgcatccgtgagctgggtatgtctttcttcaaccatgaagttgtcaagaaggcgctcgtgatggcaatggagaagaagaacgagaggaccctgaacctgctgcaggagtgctttggtgaagggatcataaccatcaaccagatgaccaaggggttctcaagggtcagggatgggctcgacgatctggctctcgacattcctgatgccagggagaagttcctttcctatgtgcagcgcgcgaagaagagtggatggctcctgcctgggttcggtgtggcatcttcggcttgaacagctgggcagaagagaagtacgaagctgaagcggctcagcaaacccagtttggatgtgtgttttcgtcgttcgtggttgcccttgcgcctaggttagcggagcgagcccttcctggttgcggtggtggtggcttgtgtaggtctcgcatctgacatgttcatgctgttcttgtttcatttcatttaactctccatagaccctttttttttacatcaagct

SEQ ID NO: 21802 - DNA, 593 bp, Zea mays
  Clone ID: LIB3354-110-E6_FLI
ctctcctcctccagagctcgtcgccaccggccaccgccaccctcgatcacgccgtccgtcgaggtaaggtcagcatggtgagggtcagtgtgctcaacgatgcgctcaagtccatgtacaacgctgagaagatcggcaagaggcaggtcatgatcaggccgtcgtccaaggtcatcatcaagttcctgacggtcatgcagcgccacggctacattggagagttcgagtacgttgatgaccaccgatcgggcaagatcgtggtcgaactcaacgggaggctgaacaagtgcggcgtcatcagccctcgctttgatatcggcgtgaaagacattgagggatggactgcaaggctgctcccgtccaggcagttcggatacatcgtcctcacaacttcggcaggcatcatggaccacgaggaggcccgccggaagagcgtaggaggcaaggttctaggtttcttctattgaagaagctgagaatctttgttatggcctgcctgcctgtcttactctctcagactagagtacctgttattttactttaatatgtctctctcagactagagcgccttcttttacttgaatattggtgac

SEQ ID NO: 21803 - DNA, 947 bp, Zea mays
  Clone ID: LIB3354-110-G7_FLI
cttcgccttgcgagggggcggaggggaggtggtagtggtagggtatacaggagtgctctgcccatggagaaggcggggcaacaacgccatgttatcggcggcggcggcaagaaggcgcccgcgctggggctgcagaagcagaactcgtggtcgccggacatcgagcgcgacgaggcgtgggagcgccggcgcaggggcatgcgccgcgggggcacggcgctgcgccgcgcccgcagcgtcacggacgacgacctcgacgagctccgcggctgcatcgacctgggcttcggcttcgagccggcgcccgccgccgcgtgcgcctgcgcctgcgccgggaggaaccgcctcctggagacgctgcccgcgctcgacctctactacgccgtccacggcggggcggcggaggcgccgccgtgctcgtgcggcgccgcgtcggaggcgtcctcgtccgaggagtcgccgctcggcagccccatgtccatactctctccaggcgacacgccggagacggtgaagatgcggctgaagcagtgggcgcaggtggttgcgctgtccatgctgagccgccactgagctctccgggccacggccgccgctaccttgtcgcattgggaggagagagaaaaaaccattcgagatgcacacaacagcagaaggaaggaatctccggcggtcgcctcaagcagaaaaaagaggaagagaaaaaaaatctgttagggtttggtcatttggtgggccgccgccgccttccaccttgctcgtcctatcttggactgctagctaatcatctttcttccaccatgattgtatgattccgttggagacaaaacatcatgcctaattactttgcttgcttattaatcctcttgcttcccccctaatccatattagtttctcatcttcgtgtatgtacatgattcctttcaagaggcagattaatttccatc

SEQ ID NO: 21804 - DNA, 1908 bp, Zea mays
  Clone ID: LIB3354-111-F5_FLI
ggctggacctgcttatacggtgcctatgcccacgcatcgggctgtgggaggcgggctctgtttctgactcatcggccgagggcgatggcggcggcggcggggaaggcgcgggcgatgagcctggcggcggcggtgcgtgtggtggcggcgacggcgcggccggcatcgagcgcagccgcggcggcgggtgtgggtgcgatggcgttgatcgtgcagggcgaggacacagccttcgggtcgctggagtggtgggcgtacgcgggcatctccttcttcctcgtgcttttcgccgggatcatgtccgggctcacactggggctcatgtcgctcggcctcgtcgagctggagatcctccaacgcagcggcactgacgccgagaaggctcaggctgctgccatccttccagttgttcaaaagcaacaccagcttcttgtcaccctgttgttgtgtaatgctgctgccatggaggcacttcctatatttcttgacagaatgtttcatcctgttgttgctgtggtattgtcagtgacatttgttcttgcctttggagaggttataccgcaagcaatctgtaccagatatggcctagcagtgggtgctaactttgtatggctcgtacgcattctcatggtcatttgctatccaatttcttaccctattgggaaggtcctggactgtgctcttgggcacaatgagtctgcactttttaggcgagctcagttgaaagctctagtttcaatccatggcaaagaggctggcaagggcggagagcttacccatgatgagactacaatcataagtggagccttggacctgaccgaaaagactgctgcagaagctatgacacctattgagtcaactttctcactagatgtggattctaagttggattgggaagcgattgggaaaattcttgcccgtggtcatagtcgtgttcctgtatactcaagaaaccctaaaaacatcatcggtctcctattggtgaagagtcttttgactgttcgtgctgaaacggagacgccggttagtgctgtttcaattagaaggattccaagggttccttcagacatgcctttgtatgatatactcaatgagtttcagaaaggaagtagtcatatggctgctgttgtgaaggctaaacctaaaactgaaccaccgcctgacagaactgaaccaaatagggaagcagttgggccagcacagttgactgttaccttgttatctaatgctgaagaaagtgcagacaatgtggttgtggatatcgaaagaccacataacaggcagattaatgggatcccagcatctaacgcagtgcctaggtcatcagaggatattgaggatggtgaggtcgttggaatcatcacacttgaggatgtatttgaagaactcctacaggaggaaattgtggatgagactgatgaatatgttgatgtccataaaaggatccgagtagctgctgctgctgctgcatcatcggttgcaagggctccatccgttaggagattaacgggccaaaaggctgcaaaccttcagggagcacagaatcgccaaggacagcagcctcctggaattctcaagaaacctactgagggtgattcaaactcatcaaaacaagtgaaccttgtcgaacctcttcttgaaaagaggaggtaactctaaaaacgtagccgataaaacgcatggaatcaagccggaagagcctatggttcttgctattataacaagaggtaaatatagatgaactcgttgttgtaaattccaacaggagcttttggtgtcatggacattagtcatgaattctctctccccctctccccttctcccctctttggttatggactgcgaaagtagaatggccactcttgaatttatttatcaccgctcaccgcagtagcaactgcattatat

SEQ ID NO: 21805 - DNA, 948 bp, Zea mays
  Clone ID: LIB3354-112-B5_FLI
ccgctccttgtatgcgctggcccatggatgcccacggcttacaagactgaacattagtggatgttccagtttcagcgacactgcgttgatttaccttacctgccgctgtaaaaacctcaagtgcctgaacttgtgtggatgcgtgaaggctgttactgacagagctttgcaggctattgctcagaactgtgggcagctgcagtctttgaacctaggctggtgtgatgatgttacagataagggagtgaccagcttagcgtcaggatgccctgatctcagagccgtagacttgtgcggttgtgttcttataacagatgagagtgtggttgctcttgccaacggatgtccgcacctgcgctcgctgggcctctacttctgccagaacatcacggaccgcgccatgtactccctcgcaaacagccgcgtgaagagcaagcgtgggaggtgggatgcagtgaaagacgggctcgcgaacctcaacatcagccagtgcaccgccctgacgcccccggcggtgcaggccgtctgcgactccttcccggcgctgcacacctgccccgagaggcactccctcatcatcagtggctgcctcagcctcacgtcagtccactgcgcctgcgccctccacccacaccgtgccgggagagccctgatggccaaccatgcgtactaataaacatgttggtggctttgcgctgatagttctcgcgaatggggacgcatgcctggggggtgatggcgtcgtccaggtgtagaggaagctccctgtgtacataaactcgaaacttggcggtgtgataaggcactgctgtggtaggactttgtgtgataatcatggagtggcgaatttctagagaatggcatgtactccagtgctacctggacattgaccagaaaaaatgtggtatctagttgccttctgtgtaagggcggacgtgttgggatgtt

SEQ ID NO: 21806 - DNA, 643 bp, Zea mays
  Clone ID: LIB3354-112-B7_FLI
catcagctcacactccggcagccgagcgatcgagctccccggtcgctagcacagccggccactgcacacgacggtgctggtaggttgcaagcacttgcaggatggcgcaggtcgctaagacgcttctccttgtggccctggtggtcgtgtcggcggtggagctgtgccgcgccatcgagttcgacgagcgggacctggcatcggacgaggcgctgtgggacctgtacgagcggtggcagacgcaccaccgggtgcaccggcaccacggcgagaagggccgccggttcgggaccttcaaggagaacgcgcgcttcatccacgcgcgctcatcaccagggacgcctcttcccagtgacaggctgatccatctcggcgtcgaactcgtactactggcacgtaagtaggagtacgttgacaggatgacatcctgctgctgctgtttgcttgtactattttcgattgtgtttgtaggtttgattgtgccagtctcgatcagagacgatatacacatgctagaataaaatatagcagcgcgtgtgcgcaacaaagactaggagtgtgatatcaaagttgtgcttgtaatgtaacgtaatacggtgtcgcatatgcaccgggatatggtatattgaatggagctatgcgt

SEQ ID NO: 21807 - DNA, 677 bp, Zea mays
  Clone ID: LIB3354-112-C2_FLI
cgtcttctcttctctctcgtccgtcccgcactcgccgcgacgtgacaagacaacgcgacgcgcgcgcatacgtcgtccaaggcacgcaggggccagccaaccaatcgcgtccgtccgggtctggtggtggccggaatgggcctcctcgatcagctctgggacgagacggtggccggcccgcgaccggactccggcctcggcaagctccgcaaggtggtgatcagctcgttggaccgctgagttagaacagatcaatcgccaataagcaacaaccgagctagcagagggcatgtttgcgttcttctgaatgttgtgcgcgtgtgtctgtggcagcataagtagagagtatgtcgatgatgatgacgacgacgacgatcagttcgcggcagggaggttagaagtggcctggcgccgatctccatcctagtttgggcgtttggcctatagccggcaggcgcgttctccagttgttggatcaggggaagaactcctgccgtgggaggctcctagggctgcctgcttcgttttctacgcaccctcctcccctctgtaattatcccaagcaccacctcgtactggtctggtagtagtagcagtgttttgtgtgtgtgtgtgtgtgtgatgctacgatgtagctgtgccttttcttctgctcgcctggaaaccttttgcgttcc

SEQ ID NO: 21808 - DNA, 941 bp, Zea mays
  Clone ID: LIB3354-112-D11_FLI
caaaaccacgcgctactacaccagcctagctagccctttcgccgtcgctgcggctcctgtctagtgactcgtagatttcgttgtttccgacaatgtgcggcggagccatcatcgccgacttcgtccccgccggcgcccggcgcccggcaacagacgacaccatgtccgcctccatcctctccggtactacgttgcgaggaccatccggagctgccgctgccggccccggggcgcaagacggcgtaccgcgggatccggcgccgcccctggggccggtgggcggcggagatccgcgacccgcggaagggcgcccgcgtgtggctcggcacctacgccaccccggaggacgcggcgcgcgcctacgacgtggcggcgcgcgagatccgcgggcccaaggccaagctcaacttcccgcccgccgtgggcggcggcggcggcggcgcgcgcgcgccggcgccggctgctgccaagaggcgccgcaagtccgcggcggccgaggagagctcggcctcgtctcctccggcggcggcggcggcggccgtcgtggcgggcggcggggaggaggcgctgcgcgactgcatgtctgggctcgaggcgttcctggggctgcaggacgccgacgagggtggcggcgtcgaggcgtgggacgccgtggacctcatgttggcgtaggccgtacgccgtagcaggggggctctggcccagccccagccccagcgcgcgcgtgccgtcgctgtgaacggccgccgcagctgttttggatcgagtaataatattattagtagtataatgtttctccaagcagctaagataattgcaagccttgctgggtgggtggtattactagcactgctatctaggagtatgtactagcaggatgggtttatctagcttgttgctaaacagaaaattaatctaagaaaacagagatatggtctgtt

SEQ ID NO: 21809 - DNA, 1886 bp, Zea mays
  Clone ID: LIB3354-112-E6_FLI
catgcccgtctcttctccgtccccatcccccacgtttatcgcgctcctcgcccctcctaacgtcgtcctttcggtctagcgcgacaaccgatgcacggctccgggctcaggccacgccacacccacgcccatgctgcgagggctccatggaaggccatccccgcgatcttctgtccatggagagcacggcgccggccttccgaaatctccgcccccacccccgcgaccgcgcgatccactcccccacgcccgatctgctctccaacatacgccatccgcgtgggcgaggcaccaaccctcaaccttctcggtgatgtcccaggaagagtacagccaggtacgccggtctgattttatgtattcaccgcgccacgcccgccgctcggtcctcgccgcgacagacgcctaccctcacctacacgatgctcactcctccacacatcgcaaagccggaggtccgcgccccctccgtgctgcgaccccccttgtgtgcccatgatgctggaagggaagtcctaccttgtgccgcgctccctgctgagctccaagacagagacgcagtgggcgtacctcgcccacgaggtccacggcggcaagcgcctggcgccggaagactgcgaggtcgaagacctggacgaagctgacggcggcagcaagtgcagcaagccgccgtctccacagccgcacacaccggacatctccgaggctcgtggctccagccgccatgcctccggttgcggagagcagcagggcactgggagcaaccccatgaattcaatcggtgacggatggaaagttctatgtgatccgcttgctcttcaccctcgccgcggccatcagcgcggccttgctcctcgtcgcctcactccgccgccgtgcgccgcctcccgggcttcccgccaaactcgtcccctcctcccacatggcaggacacaaccggagtttcgtgctgtggctgcacgacctcggcgactcaggcccggccaacgagtccatccgcaacctcttctccgccccggagttccggctcgccaagtggtcgttcccctccgctccccgcgcccccgtatcatgcaacaatggttttgtcatgctgtcgtggttcgatatccacgagcttcccatgagcgctgtgagatcactccatagcatcagcaatcaaataaaccaaggcactggaattttgatgtagctgcaattttgaacgagtagggctctccgcaagatgagactggggttctcaaggctgtggaaaaggtgcacgccatgatagacagggaagtagccgatggcatccaccctgagaacatatttgtttgtggattcagtcaaggaggtgctctgacattagctagcattttgctttatctgaagaagttaggtggaggagcagtgttcagtgggtgggtgcctttcagttcatcagtcactgagaggatttcacctgaagcgaggaagacctcgtttctttggtcacatggaatggctgacaaagtagtattgtttgaagctggccaggctggtccaccatttttgcaaagcgcgggtgttaactgtgaattcaagatctgggccattcgctttcgcaggaagagctactttatcttgagtcgtggatcaagagtcgtctaaatgctctcaagagaaggacggttaactgattccatcatgcttaagtggcatttatttagtatttttattatacgatacacatatcaactactggtcctggaatttgttattggaatttccgatgggttatcgttgtcgggtcaataagggcacatagaaccgggatcttttgctggccatggatgttctgaatgcacttgtaacggccctggtatctgacactcctacaatacaagggctgcagctttagcttg

SEQ ID NO: 21810 - DNA, 2176 bp, Zea mays
  Clone ID: LIB3354-112-F1_FLI
ctcttcgtttcctcctcatcgaatcggagcttcgcatagtgtccctcgtcgccgccggcgccggcgccggcagccatgtccatgctccttatacagaaacaacccctccctctctccgttcgtccccgcacgactctccgccagtgccgtctccccacgactcgattctccgccgccgccgccgactcggctagccgcgctgcccccttcgccgtcgaggactacctcgtcgccgcatgccacctaaccccggcgcaggcgctcaaggcctccaaggtgctctcgcacctcaagtcaccctcccgacccgacgccgtgctagccttcctctcgggcctcggtctctccgacgccgacatcgccgccgccgtcgcctacgaccccaagcttctctgctccgaggtcgagcgcacgctggccccgcgtctcgcggagctccgggatctcggcctctctccgtctcagatcgcccgcctcgcactcgtcgaccccgcgcgcttccgccgccccaccgtcgtctccaagctgcagtattatgtccccctcttcggttccttcgagaacctgctccaggctctcaggaacaacgcctaccttctcagctcggacctcgagcgcgttgtgaagcccaacgtcgcgttcctggtggagtgcgggctagatgcttgtgatattgccaagctgtccatacccgtccctaggttgatcaccaccaacccagaacgcgtccgggcaatggtggagcgagctgaagctgtcggtgtgcctcgtggcactgggatgtttaggcacgcactgctggctgttgcattcctcagcgaggaaaagatcaaagctaaggcagagtttttgaagacaacatttcggtggtcggatgctgaggtgggcgttgcggtttccaagctgccattggtgctcaagcactccaaggacaggctgcgccgcatgtcagagttcctgatcaccaaggttgggttggagccagagtacattgctcacaggcctgctctgcttacatatagcttggaacgccgcctcatgccccgacactatgttgtgaattacctgaaggaaaatggattgttggagcaggaccggagctactatactgctgtccagatgagtgagagtgccttcatggataagttcatatgcccctacaaggaagctgcaccaagcctcgccctagattatgctgctgcttgcagaggagaggtgcccactaccttcttggcaaatgtttaacccttcagtgtaaagcaatgttttgacacttagcagtgagctggtaattttgtttctttccttgcctaactgctacatcccgcagctgtgtctttagaattggctctggtacataagatgtgagccatggttattaccagggctagatttatctttgctctctgttattcaagctgatcaagtattccaatttcacctgtcactgtatggtatggatttagttggtgagtaccctgtatattgctctgcaactgttatcgatgcaatgtttctaaataaatatgcaggatgcacggttccaaatatttttatcggaagcagagctgtgctttctttctttggcaaagcattaggtggggagggcttggtgattaatcatgctactggactagtttctaaactggcggttgtaaatatgatatgattttgtaggttgatgcatcatatgaccattcccatctccttggattttattccccctttttaccgtgtaggggaaaactggaagccattttgaaccaaagacgattcagaaataagactgtctgggagattaatccactctggacttcacaaaagcacttgttatcggaaagttttgtattggattatcttaaagttggccaaacctgctacctacaacaaggctctttcggtgaaattctgaaagcaaattggcgaggaacacccattgctgtcaaacgcattcttccatccttatctgatgacaggctggtgatgcgcaggccaatgcagaaagtgttcactctgaagacgccccaacttgttcatacagtagtgtactttcagttattttgtttttgttattggtttgtatgaatgctgtagttggtttcatgtttggatatgcttgtatgattattaatctggaaatggtacaaacaattcagatgaacatttttagtgtacg

SEQ ID NO: 21811 - DNA, 1659 bp, Zea mays
  Clone ID: LIB3354-112-G7_FLI
tgaaagcgctcccctcgattgggcggcacgtaacccatcaccaccaccaccaacccggacccgtcaagcgctgcgtcgtcccgtgcaaagaccgcgcattccgtgcgtgccgtgtccacgcgcgcgcgcgcggtggcgttaagttgtcgagcgccagaggagcgccactagtcgtcgatcgatttgacccaggcgaggaggcgtaggcgcgtaggggagtgagtctagctagctactggtgttgggtccattattcgctagcttccgacgatggaggtgaagaaggaggccacgaaggcgacgctgccgccggggttcaggttccggccgacggacgaggagctgatcgtgcactacctgcggcggcgcgcgctggcctcgccgctgccggccgccgtcgacatcccggacgtccgcatcctggcgcacgacccgtccgacctgctgcccccagggttcggcgagcaggagcgctacttcttcacgtgcaaggaggccaagtacgtgaagggccggcgcgcgaaccgcgccacgggggccgggtactggaaggcgacgggcaaggagaagccggtggccgtggcggtccaccggggcgtgcagggccagagccagggccaggccgtgctggtgggcatgaagcgctcgctggtgttctaccgcgggaagccgccgacggggagcaagacggagtgggtgatgcacgagtaccggctggcgggcgccgggctcgcgccgtgccgccgccgccacgccgacgccgatgccgacgccgacgccgtggcgcgggcgccggccgagggctgggtgctgtgccgcgtgttccggaagaagggctccgccgccgccgccgccgttgcgaggcggcccggcgaccgcagcgacggcgagggcgacgagagcgcgggcggcggcggcgggcgcgggttcatcgacttcttcgcgcgcgcggacgccgccgggcgaaggcgccgcgcgccgtcgcccgccgtgtcgagccggtggcttgcggacgcgtcgccccagccggagcaggaggccaccagcagaggcccgtgacgagtcaagggccggccggctggctggcgtgaagcgatcaagcaaggtaaggtagagagagagagggaagcttttgctgcattggcagtggccaatgagggtccagtacagtaggtgcaggtaggagcaaagtgaattcgttttagcaacgcgagagagagagaggcccgatagtcagtcagtcagtcaaccagtgcagtatcagttgttgagcgtagatggtgaaactaatgtagcagctcagttgtactcctcccgaccacctgatgaatcctacacaattgtagagtggctgcagcaaaatcacggccatggcaccggagctcctccaaggaacgcaagtccaccagctgctgctgctgctggccatggcggtcgcgcggattgctagtgctaatgttccacaggctgttgattgctgagaagcaagtagcggtggtggtggcgggcagcagacggaagatggcgggtgtctgatactggtggtggtggtagtagtcgtgcgtaatctgttgcctggacttggacttggtttctttaatgcaattatgatgatgaagtgaatgcattctgcgtgctggtgttggaacgccgggcaag

SEQ ID NO: 21812 - DNA, 1059 bp, Zea mays
  Clone ID: LIB3354-113-B12_FLI
cgcgctgcccatccccctccccctcctccttcctcggcagctcgtggcgctccagtccacagaggagaggacacgacacgacgaggggccgggcagcaagctctgctcagtccgttccgcgggccggtcggtcggcgatggcgcggcacgcgggcacggcgctcctggacctggtggcggggcaggtggacccgggcgcgccggggttctggcgcgacttcctggttggcatgctcaagccggcggcggccacggccgtggtggccatggccgtcgggctcagcttctcgcagcgcctggggctcgagggcgagatgctctacgccatcgcgcgcgccttcctccagctctccgccatcggcttcgtcctccagttcatcttcgcccagaagaacgcgctctggatcctcctcgcctacctcttcatggtgacggtcgccgggtacacggcggggcagcgcgccgggcaggtgccgcgcgggaagcgcatcgcctgcgtctccatcctcgtcggcaccggcgtcaccatgctcctgcttgtcctcctcgacgtcttccccttcaccccgcgctacatcatccccgtcgccggcatgatggtcggcaacgccatgaccgtcaccggcgtcaccatgaagaagctccgggaggacgtcaagatccagaggaacctggtggagacggcgctggcgctgggcgcgacgccgcggcaggcgacgctgcagcaggtgaagcggtcgctggtcatcgcgctgtccccggtgatcgacagcgccaagacggtggggctcatcgcgctgccgggcgccatgacggggctcatcatgggcggcgcgtcgccgcttgaggccatccagctgcagatcgtcgtcatgaacatgctcatgggcgcctccaccgtcagcagcatcctctccacctacctctgctggccggccttcttcaccaaggccttccagctcgacgacagggtctttgcagactaagatacctgctggattgtaatgtaaccgagtcccagttgtttgaggtagaaacagagctgtggctttcggtgtc

SEQ ID NO: 21813 - DNA, 1459 bp, Zea mays
  Clone ID: LIB3354-113-B3_FLI
ccactctgtgcgggacccaaacacagtgagagagtgttgtcacaataaccccaaaaaatagggcaaggagccctcagcacccgcggcgagctaagcaatttctccacgctttgcaccgcgcatcgcatctcccccttcctcggttcctcccctttcgccctacttgcttcccacgccagggcccgagctccgagctagggtttcctctctcgccgccgccgccgacggagaagaggagtaggtgaagccgagttattagcgccaggggaggaacatggggacgccggagacgtcgcgggagccatgcccggaccggatcctggacgacgtcggcggcgcgttcgggatgggcgccgtcggcggctcggccttccacttcatcaagggcatctacaactcccccaacgggatgcgcatgtccgggggcgcgcaggccgtgcgcatgaacgcgccgcgcgtggggggcagcttcgccgtctggggcggcctcttctcaaccttcgactgcgccatggtctatgcgcgccagaaggaggatccctggaactccattatcgcgggcgccgccacgggtgggtttctctctatgcgccagggcatgggggcggcgggccggtccgcgctcatgggcggtgtcctcctggccctcatcgagggcgccggccttatgctcaaccgcgtcctcgccaacccgccgctgcccgcagaggatcccaaccttaccgcggccatgggcgacaaccctttcccgggcctgccacaggcgccgccggtcgtggcacctccggaagtggcgagctccagcggcgcgggtgggtggtttgggggactgattggcaggaaggatgaagagaagaaatccagcgcgggcaagtcggagatcttggagagcttcgacacgcccagcagtccgataccatcgttcgagtacaagtgaggaaaaggttggctgatgccactgttgcctgcacggccttgcagatgctgtgatggggtctggaattggtgattcatgtcagcaatacaataaccgacaggacaaaagagatggtatgcggcttaagccttttccgaaacgtggcagcttggctacttctcgagatgacgtagtatttgtagaagcaacagcagtagtatactgcccaatattatagcattcgtgttgtgcaatgtaatgcacgtgagaacgcttgtgtggttgtgcctctggctggcctccaaacggacgtcttttttgtgttcttattagtcgagtcgttcaactgcgccaagtcttgctgcagtttttttgttttgttgccactgtgtctgagcctcgggtggcctggtgtacctgcgaggctgctgttaagcagggtcttgtcagtcagggcagggacctttgttgccgcaattagtacggtacgtaaactgcccatctcggtgggtaagctaatcgaccaaggactagtgctgtggt

SEQ ID NO: 21814 - DNA, 943 bp, Zea mays
  Clone ID: LIB3354-113-B9_FLI
gcctgaggaaggtaatcaaggaacaagtgatccttctaccaacatggaatctgttgagttggtatcccacattgaggaaatgaagctgaataccaccacacatgtggatgcaagttctagtggttatcctggatttcttgagccagacgatgtttccattgagtgtattaaaatttcagttgctccattacaccaatttggcagaaggtcatctatccagcacagagattgccccctgcagctttgttgtgcaggcttgaaagtacagtttggtgtcagtacgaagtttctagataatgcagggcggccaaagatgagcatagtggttgagatccctgagaacctctgtaaagttttggaattctgcgatgttcttgctagaaagctgtcccaggaatctggtagcagttctgaatggagacccctgattaagaagtatggatacattaatcgtccaactatccgcctgaacatccctcctatttccaacagcgatgcggtggccttctcaactgatatatgccagagagagcctagtggtaacattcagaaacttgctttcggcaatgtgggcaccacggaattggactctctgttcgttaaagggagcaaggtggacgcattcttttcactggagttatacgattaccagcaaaatgctggcattcggctggttgcaaagaggctggttatacactcgaattagcaccaggctcatttattaaaatactagtactagaaactaacccttgcactgattcaggggcctttagaccaccatatgtatttaaccaattgtagtttgtagattatgccgagtgcgtaagatctcgccacaaggaggtattgagctgttgatggtaaattaaaattcaaatgttgcaaaaatgttttaacaatctgtgttatttatttgtgaatagaacgcacatttgttactact

SEQ ID NO: 21815 - DNA, 1081 bp, Zea mays
  Clone ID: LIB3354-113-F8_FLI
ctggttattggaatccaaaaatttttatgtactgttttgatcagtgaaattcacacttcgctagtccaacaagctgacaggaacgggttctagacggatcggacggcacacgataacagctgccggtgtcccggaccatcctgtccatccctctataaacggagccctgtccagttgtgatcgagacccctcgcaaccgccggccgattcgagcagcgccccagcagcctctgctccgctgcctctggcgaccgccggagcccgaggaggaggaggagggaagatctcgctcgatccaaggaggtgagtacaagatggtgagctcctcgtcgccggtggtcaacgtgtacccgctcgccaactacacgttcggcaccaaggagcccaagatggagaaggacacctccgtcgccgaccgcctcgcccgtatgaaggtcaactacatgaaagaaggaatgcgtacaagtgttgaagcaatcctattggtgcaagagcacaaccatcctcacatactgctcctgcaaatcggtaatacattctgcaaacttcctggtggacggttgaagcctggagaaaatgaaatcgagggtttgaaaagaaagttatgcagcaaacttgctgtgaactcgccttcctttccacctaactggcaggttggagagtgcgttgctgtgtggtggaggccgaactttgagactgtgatgtatccttactgtcctccacatatcactaagcccaaggagtgcaagaaacttttcattgttcacctatccgaaagagagtattttgctgttccaaggaatctgaaactgcttgctgttccactgtttgaactctacgacaatgttcagaggtacgggcctgtcatctctaccatcccgcagcagctttctaggttccagttcaacatggttagctcttagggtgatgatacaagaaaaccaatgtggccaaggcagctcttcggttgctgagctagctgatcaacgtaccctgactgattttatttcattgtgctggatttttttatatagactactactatctagacatgcatttctgattgtattgttgttgaatt

SEQ ID NO: 21816 - DNA, 602 bp, Zea mays
  Clone ID: LIB3354-113-G5_FLI
gtgcagtgtgctttttattcgcaagcaggttcgaccactggtcgcacgccgcgcacgcgggccctggaacggacgggtcgcgctacagattccgtccaccccggccggcccacgcgccgccgacgcaacgcacggctactatcattcgcacgtttaccgccactatggacgtacgtacctgcggcgttggcctgatgctaggctagctagtcaggccggccctggtcttagcagtgggcggtggcagtgcgcaatcgccccccactcagactcagccactgctgcagtccgccggctagtacacgctaacacgcacgagtcacgacaggctgcactgagggtcagttcagtagtgtacgtaggttctgatggcgaggcggctgctggcggcgctcgccatagtcgtcgtggccgccgcgctcgcgtgcggcgcggaagcgcagctctcggcggggttctactcgtcgagctgccccgccgtgcacagcatcgtgcgccaggccatgtcgcaggccgtcacgaacaacacgcgcagcgccgccgccgtgctccgcgtcttcttccacgactgcttcgtcaatgtgagcaagagcgaccatgcc

SEQ ID NO: 21817 - DNA, 698 bp, Zea mays
  Clone ID: LIB3354-114-A4_FLI
gattgatttgaatcttacaggcgttttcctttgcacgcaggctgcaacaaaagtaatgatgaagaagaaaaagggaagaattatcaatatagcatcggttgttggtcttactggtaatgctggacaagctaattatgctgctgccaaggctggggttattgggttcacaaaaacagttgctagggagtatgccagcagaaatattaatgcaaacgttatcgctcctggatttattgcttcagatatgactgctgaacttggtgaagagttagagaagaaaattctgtcaactattcctttagggcgctatggtcggccagaggatgtagcgggcctggtggaattcttagccctcagccctgctgcaagctacatcactggacaggtcctcaccatcgatggaggaatggtaatgtaaggcttcgaatctgtgccgctggcctctaatgtgtcgcagaaaaaaatgtaattcagttttttgagtgtcatttttaaggggtggttttttgagcagcggtttgtggtatagtatagtttgattcgaagggagagttgatactagaaatttgcacacgtatagttagcttgctttcttaggattggccgagtgctccaaacatgttattggaacgctccttccctgagtgttcggtccccttactgtcgagcctcggctcatcttctgtttctacgttttt

SEQ ID NO: 21818 - DNA, 951 bp, Zea mays
  Clone ID: LIB3354-114-D12_FLI
gggggcaacatgccttgtttgttcgcttgcccctgtatatatacagacctccccaccacctcccctaccactaccagcctcaaattaagcagccaacaagacctgtctatagctgcctcgctagccaagcctgactgctacctagcaacgaccagctgggactgggagggggagtccatcgagctcgccccaggctgacgatccgctcgatctcggggacccaagagtttcgatagacgacgcatggcgaaggtccaccccaacgtgctgctgtcgtcgtcgtcgccggctgagggagccgccgcagcggcggcgggcggcgagggcgaggagacgtcgctgacggtgtggcgcaagtcgctgctgttcaactgccgggggtacacggtgttcgacgccaggggcgacctggcgtaccgcgccgacagctacgacgccgaggccgaggtcgtgctcatggaccccgccggccgcccggccttcaccgtgcgccgcaggcgcctcagcctgtccggcgagcagtggctcatctacgcgggcgaggagacgcggcgcccgcgtacgccgtcaagcgcggcggcggcggcgggaagtcggtggcgcgcgtcacgccgtgcgccgccgtgcccgccgcagctggggccgccgcgttgcccgcgtacgaggtggaggggtcctacgcgcgccgccgctgcgtggtgtacgacgcccaccagcgccgcgccgtcgcggaggtgcagcccaaggaggcggtcggctcggacgtgttccgcctcgtggtgcagccgggggtcgacgtgtcgctcgccatggccgtggtcgtggcgctcgaccagctgtttgggaggccgtcgctcctcaggagctggtcctcgccatagattcatgttttctttcttgtgttcaaattcagtttagataggtttttttgcccctggacttggggttgtg

SEQ ID NO: 21819 - DNA, 1329 bp, Zea mays
  Clone ID: LIB3354-114-E3_FLI
cacaccgacacgcggagaaaattccgaagcggaagaagttccgacagcgagagagagagaggggacgggaggggaggggaggggaggggagagaacgcgagaaactatgatgcgctgcgccgccgccgcgcttgcggtcgccctcatcgctgccgttgccgccgcaaccgctgcggggtcgccggccgcgggcacgtgcgcgcggaggggcgcgccgccgttcctcgacgccgtcggatcccgctgccccttcgtccggatcgacccgtccccgcctctcgaggtgagaggagagactgttgatactgagttgaaccttcgaaggaggggtgcttcatactccattctcttttatgctgcatggtgtccattttctagcaaactgcgaccaatatttggaactctcagcactatgtaccctcagatacatcactttactgttgaagaatcttctgctacaccaagcctgttttcaagatatggagtccgtggtttcccagccattcttcttgtaaatgagactacgatggttcgatatcggggttcaaaagatcttaactctctggtcgatttctataaagaaactacaggtctcgatccaattgcatatattgatgttgttgaacaagagagcacaggaagcttgagctcagttatgccatgggatcgttctcttcgtgaaatggccaaagatgagatgtatttgttagttgcagttctttttattatcgtgaaggttgtagcacacttcatacctgttgtcatgtctcatctaagagctttcttagttgttcgtgtccaaaacttgaacttagggatccgtaggggatcaaaccagctcctggaacgagccttgaatgttcttgatgtaaggaggctttggagcaagctgaggctgagcaataaggcgacagacttgaggaagggagcaagtaatgctcgagcttgggcttcctcatttccttctgttttcgctgggtgaaccgtcatcttcaagacaagcttagccatcttagagatgtttgttagggtagctgctcacatgtttctgtgcaaaaccatttaatctttgctccccactgtttctgtgcagtcaggaaggggggaaaaccttgcatgcatgtaaattttgaggaaatcatgtgctgttgtatattaggaatacctttgcatttgctggtgcgacgcctaatcttcctgtctattaaccagagtgtttatttggcaatgtatcatgaacttgtaggggtttttttttagaatttctctcttgtttgtggtgctgttgtactttacactgtactcttcattaaagaacttggtttcact

SEQ ID NO: 21820 - DNA, 610 bp, Zea mays
  Clone ID: LIB3354-114-H5_FLI
agactctgcaccgccgccgttgactgctgatccaaccgctcccgcggcgcccggggccctgtcacggaggcggcggcgacatggcgtcgaggcagcacaatgcgcagttccacaaatccaagacgcttgacaacaaatacatgcttggagatgaaatagggaagggggcgtacggccgcgtatacaaggggcttgacctggagaatggcgatttcgtggccatcaaacaggtctcgctggagaacattccgcaggaggatctcaacataataatggtgacgttttttcttacttatcatatcatgcacaggaaatgaaggggtgtgtaattgcgtgaaatgtgtttgttgggaggagctgtgtagctagcacacagcggctccagttcagctataatatgtagttttagctatgcacctcgcccttttgtagcacactttttgctgtgagattacattccagggctaggttctgctagcttacttatgggagtagtgagcaagatccctgtttggtaggttcaaacttggaattatagcagaagtcaaggacatgcgttacctgtgtgtttggcatgttaatcgatctgtagtgagtcggttactcggtt

SEQ ID NO: 21821 - DNA, 1580 bp, Zea mays
  Clone ID: LIB3354-114-H7_FLI
gccgaggaggaggtggtggtcggcgaggggctcgcggggatggggatctcgaggccccttgtgatggcgatggcggtggcgctgctgatcgccgtcgccggtgcgaccgccgaggagcaggagcccctgctggcggcggacgcggtggccggcgcggtggaggcggcgctcggggaggtggagaccgcggcgctcagggccgagctggggcaactccgggcgaagatctcggcgctagagtcagacatagaagagcgatctcaagaactgaagaataaggatgatgccatcatgaacctggagaaagccattgaagagaagtcaaaggctattacctctatgctggacgagattgcttccctccaggcaaaagggtctgtagctgccgaggagcaggctaacaaggccaatgccaaggttgacaagatcaaaaaggatattgaagcacaaagcagccagaaagcagcactagagtatagggccaacgatgcagagaagaaggtggaagtactgaatgaaaagcttaatacaatccaaaaggaaagtgatgagaaaaaacgcaaaatcaagaagacagaacgtgctcttaaagtcgctgaggaggaattaatgaggttgcagttagaagtaactgctaaatcaaaacagctgtcagaggttcatggagcatggttaccaccttggctaatggcacaatatgcttgttatgcggaggttgtctcaggtcactgggatcaacatgggaaacctgctgtgcagaattttttgcataaggcatcagaaaaatcagcacaggcaaagaaatgggctgaacctcatatcgagactgctaagatgaaatggattcctgttaagcagaaattggttgccctcaagaaaaatgcagaaccttatgtacaaaaggtatcaacaagatcagtagagttttacgagtcatcaagggatgctgtgacacctcatgctgtcaaagttaaagtgtttgttcattcctactaccagaaagccaagaagttttctaagccttacattgatcaaattgctgagattactaaaccacatgttgagaaaattagaactactctgaagccatacactaagagagcagttcatgcatatgggtcatttctcaagtcggcaaccacataccatcgacaggctcaagcaagcatcatggactaccttcaccagcatgatataacaaaatcattggcaactaaggagttagtttggttcctggcttctgctttgctggctctgcctgtcttcattatatacaggcttctagtagggaccttctgctccaaaaagaataaaaggcctcgtagtagtaatggtaaccatggccacaagagatacaagcggcgacatgctgacaagtagatcagtttactgaacactttagggttcagtatgctgtgtaccgtggcagatctttgagcaggattgggtcatgggcacccttaccttgaaagcattgtacaccaccaacatactcttctcttttgcattttcgtcccaggtgtaatatggacttcagtgcagcagaccttttatctgcactttgctgggttcatgtggtt

SEQ ID NO: 21822 - DNA, 1267 bp, Zea mays
  Clone ID: LIB3354-115-A11_FLI
aaaaaaaaacatcgggtgtacatgtgtacacccgtgccgtttactgggtcggcagtcggccggcagcccggcacctggcccaagggttgagcatggagatcacgaacgagatgcttaagagactgccgagactacaatggcagaatttgttctatggactttcacagcaaggctaccaactatctcgtgacagctagcgatgatgaatcaatccgtttatacgatacccaagatgcagtggttgtctgcatcgcactttgctctggaaaagaaaattttctctcatgttcgcttgatcgtaccattctcttatgggaccatcgggctgaaaaaccgcagggcttactgcgcgcgcaaaggaggcctacagtttcgtacgacgcccagggcatggtatttgctgtcgcctatggtggccgcataaagatgtttgatattcggaaattcggaatggggccttttgcgaccttctctgtcggcactgatgattcggaagcccatgtcgtacagttcagcggtgatggcaggcggattctgttaaccactaaagctgggcgtgttcatgtgctagattcttttgaaggcaacagcattgcatcgtttcgcgcgaagccaatattaaccaattcgacactggaggcatcgttctgtcccgagggaaaccatatcgtatctggctccggtgatggtagtgtctatgcttggaacgttgagagcggaaaggtgcagaggaagaacatgtgatattgataccgaagcagcgtatatattattatgatgatgttatataccacacatctgtttggctgaggtatggtcactttttgggtcatcaggttgcatgctgggaaagcacagatgtgaaaccgccgcgggtaaggtggtctccaggatccttgatgttcgtgacaggaacgtcggagctgtcctgctgggtgccggatttgtccaagctggagtccttcaccatcagccacaccaacgccaggtccagctcgtccctgtaggcttggaccgatttgcatgccgtgtggctggttgacgcgactccatcaagagcaggaggaacaagaaagcatagcggagcatcttgtacgaatgagttgtgatggttggattcttttcctgatggcccggtaaagctactcttgcaacgatcgtggtcttgcggcaacgctgcgcgttgtttctgtagtgaacatgaactgggcagttaattggttactttttcaaagaaagatataaagaaaatacagctctcttattt

SEQ ID NO: 21823 - DNA, 1804 bp, Zea mays
  Clone ID: LIB3354-115-C5_FLI
gctacttctagaagcgctggtggcagggcaggcggtatcccggccgctggcgctggcgcgagagttggttggtggtggtcttcagcccccctcgctcttcaggtttagggtggagcgatccgtgcaggccaacgcggggtgcgtgacccagaaagggaaaccgccggctttttctcttctgccgccccgcttttccaatccctcctcaacctcatccgcccccgcccgcaccccgcaggcaccatcaccaaaaaggtccccgccttcttcttcttcttcttcttctcctctgcccctgcttgtcgtttgctcgtgctcccccaccccctttctgattcagcaagggttccttccgcggcgcggcgcgtcgccatgggcaactgctggggcgccaagatcagctccgacagcccgtcccgcggcgcctcatccccgtcagggacggcgtccaagttggcgagcaggaacggggcggcggcagccctgagcgggtgcagcagccacgcgtcgtccgcgtccatgctgccgacgccccgcagcgaggacgagatcctggagtcggccaacgtcagggccttcagcttcaacgagctgaggaccgccaccaggaacttcaggccggacagcgtgctgggcgagggcgggttcggatccgtcttcaagggctgggtcgacgagaagacgctcgccccggctaggcccggcacggggatggtcattgccgtcaagaagctcaaccaggatggataccagggccacaaggagtggctgactgaagtgaactaccttggaacgctgtcgcacccctaccttgtgaagctcgttggctactgcctcgaggacgaacagcgcctcctcgtctacgagttcatgccacgcgggagtctggagaaccatctgttcaggaggagctcctatttccagccgctgtcctggaacctacggatgaagattgcgctcggagcagctaaaggcctcgcgtatctccacagcgacgaggctaaagtcatctaccgtgacttcaagacatctaatgtccttctagatgcgaacttcaatgcaaagctctctgatttcgggctggcgaaggatggtccgaccggcgacaagagccatgtctccactagggtgatggggactcacgggtatgcagctccagaataccttgcgacaggtcatctgaccaccaagagcgacgtgtacagctttggggtggtgctcctagagatgctgtcagggcggcgggcgctggacaagaaccgcccgaacggggagcacaacctggtggagtgggctaggccatacctgagaagcaagcggcgcatatttcgcatcctggacccacggctgggcgggcagtactcccttgccagggcgcagaaggctgcggcgctcgccctgcaatgcctctcggtggagtccaggcacaggcccagcatggacgaggtggtcacagcgttagagcagctccaggacaccaaagaaggaggtaaccatcacctacagaagaggccaggcagccggagcttggataacaatggcggcaaagcggcagggaaggggaagcctgctcctcatgtaaaaccagtttgagtgattggattttatatgccagagtatctctctttttttttcccatccatttgtaggtgtaggtaatatagtagggttcttagagggatttgtaaagaggcaggcagagttctggatgttttctgtctattatgtagttttttttacatcttcaagtctctgtaaagtacgctatgtaaatacataatgacatccagttcggagtgcgatg

SEQ ID NO: 21824 - DNA, 1655 bp, Zea mays
  Clone ID: LIB3354-115-D8_FLI
cagcccaacacatcctgattctaccaaccccttgttcatttcctttcctccagttcctcgtcttctacgcagaccccccgttgaagcctagggtttggcggctacacctctcttctagctagttggcgaccaccacttacgctaaaccacccgcgcggccgatggacgtcgactcggacccggccgcctcgagcaagcccacgcagatggacctcgaggaccagacgaacacaaaggggaagggaaaggcggaggaggggaacgggaagggcgaggagctcgcggactccatcggtagcctctctatcggcccggggcgcaccaatttcaagaagaagcctgtgattatcatcgtcatcggcatggccgggacggggaagacgaccttgatgcaccggctggtatgcgatacgcaagcatcaaataagaggggctacgtcgtcaacctggaccctgcagtgatgaccctgccattcggtgccaacattgatattcgtgacactgtgcggtataaggatgtgatgaaggagtacagccttggtcccaatggcggcatcctcacctcgcttaacttgtttgccaccaagttcgatgaggttgtatctgtcattgaaagacgtgcagaacaattggattatgtactggtggacactcctggtcagattgagatcttcacttggtcagcttcaggagctatcattacggaagcttttgcatcgacgtttccaacagttgtagcatatgttgttgacactccgagatcaacaaaccctgttacttttatgagcaacatgctttatgcctgtagtattctctacaaaacccgccttcctctagtcctgacattcaacaaggttgatgttgccaagcatgagtttgccattgaatggatgcaagactttgaggcatttcagacagctgtggaatctgacaaatcatactccgctacatatacccgaagcctctctctggttcttgacgaattctacaataatttgcgctctgttggagtatctgcgatttctggttctggagtcaatacattttttgaagctatagaagccagcgccaaggaatacatggaaacctacagggctgatcttgacaagaggattgctgaaaaggaaagattggaggaagagcgcaggaaggagaatatggaaaaattgcagaaagatatgatgaaatccaaaggacaaactgtggtgctcaccactggtttgaaggaaaaaaaatctgtttcagacatgatggatggtgctgatgaggaggaagaagaggaagcattggaagattttgggttttctgaggatgatgaagatgaagacgaaggagaagatgaggaggtggctcattttggcttttgaggggatccaatagttacttgttggtgtgtcttacagagagtccatatggggggctacttgctgaagtggaatgaagaactgtcaatatcagtaggttgttgactttgctattagtctactcttttaaattctggtgccccactgctggctatttatgctatatatttgggacctcatgtcaaagtttatctcgtcgctgagctgtactaatcatattaattgtacgtgcgagtaagaagttgatgggtcaagttgtgtgtgtaatcggttgtgccacaacctgtacct

SEQ ID NO: 21825 - DNA, 1797 bp, Zea mays
  Clone ID: LIB3354-115-E2_FLI
gctctccctctcctcgacggctgctagctagcgacaacagatcgacggcaacaccgatgggcgaggccaacgccacaggcacgccagccaccgcgacggtgcgcgtgctggccgtgtcgcgcgtcgcgccggcgccggcgccggcagcggcggaccccgtcgtcgtcaagctgtccttcttcgacacgccctgggtcgtgctgccgcccatccagcgggtgttcctgtacgagctgcctggtggcgacggtgagttcacggcggcagtgacgcgcctcaagagctccctcgccgccacgctggcggtgtacctgccgctggccgggaagctggcgtacgtcgccggcaccggggacgtggtcgtggactgcgtcgacgaccccggggtggccttcgtcgaggcggaggcggacgccggtatcgacaccatggacgtccgccggctggcgagcgacgaggcgcacgacatcccggcgttcctagcgctggtaccggagctccccaccaaggtgctcccggcgccggttctgtccgtgcaggccacgcggatccccggcggcggcctcgcgctcggcctctccgtgcaccacgccgtcgccgacggccaggccgtgtggaggttcatgggcgcctgggcctccgccgcccgcgacggatcccccgtcaccaagtccctccccgcgccgcactatagccgggaggccgtccacgtccccaacggcgacgagttcgcgcgccagatgctcaagatggtcgcgcccaacctgcccgcggtgcgctcgcactatagccatgcacggaacacctgctgcaccatttttctgtgcctcggtcacggaacctcttgcatgtgtgcatgcaggcgggcaccgttgcggactacgacttcagccagcgcttccgcctggcgcgccggacgttctacctcggcggcgacgacatcagggcactgaagctccgcatctccgcgctcgccgaggccgaggccgaggccgaggacgacgtcgtcgccgacggcagaagcaagaagaagccggtgtcgacgttcgtggcgctgtcggcgctgggatggacgtcgttcgtgcggtgcaagggcctgggcgccggcgacgacacgtacctggtgttcctggcggacctgcgcgcgcgcatggacccgcccgtggcggacggctacctgggcaactgcatcaaggggtgcctggcgacggcggacgccggggacctgctgggcgagcgcggcctgctggtggcgtgccgcgcgatccaggcggcggtggcggagatggaggcggcgccgctggccggctcggagcggtggatccagaagatgatggggctgccgttcgcgcgcctcgccaacgtggcggccagcccgcggttccgcgtgtacgaggcgtccgacttcgggttcggccgccccgcgcgcgtggagctcgtgtccatgaacaacgacggcgagatggtgctcgtcggcggcaggggcgacggcgaggtgcagctgtccgtgtcgctggaccccgcgcgcatggaggacttcaaggcgcacgtcttcgccacctccgcggcgccgtcggactcggcggcggcggcggccaactgatcgatggaggcagaggcgtgtggtggacgagaggcatacggatcatgtgagcagattatgcatgtgtgcagctattgtcgatcgaacgaagtattttccacgaacaacaaaaaaaaaccaagtatttttcagtttacgttggatatatatatatatatatacaattatatacaagaatctttcaattatttgtt

SEQ ID NO: 21826 - DNA, 1083 bp, Zea mays
  Clone ID: LIB3354-115-E9_FLI
ttctcccgtttgcgacgactgggtgggctacgccgccgccgctgccgctgccgctgctctacggtgctgagtcctttgccgatttcttccccggcgaagagcgccaccagtagatccgcccctgctgaaaacgcactcgatggcgtccgcgacggggggctcctcctcggagatggcggtggaccacgcgacggggctgggcaccgtggagaagccgcggtttgatgctctgatgccgagtgagatgagcggcgggaggacccagttccggaaagtgaccgtgccgcagcaccggttcgcgccgctcaagcgatgctggatggaaatctacacacccgtttacgagcatatgaagatcgacatacgcatgaatctcaaggcgaggagggtggagctaaagacaaggcaagacacaccagatgtcagcaaccttcagaaatgtgctgactttgtgcgtgcttttatgctcgggttcgacattgctgatgccgtcgccttgctgcgtcttgatgatctgtatgtggattcctttgagatcaaggacgtgaagaccttgcgaggggagcatctgtcgcgcgctattggccgcttatcagggaaaggaggcaagaccaagtacgccattgagaactcaaccaggacccgcatcgtcatcgctgatacaaagatccacatacttggatccttcgttaacatcaaggtcgcgcgggattcactttgcagtctcatcttgggttctcctgctggcaaagtgtattctaagctaagggctgtatcagctaggttggcggaaaggtattaaattaaataggttttgcccgcaccatatggattggaggggtttgagtgagattaattccatatcaagtcaaaatccttcataattttttccaatcctttccaattccatgaggtataggaataactgaacaaggcctaattgttgcagttttggtcacattcacacagtgtgttatagtagcagtttgtgtgctcgggacactggggaagtttattgtatccttaccttatgaatagcggactatgatgaagggagatttaaattgatatgtattctgtttt

SEQ ID NO: 21827 - DNA, 802 bp, Zea mays
  Clone ID: LIB3354-116-B10_FLI
ctgagaaactgtcctctgagtttaaacatatgagaaaacatcatcttgtcttaaaacaacactacattactgccaagaaaacatgcactgaaagatctgctcaccctcgcagttacctctagtaagaacaaagctaaactgaaattcacaccttggcccaagctacagcgagatgctaaattcagctatcagaaattgagctgttcagtcgaaatctggcaccaagatcgccttctctgccgcctcctcgccctcttcatcgccttgcgcccgtctgggttcactgaccccttctcgcaccccctcgacacatccatcatccttccccagcttcttctccctgtccctaggctgttccccgaccaccacgactgtatcctcctcttctgcgcgcccaccgaccactaccgcgtcctcgtatccgcctccgcgtcctccgccgacgaccacgacttcgtcgacgctgccgacgcccgcaacgccgccgccgacaagggagacgggggcggccccgcagtcgagtccggcgtcatccacgcagcctcctccgcgtggtgccgagacgcagtcctcctcgtcggagtcttcggagaagggcagccgggcgaggcgggaggagacggccgcggcagcgagggagaatgcctcagcgatagactccggcgggagcgcgcagtcctcgagccccgcgtcttccagccgcggcggccggatgggcacgccgccgcctacagtgagctcttcctcgcccgccattggattcaccgcccgcttgcgtcgaatcttcgaggttagggacgga

SEQ ID NO: 21828 - DNA, 732 bp, Zea mays
  Clone ID: LIB3354-116-B9_FLI
tggattgaatgtactggtttcaacatgtggctaccactctgcttgatctatttactccacctcctaaccaggaagaattcataggatactttgctcctatttgtatacgtagttgattgtagtcgagctgtgtgtgtcagcctcaaattgtttacatcttttttgtgcaatatcttccccttatcttaactagacttttgaaccttatttactattacagagaaaaggcagtccgaatctgccaggatcagggataagtatcccgacagaattcctgtgattgttgagaaagctggcaaaactgatgtccccgagattgataagaagaagtaccttgtccctgctgatctcactgtcggccagtttgtctatgtggtgaggaagagaatcaagctgagcccagagaaggccatctttgtctttgtgaagaacaccttgccaccaactgcctctttgatgtctgcaatctacgaagagaacaaggacgaggatggcttcctttacatgacctacagtggtgaaaacaccttcggctctgcctagagcaatcgcccctgccactgtaaataaacgagcatgatggggctgctgctattgtaaacctgtgtatatacctcagtctctagtatgctgctgccggattgcttcaatggcttcaatgacacccttagctttcaactgtttggatttctcctgtgacattgaattccttcggtatcgaaacatttgatc

SEQ ID NO: 21829 - DNA, 1345 bp, Zea mays
  Clone ID: LIB3354-116-G5_FLI
cgatccccggccggccacctaccaccggtcagccccatcaaactctgaggcagcgtcagccatcaggcctccctcgtcgatctccccgccgccgccgctgctaataccataatggaggccggcgccgccgctgctgccactgccatctaccctctgcaccgatgcaaaaccatacacctggttccctacaccttttctaccctgcctgcctgcctgatttgctcctcttcgcatccatatgcatcctctctcactctctctcacacacacacacaccaattttcgcatgtacatgaacatcaccatcacattacgcaggtgaggcatgcccaaggtgtccacaacgtggaaggcgacacggatcacagcgcctacatgaaacccgacttcttcgacgcgcgcatcactcccttgggctggaaccaggttgacctcctgcgagagcatgtgaaggaatctgggcttgcggaaaagattgagctggttatttgttctcctttgtcgaggaccatgcagactgcagtgggagtttttggtggcgaaagctgcagtaatggtgtgagtgtgcctccactgatggtggagaatgctggacgtccggcagtttcaagtttgaactgcccaccatttcttgctgttgaggcctgcagggagcgcttgggtgtccatccttgtgacaagaggaggagcatcacagagtaccgtgctctcttccctgccattgatttttcgctgatagagagtgacgaagatgttctctgggtaccagatgtcagagaaacctttgagtcactcgcagaaaggggtatgaagttcattgactggctatggacaagagaagagagagagatagccatcgtcacccatagcggtttattaagccataccttgcgcatgtacagcaaagagtgccatccaacagtaacacaagaagtgagcaagtactttgcaaactgcgagctccggtctttggtactggttgacaggaggtcagtactgcacctgcagacgcacccttttgttttggctccaacttaggatcactaaaaagaaatgcatcttgtaagagtgctcacagtcacagtgattatgcatgcagtatgcttggttcagatggccccagttacaactactaccctggcaaaatgaaaatcccagccggacttgatctgcccagcgatgacaagaagcaacctcttcagaaccagagcggctgagcaggcctgtcttggggcttgtttggtgttcaccaccactgattccttttcttttgtcatcctattttgaaacttccctagctgtattcagtccattttttgtgaactattctgagagtactattctg

SEQ ID NO: 21830 - DNA, 1429 bp, Zea mays
  Clone ID: LIB3354-117-H8_FLI
ccctgtcccgctaggattccccccaaaccctcccccaaaaccccagagcggagaagagcgcaagatgttcggcttcgggcaccacggccaccacggccagaacccgccggcgcacggcggcgtgcaccagcccaccttcaagatcttctgcaaggccgacgaggggtactgcctcaccgtccgcgacggcaacgtggtgctggcccccgccaacccgcgcgacgagcaccagcactggtacaaggacatgcgcttcagcacccaggtcaaggacgaggagggcaaccctgcgttcgccctcgtcaacaaggccactgggctcgccatcaagcactccctcggccagtcccacccggtgaagctggtgccgttcaacccggagtaccaggacgagtcggtgctgtggacggagagcggcgacgtgggcaagggcttccgctgcatccgcatggtgaacaacatccgcctcaacttcgacgccttccacggcgacaagggccacggcggcgtgcacgacggcaccaccgtggtgctgtgggagtgggccaagggcgacaaccagagctggaagatcctgccctggggcgacgaggcctacgccgggggcggcagcagcgccgccaacgcgccccgcttcggcggcggcgagcccaccgtccgcatctactgcaaggccgacgaagggttcagcgccacggtccgcaacggcgccgtgtgcctcgcgcccaccaacccgcgcgacgagtaccagcactggatcaaggacatgcgccacagcaacagcgtcaaggacgaggaagggtacccggccttcgcgctcgtcaacagggtcaccggcgaggccatcaagcactcccagggcgagggccacccggtcaagctggtgccctacaaccccggctaccaggacgagtcggtgctgtggacggagagccgcgacgtcggccacggcttccgctgcgtccgcatggtcaacaacatctacctcaacttcgacgccttccacggcgacaaggaccacggcggcgtgcgcgacggcaccaacatcgtgctctggaagtggtgcgagggcgacaaccagcgctggaagatcgtcccctggtaaatgtgctgttctgtggctgcactggtcatcaccatgatctggagctttgaaggcatagccacctgtggtcagcaactgctgccgtgttgctagaataaagttggtggcgatcgatcgatcgatctttggtgatgggtgtccctccctgtgtgtttgtgtttagttccagtcgtttgtgaggaagtcagttatgtttgagtgagaggggtacttcgctcttcggttaactctgtacttgtcatgaggagagttttcatacccggagtgtaggaactctgtactgtactcggatccttcctttttcatcgaagtgggttttatttt

SEQ ID NO: 21831 - DNA, 598 bp, Zea mays
  Clone ID: LIB3354-118-A7_FLI
ggcgattcatgccaaaaagggggagaaatgagcccaaagcaaaaggaccgcaccaccaccaatttcaaaaacttagtgttttccaagaagtatttatcaattggtatcctattatgttcaaaagggggagaaagtagtatttcaaaaatgatatatcaaaaccctcttgaacactaagaggaggatctcctttagggggagtaaggagagtctttgtttagtcaaaggaaaagcatttgaacaggggaagaaaatttcaaatcttgaaaatggtttgcaaaatcctattcatttacctttgaccatttgcaaaagaactttgaaatggatttacaaaaagaatttgcaaaaacaaaacatgtggtgcaatcgtggtccaaaatgttatacaaagaaacaattacaaaaaaaaaccaaaaaattaatactaaaaaattccaaataaacaatcagacctaaataaaaacaaaaaaaaattttcctaaaacacaataaaaaaaaagacagataactacaatataaaatatacacaatactacataaaaataaaaaaaaaataaacaaattattttaaaataaaatactaaaataaaacatt

SEQ ID NO: 21832 - DNA, 704 bp, Zea mays
  Clone ID: LIB3354-118-B10_FLI
cgttcctgcttttcccctgtcctgcggttttggcctttttgcccccggcttcctggcggcaacgaaacaaccagtcggttcggtcgatgcttcgcgagttggaattggacgccggccgacccgctgctcaatccgtcgagttcgacatggctactcccttggttgctgggttgtcagtggctgccgctgcattaagcggaagatacatgattagagcatggcaagccttccggacccaggcggcaatgccgcgggtgcgccgcttctaccctggtggattccagggggaaatgaatcgaagggaagctgcattgatcctcggcgtcagagaacgtgctacagtggacaagatcaaggaggctcacaggagggtcatggtagctaaccaccctgatgctggtggcagccattacgtcgcttccaagatcaacgaggcaaaggacatgctgatgggaaaagggaagtccgggtcttcgatcttttagctgacacaaagctcattctgctgtggcgtgatcaggctgtagctttttcaagggactgacagttgcacgtttcaaatttcttaacaatgctctgctgcttgtaccatatatcataaaggatacagatacagatacagaattgaatcaacttattatctgggtcttaagttattgtttggcctgattggaaatagtaaccatgtatatctcagagccccc

SEQ ID NO: 21833 - DNA, 1913 bp, Zea mays
  Clone ID: LIB3354-118-C12_FLI
aaaaaaaactctctttctctctctttcccagccctctctctccctctccacccggccgccaccatgtcaggcctctacagccagggcttctcccctgcaagaaccctctccccccagattaggagcaaccccgacgctgacagccagtacttggccgagcttctcgcggagcatcagaagctggggcccttcatgcaggtgctgccgatatgcagccggctgctcaatcaagaaatcatgcgggtatcaagcatggttcatgaccatggatttagtgatcttgacaggcgccggtttagaagtcctagccctatgtcctcaccaattgtccggcctaatctacatggcaatggatttggtccttggaatgggatgcaccaagaggtaggtgtaattctttaatcgctgaaatatgctttcttttttaaaacatgtttttatcccttcagtaaccttcctttgttatgtgatattttaattgtttttggatttccaattcttctaacattctgatgacaaggataaaatcatgaaggctatcatgctctataaaatgtaataagaagaaactaagccttggggaagaccttcccagggtgttgcactggaccatgtatttcactgtgtagtggtgaagttttttttaaccgatccccaaaaatctgctcccacagggagttgacctgggcctgctgggtgctactaagacactacaaccactaagctgcaggaggatttataatgttctgtaatgaagatacttaagtcctagagggtatgtctatgccatatatagtaacgtgtacctttaatataacagagattgggctttcctcctcctggaacaagtatggactggcaaggagcaccaccaagccctggctcttatattgtcaagaagatcgttcgcttggaagttcccgtcgactcttaccctaatgtactgcctccccaaacctgtgcaatttatctttcagcattaaatgacattttagttctaatatcttctatgtttaattttctctagttcaactttgtggggcgcattctagggccaaggggtaattctctaaagcgagttgaagcatcaactggctgccgtgtttttattagagggaagggttccatcaaagacacagaaaaggaggagaagcttaaaggaaaacctggctatgaacatctgaatgagccactgcatatattgatcgaggctgaattaccagcgaatatcgttgacacaagactgagacaggcacaagaagtcatggaagaattgctaaagccagtggacgagtcacaagatttctacaagaggcaacagctgagggaactggctatgctgaactcaaccctgagagaagacagtcctcatcctggaagcgtatcccccttcagtaacggcagcatgaagcgcgcgaagccaagccagtagagggaagcttctggctctcctccaacccttgagtcgtccacggcgcggcaccgacaaggtggtgcccttggaactcgcgctgtccgtgtctgtctcgtgggtgcttgtgtaatagaaggtatgcatctgctgctagacaggatagtctgggtaccaggtgcgtcgtcgtctcaaggagacgaggagggatcggtggccgatgaactgcctttgatcttggtgggtggatccggccgtgctgttgttgtaactgcttgtaagggtgatggacattattcgttttattcgttgttggctgttaaccctgagtagattatggtgctgaggagatagtggtttcagtgggagactagttaaaccctgatagtagtgtgagctgttcgtttaggtgtttaattagcttgtactattctcgaatatttgtcgtccgctagttcattttttgaactaagccgcgacaaataaaaaagaactcatggat

SEQ ID NO: 21834 - DNA, 578 bp, Zea mays
  Clone ID: LIB3354-118-C9_FLI
actcgaagcccttctttttcacgttcgcggcgctgtgcggcgtcgtccccggcgtaatcggctacggcgtgatgcagctcaccggctcccgcaacgagcagctcgaggcccaccttcgctccacggcccgtcccgagaccacgatgtttacatttgtgactattccatggtccccgccgactgacgaaacacgtggcaagcagatgatggggcaagtgaacagggagaggctggcggagtttctcggcgagctgcaacggaaagaggacacgaacgacaggtacgtggccgcgctgaggggggagaccctgaccaggaagcgctacgagcgcatccagcccttgcctgccgccaacgcgcaagcgagccaggagactgccggagccagcgcggaggaggagaggcccaaggcaaagtgagtcatcagcgagacgtgcctcagtcaatttttacttgctggacatacgcatgcttcggcataatgtaagcagtcagcgcctgtgaaacgtcattgcgcttggggtatttgactcccttttgttttaaacgctgctgatgtaaatcttttgtgcatttcc

SEQ ID NO: 21835 - DNA, 826 bp, Zea mays
  Clone ID: LIB3354-119-A7_FLI
cgaagaatcgccatcacagcaagctacgcgcactgaaatcctccaatccacaggacacagctctacttccgcagttcgcactcgcacgcaccaagccgctagcaacgaagcagaaatgtcgctggtgaggcgcagcagcgtgttcgacccattctccgtggacctcttcgacccgttcgacagcatgttccgctccatcgtgccgtcgtcgtcgtcgtcgggctccgagaccgccgccttcgccagcgcccgcatcgactggaaggagacgcccgaggcgcacgtgttcaaggccgacctccccggcgtgaagaaagaggaggtcaaggtggaggtggaggacggcaacgtgctgctcatcagcgggcagcgcagcagggagaaggaggacaagggcgacaagtggcaccgcgtggagcgcagcagcggccagttcgtgcggcgcttccgcctgccggagaacgccaagacggaggaggtgagggccgcgctggagaacggcgtgctcacggtcaccgtgcccaaggccgaggtcaagaagcccgaggtgaagagcatccagatctccggctgaagaagacatggacgggaggtgaatggtcgcgtcgcgttcgcgtcgcggcgtcggatcttgggtttcagcgacgcgactcgtgtgtgtgtgctgtgtggttgctctgctttggtatgtttggtgtgtacgtgtgctgttcagtgtttcctggtcctcgtctgtactttgcgctgttcggtgagcttcctggctcagtatgttgtgttgtgcgagtgaataaataaaaacaaaccagctgtagtatattcacct

SEQ ID NO: 21836 - DNA, 1499 bp, Zea mays
  Clone ID: LIB3354-119-B2_FLI
agaagatcgggtcgagtcctacgccgacgccggcgacgaacaaggatggtgaagtcggtgctcggcgacgaggagcacctcaaggcctttgaggaaacgctcgcctcgccctcctctcctccatgtcaagcccaggtgggcctcgtcgtcggcaagctcagctcttcctccgaccgtgccctcatctacgcgttgctccccacgccgctcaccgacgccgccgccccagcatgttctctccgcgccgcccccaagtccaagccttccaagggcggcggcaaagctccttcctcctcggacgcctctctcgacttcgatgtcgaatggatctccgagcacgcgcggcaggtcattcgagcgatttgccaagcttgctatggcagtgcatccggtgtgaggctgctcctccacatttcttacagtcctcgaagatgggcctgccgtatatgcgaggttgcatcaggaagtctgcgtccgtgcgattttaagtacagcaaactattagcttctcttcaaactttcagatgcacatataattttgagataaggttgacatctgttcaagctgagccgtttaagaaaattattttgaaggcaatcagtcatctcacagaggaagtgcagaatgccagagctttggtagatgggcaactgttttcagaagagatgaacataagtacagaggacccacaccaagttgattttcttgtgccattcaagaatgctgtgcctgttgaagaatgcagtttagagggagttgctgggctcattcgctttattggatctgtcagcgccttggcatatttaggccctaaagaatctatttcagaagctatatctgatctaaaggcggacatcgttacaagtctaaaaagccggttggatatcatccttgatgaggcagatgatggccctgccactgctgaagtggagaaatcaccatctcagaagtccactcaagttatatttcatgagttgagagaaccttacagtttttcattcccgagaagggtcctgataccttggctgagcggcacctatgtttgtgattacttgcaacaaccagagacagcagaggatgcagtggatcgcttcaaggaagtgataggtgcactggaaacagccgtggagaggtcttcaatcctggaaccagaaagcgcagcagcagcttgtagcgtactagaatccttttgggatatggtgcctggatctggcagcggaggacaaggtggatccagcaagctgaaggacagtcattctatacagaaggatgattcaagcaaaggacaaggcggtttgaatttcagtatcgtagccgctctgattgtgctactggttgctctgatagctggactgctcttcactggttccgccggatacccaatataatacctacgtaactaactgcgctgtaccccaccagtagatgcgaaaagcaaagatgttagaaactgttgaagtggagagttgaatttatttaatgttagaagctgttgttc

SEQ ID NO: 21837 - DNA, 960 bp, Zea mays
  Clone ID: LIB3354-119-D8_FLI
gttggtctttgctctcagctgccttgcaagcctgagctcttttatctttggatgtgcagcgcaaatatgttgtagtattacatttatccacatcattccactgtatcttgcagatgcagctgtatcttgatttgacattgccctcttttgatttttttggcctctggtatgccttcggccttctgaaaacagtttattttatttgataaagcttatcatgagtggagatattgactctacattcaaaagacttggggagtggtatccacaagtgataaaggatgagaaatcggttatttgcttactactccattctcaaagattcatagaatatatcagggctgaacaactggaagatgctgtgcactatggtcgtgctaacctggcaagcttcttgacacacgaagcttttgagtggctgctgaaggatagtgtggccctgctggcgtacgagaagcctgcagaatcatgcttgggatacctgatgggctctccccagcgtgaattcgtggcagacgcagtgaacgcggctgtcctgtcgacgaaccccaccatgaaggaccctgagagctgcctctactcgtgtctcgagaggctactaaggcagctcacagtttgtagccttgagcgacgtgcattcaacaacgaccaaggagatgcattcttactccacaaagaaatgcaaaactatgaaaggtctaggcgctcatagcctcataggcatcaggattgttgcgcttctgaagtctgcagcgcccctcagctttcgcaagggtgagcaccgaattgcatggacacagctcaggcgcttcgggaggtgttctaacctctctgtaatcagaaaactcacagtgagataaagccaacgtttcagatttcccctattttgttggttggctaatatgctgtttgacactatgaatgctaaaaagtaaagacgcttcgacatatgcccctggt

SEQ ID NO: 21838 - DNA, 1727 bp, Zea mays
  Clone ID: LIB3354-119-F11_FLI
ctttagtgacacacatattgctcgcctgatcttcattcccacactagctttgggaggaactggaacgcgtataacaagtttttctagactctatgtcatttcagctgtgcatctacatcatctttgttgttgtgtattgattcccacgctagctttttgcaggaattggaacgcgtgtaacaagttgttattccattgtgcatctacataatctttgtagtcgtgtactgactgtcccagtatcctattttcagatggagagccacaacccatcgcactctcagatcgccgaagtgacgatggacatcgcagcgtcagcttctggagcggcagggagcaagttctgcaagggcgcagcctgcgacttctccgacgccagcaactcctcgaaggacgccagggagaggtcggcgtcgatgaggaagctgatagtcgcggtggtcctctgcgtcgtattcatggcggtggaggtggtggggggcatcaaggcgaacagcctggccatcctgaccgacgcggcgcacctcctgtcggacgtggcggcgttcgccatctcgctgttctcgctctgggccgccgggtgggaggcgacgccgcggcagtcgtacgggttcttccgggtggagatcctcggcgccctcgtctccatccagctcatctggctgctcgccggcatactggtgtacgaggccgtcgtgaggctcgtcggcgagagcggcgacgtgcgggggtcgctcatgttcgccgtgtcggcgttcgggctggccgtcaacgttctcatggccgtgttgctgggccatgaccacgggcacggccacggccatggacatggacattcgcatgaccatggccacggccatggggattcggacgatggccattcccaccacgacgacgaggagcaagaacagggccgtgtccatcaccacgagcacggccatggaggcgctatcactgtcacaacccaccaccaccaccatcatcacgatcacgatgttgaggaggcgctgatcaagcatgagggtacccagtctgctggcagagctggtaagaagcctcggcggaacatcaacgtgcacagcgcatacctccacgtgctcggggactccgtccagagcgtcggggtcatggtgggcggggcgatcatctggtacaagccggagtggaaggtcatcgacctcatctgcacgctcgtcttctcggtggtggtgctgttcaccacgatccggatgctgcgcagcatcctcgaagtgttgatggagagcacgccccgcgagatcgacgccaccaggctggagagcgggctctgcgggatggagggcgtggtggccgtccacgagctgcacatctgggccatcacggtgggcaaggtgctgctggcgtgccatgtgaccatcgccagggatgcggacgctgatgagatccttgacaaggtgatcgggtacatcaagacggagtacaacatcagccatgtgaccatccaggtcgagcgcgagtagggagctctgtctttggctgctgtcttgggcataaatggctggcgccattcgagctctggtgtgctcggtggtgttgtctattgctagtctattaggcaggccgggggaattatttgcgtggtggtcgtcagtcagtcagtcggtgcataaacaaggatgaaattttcggtaatgctattgacagcatcgtggttcatcgaactgcatattctagtacgctgtgccgtc

SEQ ID NO: 21839 - DNA, 1565 bp, Zea mays
  Clone ID: LIB3354-120-A12_FLI
gccgcgcgtgccggcgatggagagggacgtcgtgctctccgcacccgaggccgctgggtcctcgtcctcccccgcctcctcgtcgtactcctccttcgccgagaccagggtcatctgccgcgtgtgtcagaagcagttcgcgcagtacacttgcccccgctgcaacgcccggtactgctcactctcgtgctacaaggcttgcagcaggtaggatatggtaatgtcgcacgggtgtcaacagtcttccctaacgacatcttggcaccccctggcgctgataccacttgtcaggaaccacgccggagagacaaccttcagcaggttgccggcgaactcctacctcccagggtcatagtgttcaatgcactgaatccttcatgcgtgagaatgttatggacgagcttaagcagatgcaacctgaggatgaatcaaagaaaaagatgctagatatcctcaagcggctccacttggaagaagagatggcatcagatggtgaagatgagtccatgttatcagaggagcttattcaaaaagttatgtctggggaagagataaagctggaagacctctctgattgtgaaatcaaacgattccgtcaagctctggcctcaggtgagctcagtaagatgattgaaccgtggacaccttggtggaaaaaaccctcagccagatctatttcccttggcctggatggaagtcagcttatcagacaagtaaacgcagaagacactgctgtaccatatccagatccaaatactgaccaagaggctagcatcaacgaaatccctgaagggccagaatctcctctcccgtcattgaaacagttaacaaggacagagccatctcctttgcttgctgtccacttggttgacattctgtacagttactgcttcacacttcggctctacaacggtgattggcactcagatcctttgggtgcttgcactgtcgccctgtcgatgtcgaaagtcatgggccaggatgctaaacctgagactgtacctgaagcactcgcagcctgcatcgaggagacatgctcaccagcttacaggcatactggtggtttcaggtttgctattggactcgtggacgatatcatcgccattctctccttgggacagaacgcacttatttgtgccttatgcgacttccatcgactcattgaagttggtaagagcatgctcaaggtggagaaagtgggcaagacggagagggcacagaactctccgaagcttcgtagtgcagctaggaagctattcttcatgacttgttgggtccatgagcagccagatgaggcgtggccatctttagctcacatcgtccaggtgcagaaagcatctatggaggagttggagaccgggaattggaaggcggatagaaagagcaaaccacaatccgcggttcttatcgaggagctgtaggcatatggatgtaccactggaaactggatcgcgaggctctgtacccttgtgtatcgctcaggatgaatccaacgagagaccttgtccttgtaatgcagttagttgcttttgtgtacacttttttttgaaaaaaattgtatttgt

SEQ ID NO: 21840 - DNA, 359 bp, Zea mays
  Clone ID: LIB3354-120-C4_FLI
ggaccacacgaggaggggaccaacaagaacgccgtcatcgcggagtcggagcccgtcgacctgcccgcgagcgcgcggggcgtggcggaggtgaaccgtgctgggccggaggagcagacaggccgcggtcggcagggcatggccgagcccaccgccggtggacgtcgcttgggattaggtcgcccggccccggcttaacgatccagatcaagcagtactcgactaccgccactacactacctgctctgctcgtgtcttgtttccagttttctttctctgtaagcggtgtagggtttgccaaacttttatgtacgaattatgaatatcaataaagtcgatctgctgctgcgtttcttggc

SEQ ID NO: 21841 - DNA, 1922 bp, Zea mays
  Clone ID: LIB3354-121-D11_FLI
ctcgccccacccggcgcctccgccgccgccggcctgcaaggcagggcggaggtcgacacctcgacgcccttcaagtcggtgcgcgaggccgtcgaccgcttcggcggcagcgccgcctggagctccgacctcatcaagcgtatgttcgcgctgcccccgagcccaaagaagcaggaggggggcgacgaactggccgatctggaggagcagaccgcgcagctagagaaggagctcggcgtcaaggaaagggagacgcttgatgtgctcaaagagttggagtccaccaagaaggtggtcgcagatttgaagctaaagatacagaacgaaggtgccggtgcattttgcatccctgaagagagtgttcggggtcaagccgagctgcccactgccgctgaagaggttgcagaagtgcagcctgagaatgctgaaactgatgtggttatgggcgcgcttcatgtgcagctgcaccagtctcctggtacttcagtgctgaagggccttgagcaggcaaaagccaatctaaacaggaccacgagtgatcttgcagctataagggcctccgtcgagtcgctgcggaacgacattgcgaaagagagaatcttggtggagagaagccgagagaaggtatgtgccaacacgacactgattgcttctctggaggatgagctgaaccggactgcacagaagctgcagacgctgcgggatctgcagaggaggcgtgacgatcaatcggacatcttcatagagatcaagaagatgacatctgagctagagcagctcaggaatgcagcgagtgctgccaaatcggaagctgctatgctgtctgccgaaattgagcagatgagagctagcatcggcactgctgaggtgaggtgccgtgcagccaggaagatagaagaggcggcaagggcagcagaagctcttgcccttgctgaaatcaagatcctactacgcaatgaagcttcagttgaggatcttcagggcatggaagatgtgagcctttcattggaagagtactctgagcttgctgccaaagctcaggaggctgatgaacgctcaagaaagaaaatcgatgctgcaatggtgcaggtagatgaagctaacaggacagaatctgactccctcagaaagctggaggaagctcgattacaggttgaggaatgtaagaaggcgctacaggatgcccagaagagggtggatgctgctaaccgagggaagagcgcagtagaagaggctcttcgcagatgtcgatccacgactggacacaggaggaggtcggtccatgaccctcccaggttcaaacatccagctccccgttccagagattctcagaatatggatatcgtcggtgtttcaaagggtcccttgaaaccaacgttgtcaatagggcagatactgagtatgaagctaatgggaccagatgggtatgacaaaagcgtctgggacgacgcaagcgaagcttctactatgtcgctcggacatatcctgaaccgcaggcatgcagtcgtgtatagcagcgatgcaactgctcagaagaaattcccagggaagaggaagaagtttgcctttacaggactctctattttcttggcgagacaggccaagaggaagaaggaaaagggatcgcattagaaactgctgaagccaacttgggctgggaaaagagaagcattgtagtctaccttgctagctgttaactcagaccctagtgttactgttcttgtaatttactagtatgtgtcgttgataggtgcctagatcattggtttttccatagcaggctagtaagttgtagctgatatttctgtctagtggttatttcaggtgctgtgtgaacttgcaatgtagcagtatgactagtagctgatatcaagtatatgaggcatatgtggttcactgagattggaatcttcttctctgct

SEQ ID NO: 21842 - DNA, 944 bp, Zea mays
  Clone ID: LIB3354-121-E3_FLI
cacacgccgtggccgccccgcgcgctcgcccgccgcgtcgtccctgtccctgatccatccccagtccccagcaggccagcggccacctcccgctcgccgccgcttgtggccggaggaccggaggtacatgggccaggctctgcgccgcgcctcggggcgcgtgaagccccctcccgcgccctcgccgcccgcgaggcaaccccaccctcccccgcctccgccccaggcgtcgccggcgcccgctggcggcgcgacgcaggaccggctcgacgggctatctggtgacgatatcacggctccaacagaacacggtcatggtgtacttgaggaacgtgatccaagttacgacgagatgctcaagcacatggttgggagaatcactaccaagcccggaggaaaaccagaaatgggtgaagcttccgttgtccagcggtacaacaggccgctcccaaaggtcagaacgtcaaaggccgaacctgggcaaggtgggggaaggcagctaccgtcaggcgctctgaacgtccagcacatccaggagatcatccgactgtaccaagggaagtcgactaaccaccagggcccgatgagcgtggatgacatcgcctcgaggttcggagtcgaagcctctgccgtccaaaacatcgtgcggtttgtttcgctgccccaggacgagggcgtcgagaagaaagaggagcactgagggtccacgtggccgtgtagctacctctgagcctttggtcttgttcccaagctcatagataactgctgcttgaatgtgattttgatagtgttgtttaggttttctcctgctcctgctatccaggataatgaagttagtatggaagggctctgttccataagcacctgctgctatgatcagtggacgctaatatctgtttctggccagctccccaaaccacgccataaggagtccattttggttt

SEQ ID NO: 21843 - DNA, 1400 bp, Zea mays
  Clone ID: LIB3354-121-G1_FLI
gccaaatctcgaccacgtccggcaaccgcgccccctcggctttgcgcccacaccaagccaccctctgttctcctcttccgtggcggactagcggcgcactggtgtggtgctcctccaagctctggtctgctccgcgccccgcctccccgtcgaccggcgactttggccccggcccccgggctaggaagcgagttcaccggtggatccgcgcgtgtccctccctgttacctgcgggtcgccccagccggccacccgcgcccccgcaccctactgacttgggcttgctgtatagcacggaccagatcaagggtcgtcgtcgaccacgtttgaggcttggccatgcctttaaatatagatattgatctgttcaagctggatattgatgagctgatagctgattattccaaggagaactgtacatcactcttcgaattcaaacgagtatggatgggcaagaaattttcttatatctatgaaggcagacctaagacaaactcaggtttattcatgcagtccctctttctgcattgtattggtcatttgacttctcaaagttcactgcaccaaagattggctgggctatactgcctttactgtctgtatgagtgccagccatacaagccgcagttcaagatttacttgtctcttgaggagtgcaggcaactgaaggatatcgttgttatggcgaagcaaaatggactgcagctcgtgcctgcacttgtcaaaaggatgctggataaagacatgtttttgtttggctacatgaatttgatcaacgacaacggggacaagcaggtcgaggaattgaccgcattgcagaacaagcaagtaaaatttgcatgtgacaagttatttgcaaatagccaagcagaaagatatatgcacatggacttgggtgctgagttcgagcttgataccatcaaaaaattgtcaaaggagtatgcagaagcaaaggaactggcccttgcagaggcaagccaaactgtcgaagttgaagatgctaagcacctccttcagagtgagaggctgttgggcgacaagatagatgaagtcgtcaaagaatgggatgtccagaaggaggggttctacgagagaactggattatcctcatcccctggtgaccagctcatggcggtcgacaacgatgaatcaggagctcaatgtcacaaggatggatcctgtggcgatcagctcatggcggtcgacaatgatgaatcgggagtacaggatcacgaggacctcgacgacgacgacgatggctttgccgagttagaactgctgctagagtgaagaacatatacaagtctgtaaactcttactaccgccgtataaccgtgtaatcagaacaccgagagatgtaatcctcgctcgtctttactaggctctcctttttagttgcc

SEQ ID NO: 21844 - DNA, 1505 bp, Zea mays
  Clone ID: LIB3354-122-B1_FLI
gcccgctcgttccaacatcacaaactccacacggctctcctgtctccgctgcccgctccacctccctccatgccgtcggcttccctccgcctcgccgtcgtcggcgcgggcgcggcgggcctggttgccgcccgcgagctacgccgcgagggccatgcgcccgtcgtcttcgagcgcgccgccgccgttgggggcacttggctctacacgcctcccgccacgtcctccgacccgctcggcgccgcggcgacgcattccagcctctacgcatcgctccgcaccaacctgccacgcgagaccatgggcttcctcgacttccccttcgccgctggcgccgcgggctcccgagacccccgccggtttcccgggcacgaggaggtgctccgctacctggaggcgttcgcgcgccggttcgacctgctccggctcgtccgcttcgagacggaggtgctcagtgtgaggagggaagacggagggaggtgggctgtgacgtcgaggaagctcggggataaggggagcggcgaggaggagttctatgatgccgtcgtggtctgcaatggtcactacacggagccacgcctcgccgtcattcccggggtagatgcttggccagggaagcagatgcatagccacaattaccgtgtgccggagccattccttgatcaagtagtgatcataattggggcctcggcaagtgcagttgacatttcgagagacatcgcaagcatggcggaagaggtacatattgctgatagatcagcaccggcttccacctgtaacaagcagcctggctatgataatctgtggcttcattccatgattgaccatgcgcaggaggatggcactgtggtgttccaggatggcagctcaatcaaagctgatgttatcatgcactgcactggctacctgtatgactttccattccttggagatgacagcactatcaccgtggacgacaaccgtgtcgatccactatacaagcatatttttccacccgaagtggcacctcatttgtccttcatcggattgccttggaaagttatccccttcccactgtttgaactccaaagtaagtgggttgctagagttctatcaggacggattaatcttccatccgaagacaggatgatggaagatgtgaaggctttctatttgaaactagaagcacatggatggcctaagagatacacacataattttgcaaattaccagtttgagtatgatgattggctcgctgagcaatgtggccatccaccagtcgaagaatggaggaagcagatgtatgctgtaacttcaatgaacaaggcagctcgtcctgagagttaccgtgatgaatgggatgacgagcatctggtggccgaagcaaatgaatacttcaagaaattcttgtaaattctttcttactattctcatcccatattctttcggcatacccgaggctgatctcaactgcaatatgcaaatatgaataaccatttaactattttatgtgatgtggattggat

SEQ ID NO: 21845 - DNA, 644 bp, Zea mays
  Clone ID: LIB3354-122-D11_FLI
gacgaggcgcgccaccggccgagccgaatcgagctgcagaaaccaccttggcatggcgacacaggccgctttcctcgcggggttctcgcagctcgccgcgcagccgggccgcgaccgcgccgtggcggtggcggtggcgccggcgccgggcccggcccgggtggccgttgcggcggtgggtagcgccaagttgggcgtgaaggcggggacgtccaggaccgcggcggtggcgcgcctcggggtgcggtgccgggccagcctgatcgagcccgacggcgggcggctggtggacctggtggcgcccgaggagggcgggcggcgcgcggcgctgcggcgggaggcggcggagctgccgcaccggctgcgcttgggccgcgtcgacaaggaatgggtccacgtcctcagcgaagggtgggcgagcccgctgcaagggttcatgcgcgagcatgagttcctccaagcacttcatttcaatgccatccgcggccaggatggcaggatggtcaacatgtccgtccccatcgtgctctccgtcggggacgcacagcgaagggccatccaggccgacggcgccacgcgcgtcgcgctcgttgacgagcgcgaccgccccatcgccgtcctcagcgacattgagatctataagc

SEQ ID NO: 21846 - DNA, 1458 bp, Zea mays
  Clone ID: LIB3354-122-G2_FLI
caggcaacggcacagcagagagaaggcaggacagttagagagagagagagagagagagagagagagagaggcgcagagccaaggaagcggagcagagcaacagcagcaggtcgaggaagaggagaagagaaggtccaggagacagcacagcagccaggaagagcaagagcaagatgctgcgcgggggcacgggcatgctgggggtggtcaacttcataaccttcctgatctcgatcccgatccttggcggcggcatctggctggcgtcgcgggccaactccaccgactgcatccgcttcctgcagtggcccatcatcgtggtggggctcgtcctcatggtcgtctccctcatgggcttcgccggcgcctgctaccgccagacctggctgctccgcctctacctcttcgccacgttcttcgtcgtcctcgcgctcctcttcttcgtcgtcttcgccttcgccgtcaccgaccgcggcgccggccaggtcgtcatgagccgccgcttccccgagtaccagctctccgactacggcggatggctccgcgaccgcgtcgccgacccgcagtactgggccaccatcagcgcctgcctccgcgacggccacgcctgcgccggcatgaggcgcctcgcgcgggaccccaacacgggcatgctcgtgccggagacgcccgccatgttctacggccgcaacctctccccgattcagtctggatgctgcaagccaccgacgtcatgcgcattcacctacatgaacgagacgtactgggaacaaaaccccggtgtcccgaccgtgaccaatgaccctgactgcagcaggtggagcaacgaccagcagatgctgtgcttccagtgcgactcgtgcaaggccggcgtcctcgcgggcatcaagaagagctggcgcaaggtggccgtcctgaacatcgtggtgttgatcatccttgtgattgtctatgtcgcgggctgcgccgcgttccgcaacgccaagaggatcgagaacgacgagccagtgggcatggcgcggatgaccaagtcccatccaagcaggttccagttctaggcaggcagctgctgccgtcgcgggttcggaagcttctgccttgtacagatgatgaccagaccagtgggtggtgctaaggcctgggctttgctatatcttactgagatgtggattgtactgcatttgggggtgaaaaggggaagttcagtgtggtttgagttcgtgtttgatttagtgtttagggtaggtatgttatgtggtagggggtacaatatgggatctgcaagaaacaagagaagatcaatcatctaggaactgttctgtattggagatttttttttaaaaaaaaatctgggggatatttgtatgatggtgcttggtgccagccatgatggaatattttctgaatttctcactgtatgggaatgctagaggtatgaatgtatgatgatatggctgt

SEQ ID NO: 21847 - DNA, 984 bp, Zea mays
  Clone ID: LIB3354-123-A10_FLI
cgtgggtgagcggatcgagatggcggcgtcggatgttgagtaccgctgcttcgtcggcggcctcgcctgggccgacaagatagggtcggaaagccccgccgccgacggcgtcggcgacgccgcgcgcaagcggcccagcggcgatgttggccccaccccggggccagccgacaagcgccgccgcccggagcacccttcttcctcctccgcgggctcccgcgaccgccaccaccaccaccacggccgccgcccgccgtcctcggccgacgagaaggtgcgcgcctctcacatcctgatcaagcacgagggctcccgccgcaaggcctcgtggcgggatcccgaaggcgtcgccatctccgccacgacacgcgacgacgcggccgacctcgcgcgcgcgctccgcgaccagatcgtctccggtgaccgcgagttcgaggacgtcgctgccgagaactccgactgcagctcggccaagcgcggcggtgacctcggttcatttgggaggggtaagatgcagaagccttttgagaaggccgcgtttgctctgaaggtcggggagatcagcgacgtggttgatacagagagcggggtgcacatcatcaagaggactggctgactgcacctgctgcagtatccatacacggtggatgccttggagaggctgtatggtttcttgcttcattggtgaatttgtgcgtgttttttcttcttctcttagacggttgtttggatgctcatctcttcacctcaacgcacatggttgagtggtttgaatccaaaccaaactactccaacctatatggattgaattgaaatatatacacgcgcatccaaacaatccctatgcccttaggaaatgggatgtttgacttccttttgtaaacttcgctggagacctgtggtttggaactatgctcacggctacgatgggatcagattattttgggtatttatgacacgagtatatgtcgattgtttttatgt

SEQ ID NO: 21848 - DNA, 872 bp, Zea mays
  Clone ID: LIB3354-123-A12_FLI
ctcacctacatctccgtccgcaagcgtcagccaggctgccccgggaggccgggaggaagcagatcggagaaggcaagccacggatttccttctcgccttctggaccccatgtgatctgttgtaatggctcgattgtacatcggcaacctggatccccgggtgaccgctcgggagctggaggacgagttccgcacgttcggggttcttcgcagtgtctgggttgctcggaaaccacctggctttgcgtttattgattttgatgataagagggacgcagaggatgcaatccgtgacctagatggcaagaatggatggagagttgagttatctcgtaatgccagcggtggtcgtggaggtcgtgaccggcatggtgggtctgagtccaagtgttacgagtgtggtgagactggccactttgctcgtgagtgccgtttgaggattggttctggaggtctaggcagcggaaggcgccgaagccgtagccgtagccgcagtcgcagtcccagatatcgccggagtccaagttacggtagaaggagttacagtcctgcagcacgctctccaaggcgtcgtagcgtctcaccagctcgtggacgcagctatagcaggtcaccacagcacaagggtgcacgtgaagaatctccctatgataatggataccgccgcagcaggagctagagccagatcgttgtatccgacgacgagcgttatgtgacagatattgggaaagctatggtcaataacctgcttgacagatccttcgtcgactgcttgactttggttaaggttctcataactttctatatacctattatcttgtgtctactttataagtagcagtaaaaccttttgatgagtgtatttgttgaact

SEQ ID NO: 21849 - DNA, 650 bp, Zea mays
  Clone ID: LIB3354-123-C1_FLI
ctcactagtaaatggcggctccctcctccaccgccgccaccatcatcagctcctgctgccgcctcgggcctcccgctccgcccgaacaagccgctgcaggcgctcgcaggacgcaggcgccggcagcaggcgtgtcggcgtcgcacgcgctgcgcggggcgtgcgtggcagccgcggcgtgcgcggcgatggggatggcgggcggcggcgacatagcgctggcgcgggacggggcatccgtcgccgcgtggaccgacgccatgggcgccgcgcgcaccaaggcgccggcgccggcgcggtggagcgagcgcaggcagtgcccgccgtggcgcgccaactcgctggagaacgtcgtgcccgagaacctgccccgcccgcccgcgcccaggaggttcgacagcgtctcggtctcggccgccgcgccggacttggtggcgccgccgtcctctgtcctcgcggcggtgcgccccggcacgggctgcttctcgctctgacgcgccgcgggcaactgtggagatcggaggttgtaagaaaaaaaaagcgacaaatgtggaaattggaaaacgcaatatgtacactataggttttattgtctcagtatctcatgaattcttgccggcaacttttgtgttgatggaagtaatttgccc

SEQ ID NO: 21850 - DNA, 838 bp, Zea mays
  Clone ID: LIB3354-123-G2_FLI
cttgaggtggagtcttcggataccattgacaatgtcaaggccaagatccaggacaaggagggcatcccacccgaccagcagcgcctcatcttcgccggcaagcagctggaggatggccgcaccctggcggattacaacatccagaaggagagcactctccacctggtgctccgcctcaggggtggcatgcagatttttgtgaagacattgactggcaagaccatcaccttggaggtggagagctctgacaccattgacaatgtgaaggccaagatccaggacaaggagggcattcccccagaccagcagcgtctgatctttgcgggcaagcagctggaggatggccgcactctcgcggactacaacatccagaaggagagcacccttcaccttgttctccgcctcagaggtggtatgcagatctttgtaaagaccctgactggaaaaaccataaccctggaggttgagagctcggacaccatcgacaatgtgaaggcgaagatccaggacaaggagggcatccccccggaccagcagcgtctgatcttcgccggcaaacagctggaggatggccgcaccctagcagactacaacatccaaaaggagagcaccctccaccttgtgctccgtctccgtggtggtcagtaagtcatgggtcgtttaagctgccgatgtgcctgcgtcgtctggtgccctctctccatatggaggttgtcaaagtatctgctgttcgtgtcatgagtcgtgtcagtgttggtttaataatggaccggttgtgttgtgtgtgcgtactacccagaactatgacaaatcatgaataagtttgatgtttgaaatt

SEQ ID NO: 21851 - DNA, 799 bp, Zea mays
  Clone ID: LIB3354-124-A10_FLI
ggaagagcaccaaggaccttcggcgcccgttcaggatccacatcttcccgagcgagttcttggttggcctcttcctcttcggaccacctccaaggttgctggccctgaatcccaacagtcagcttgctcgggtctgagaggatttatgttggctcttggtgtagcttgccactctcaccaatcaagttttcatgtctgatctcgacattcagatcccaactgccttcgatcccttcgctgaggccaatgctggggactctggtgcagcagcagggtcaaaggactacgttcacgtgcgcatccagcagcgtaatggtcgcaagagcctgaccaccgtccagggattgaagaaggagttcagctacagcaagatcctcaaagatctcaagaaagagttctgctgcaatggtacagtggtccaggacccagaacttggacaggtcattcagctctagggtgatcagaggaagaacgtctcgaatttcctcgtccaggccggcattgtgaagaaggagcacatcaagattcatggtttctgagcaaccgccgggtccatatcaaaccaaccctgcatgcagggcatcttattatatataatatctgaggtggagcatatctatctggctgtgtactgcaagcaggcctagtacgccgcctgcgcgttcctcctattacacatataggcccctccctgcgtgtatgcttgttaccgtcgtgtcgaaccttgtactacgaggctccatcgaacatcgatggcttgcttctttatcagaacatgtttgaataaacgctatttggt

SEQ ID NO: 21852 - DNA, 986 bp, Zea mays
  Clone ID: LIB3354-124-F7_FLI
catcacacagtcaagcaacgagagacgcgacaactcaggttcccttcatgggttgctccttggcaagaacatattggtggttgatgacaacaaggtaaatcttagagtggctgctggcacattaaagaaattcggagcgaaggtggagtgcgtggagagtgggaaagatgctctcgccagcctacaagttccacataagttccatctttgtctcatggacattcagatgcccgaaatggatgggttcgaggccaccaagcaaataagggcaatggaggcgaaggcaaatgagcaggcagtcgcctgtgatgattcagaaacggatggcgcgacaagggcggcgagatggcacctgcctgtccttgcaatgaccgccgatgtcatccaggccacccatgaggagtgcacgaagtacgggatggatgggtacgtcacgaagcccttcgaggagaagcagctcttccaggcgctgcagaagttcttggaccctggcatgtccagctaacacccaagtgctgcgttcgttgcaagtgaggcaccattctcctccgttctgtagttcgctaaccatagacgcaatctgattatctgaccccgaagaaagatcgtaaatggcgggctgctcgtcgaccatgccagcggggaacagcaggcagcacgcagcaggggcctttgctgcctgcctgtgcagtgcaggcgccgtgtaaatgtattgtattagcagggatcctgtttatagcgctagtatggacctgcgcgacaatgttggaggagctgcctgcggctgatgcacgtcgagcataattttgttgtacagcttccaccatttttgtgctactgtggcaggcatgctcgctggtgcagtgcaggactggaaggaaaacctgactgcctgagagtagtttttttttgccgtcaacattgcattgggattcgtgatgtattacaatctgctaatgtgcgatataagctcatgtaattggctc

SEQ ID NO: 21853 - DNA, 1017 bp, Zea mays
  Clone ID: LIB3354-124-H10_FLI
tccattcttccctcttccacaggctgaggaccgaacaccgaagccaggcagccagccgaggaagccaggcgacaggcgacgccaagtcgagaacaccctaggtggtcgctcgcaggctgcgagtgagagccgtggcggagtcgccgtccttgcccacggaggaggacacagccgccggcgcagtgggatggcgacgccgacgcccatgcccggaagcgaggggacgctcgtggcggtgatgccgcggtccccgtccccgacgccggcggaggcggggacctcggcgaccgagacgcccgtgctaatattcctttacttccacaaggcgatccgcgcggagctcgaggcgctgcacggcgccgccgtgctcctggccaccgagcgcaccggcgatgtcgcggcgctcgccgagcgctgccgctttttcttcagcatctacaaacaccactgcgatgccgaggacgcggtcatctttccagcacttgacatccgagtaaagaatgttgcagggacctattccttagagcataaaggagaaagcgatctttttagccagttatttgatctcctggaattggacatacagaatgatgatgctcttcgtagggagcttgcgtcatgtacaggcgcgatacaaacgtgtctcagccaacatatgtccaaggaggaagaacaggtctttccattgctgacaaagaaattttcatgtgaagaacaagctgatttagtgtggcaattcctctgcaacattcctgtcaatatggtagcagagttccttccatggctttcaacttctgtcacatctgatgagcaccaagacatccgtgactgcttatgtaaagtagttcctgatgagaaacttctccaacaggttgtattcacatggatggaggggaaagcagcaagagaagtggcagagagctttgccactgaatctaatggttctcaagccgacaggcatcctatagatgatattttatactggcacaacgctatccgcatggagttacatgatat

SEQ ID NO: 21854 - DNA, 945 bp, Zea mays
  Clone ID: LIB3354-125-A4_FLI
ccgctctaggccgcacgccgcaggccgcatcagcttgagcgtctaggactaggaagaggtagcagcgttcgatggccggcgacgactgcgacagcagcaagccaaagcctccgccgccagcggcggagggtgcgggcgaggtcgtcgaaggccccgtggctgcggacaaggcgctgcacgcgctgggcttcgagttcacccgcatcggcgcgcgcgaggtcgccggccgcctccccgtcacagacacctgctgccagccgttcggggtgctgaacggcggcgtgtcggcgctggtggccgagtccacggccagcgtcggcgcgttcatggcgtccgggtaccggcgggtggccggcgtgcagctgtccatcaaccacctccgccccgctcgcctcggcgacgtcgtccgggcgcaggccgtccccgtccagctcggccgcagcatccaggtctcccagcatgtttggtttggtttgcctgatcaatcgtatatcgtaataagctcgatgaggccaattcaaatgttgctagcttgttcttctggcaggtgtgggaggtccagatatggcgagcggacccttccacaggggagtgcagagatctggtgtcaacagccagagttaccatgctgataataaccaacccatcaagaccagaggagatgtcgactcacgaagcaagcatcaggaaatacgcaaagctgtagagagagagagagagagaaataaaatcaaccgctttcacctgattacacctcccagtactaggaacactaaaccaacatcatctccagacatttcactctccaactattcgatgctcaaagacgaacgaaggacatgtgtgtcgtttcttattggacaattgtgtcagtgcccctctgttttaagtaaaactatagattattatcctgttttttagactttgggtttttgtcccttttat

SEQ ID NO: 21855 - DNA, 1759 bp, Zea mays
  Clone ID: LIB3354-125-E3_FLI
gtgcggtgactgactgggcaaccgccaccgccctccccctccgtcgggtcttcgccggcgccaccagcgacgactgggcggtctgtgtccctcttcgccggagacgatcacccaccaggtggatgtcgattttttggttgacaagttgaaggttacgaactactttgatcctgaggtgaagaagtaatgatccgcccaggctcaagggactcgcaaaattatgataacaataatcaaagagttcatccgcaaccagttgatgagaacatgaatcagaacggggactcagtggacactatgatcgggaggatattcaacaacatatcctctttaaaatctgcatacattcagctgcaggaagcccacaccccatatgaccctgacaagatccaggaagctgataaacttgtcatagaggagcttacaaatctttcagagctcaagcatgcttacagagaaaaacatcctaagccaatagctgcatcccctcaagattcacgcttgctctctgaaatacaagagcagcagaatttgttgaagacctacgaggtcatggtaaagaagttccagtcccagatccagactagagacactgagataacccatttacagcagcaaattgatgaagctaaacttcggaaatcaaagctagagaagaaactgaaacagaggggcctacttaacagggagtcagaggaatctgacgaagaagagaactacttttccattgaattgacgccaagtttgtttacatctgctgtcgataatgcataccagtccatacatgaattttcaaagcctttgatcaacatgatgaaggctgcaggttgggatcttgatggggctgccaatgcgatcgaacctggtgtggtttacacaagaagggctcacaagaagtttgcttttgaatcctatatttgccaaagaatgttcagtgggttccaagaggagagcttttctatcaaggattctaacatcagtgtttccaatgaggctttcttccaccaattccttgcagtgcgagccatggatcctctggatgtcctgagccagaaccctgattcagtattcggaaagttctgtagaagtaagtaccttttgcttgtgcatcaaaaaatggaaggttctttcttcggcaacatggatcagaggaactacgtcatgagcggtggccatccaaggacacctttctaccaggcattcctaaagctagcaaagtccatatggttgctgcacaggttggcgtactccttcgacccaaaggcaaaggtgtttcaagtgaaaaaggggagtgaattttcggatatccacatggagagcgtcgtgaagaacatcatcctagaagaaggtgcggagaggccaaaagtcggcctgatggtgatgcctggtttcctgatcgggaccagcgtcatacagtcccgtgtgtacctttcagatgccaagtgtgctgactgactgaagattgcacaaggagcttgagggggtgcctttgctccttgggagagctaccagcagcataagtttatggtggactgttgtcttgtatgtaatgcgtgagacctgttgcttcaatgccgtgctacgtgattctgtccagtgggcttgtggtttccccatgttgcatttccatgtgttatacggctatgtaattctgcccagtgttttgcacacattatcagggtgattgattgatcgtgtaggctgcacttttcatctgaaatgtgtttgcccaatcaatcagatgattctgttggtgttc

SEQ ID NO: 21856 - DNA, 1272 bp, Zea mays
  Clone ID: LIB3354-125-G5_FLI
gatctctcgagcgcttcgagaaagtttcaggccctccgcccctgcaagcgtccactgaccagacctggccagcccaggcgtggaggtgctcgtctcctccgccgcgccgggaccggcgatgaacggcgggctccctggattccgtacgctaactcatctctcgtccctcctgttctacttttctttctataaagagaaacgtctcgacttcccttaactctgttcctctgttgtcggcatcgatcatggcgcgattcgatctggttctgcgcagacaatgcgccggcgtcaaaggccgtggtcgtcgccgcaggtctcttctccgtcgcctttggcttccgcggccactccctcaacctcggccttgcctaccaggattagtagcttggaattacatggaaactcagtgtttatgaaaagctgagtgtatggagactgatcacctcattgtttgctttttcgtcaacccccgagctgatctttggagcagccctgctgtactactttagagtgttcgaacgccaaataggttctaacaagtatgctgtcttcattatcttctcaaccatggtgtcagtactgcttcagatcctttctttaggttacatgaaagatccttctctaaatcctttgacatcaggaccatatggcctcatctttgcatcttatgtgccattcttctttgacattccaatctcaatgaagtttcgcatatttggactgagcttcagtgataagtcattcgtatatttggcaggactccagcttcttttctcatctggaagacgttccattgtgcctggactttctggcatactggctgggcttctgtatcgcctgaatacatttggcgtccgtaggttgaagttcccagagttggcaacatctctcttctcgcagttgtcattgcccttttcaagcaatccatatcaagggttaccgatcacagaaaatgatggaagcatcccttctcatcaggcacatcaaattgaggatgcacgcgcagctacccaagatcctacggagtcttctattgccgcactggtgactatgggctttgatcgcagtgcagcaattcaggcgcttgcattgaccaactacgatgtcaatttggcgtcgaacattctgcttgaagcacaagctctacagcaatgataccctggcatcgagtcacaaaagacgggcagatgcactgtacattaatgagcgttaagtgtttgatactccgattcattcttctgttctagattttatcacaggtttccttgaaac

SEQ ID NO: 21857 - DNA, 867 bp, Zea mays
  Clone ID: LIB3354-126-A2_FLI
ctgcagcccccaactacccccagcctcggaaggaaccttccagaagcgcaagactctaaggccgtcgccttcccattcttcctcgccgcgggggtcgcctgagatcacataaacaatggtgaaggctgttgctgtgcttggtagcagcgatggtgtcaagggcaccatctttttcacccaagagggagatggccctaccgctgtcaccggaagtgtctctggcctcaagcctggcctccatgggttccatgtacatgcacttggtgacaccaccaatggatgcatgtcaactggtgtttattcttctttttactttggcttgcttatgtgatcaggatgtgtgctaagttaatatcagtcattgaactttctacttgttggtgaaatcaaggaccacactacaatcctgcgagcaaggagcatggggcaccagaagatgagaaccgccatgctggtgatcttggaaacgtgacagctggagcagatggtgttgctaatatcaatgtcactgacagccagatcccactgactgggccaaactcaatcattggcagagctgttgttgttcacgctgatcctgatgatcttggaaagggtgggcacgagctgagcaagagcactggaaacgccggtggccgtgttgcttgtgggatcattggactccagggctgaaaacgatcgccggacttgggggtgcctgagaggtccgtctcctgccgtcgccagcagacgagcctgaacattgggagacatcgtgaaataagagcgtcgctgatctgtgatcatcgtatttgtcattatgcacctgtagccaccgatggactaaactgtgctggattatgctgttggatgaccagagtatgtgtt

SEQ ID NO: 21858 - DNA, 1250 bp, Zea mays
  Clone ID: LIB3354-126-C1_FLI
gcgactttatttcaagaagacagaagaagggagagtcgtactgaggtgtaagaatggcgagtgcacaggcagtggggcaaggagaacgaggccacttcgttctgaagagcggacacaccattccggccgttggtctaggcacttggagggccggctcagataccgctcactctgttcggaccgccatcgccgaggctggatataggcacgtggacacagccgctcaatacggagtagagaaagaggtcggtagaggacttaaagctgcgatggagggcgggatcaacaggaaagatttgtttgtgacgtcgaagctatggtgcaccgagctggctcctgatagggttcgaccatcactccagaaaacactcaaggacttgcagctggattacctggatctctaccttatccactggcccttcaggctgaaagacggggcgcacatgcccccggaagccggggaggtgctggagttcgacatggaaggggtgtggagggagatggaaggcctcgtgaaagacgggctcgtcaaggatataggtgtctgcaattacacggtcgccaagctcaaccgcctgatgcggtcagcgaatgttccaccggcagtgtgccagatggaaatgcaccctgggtggaagaacgacaggatctttgaggcctgcaagaagcatgggatccatgttaccgcttactctccgctgggttcttcagagaagaacctagcgcacgacccgctcgtcgaaaaggtagccaacaaactggacaagaccccggggcaggtgctcgtcaggtgggcgctccagagggggacaagcgtcatccctaaatcgaccagggacgaaaggatcaaagagaacatccaggtgttcgggtgggagatccctgaggacgacttcagggccctgtgcggcatcaaagatgagaagcgcgtgctgaccggagaggagctcttcgtgaacaagacccacgggccgtacaagagcgcaaccgaggtgtgggaccacgaggactgagctgagctgccgtgccgccggatgcctcccactcccacctgatgaaccagaataaaggataccgacgcacctgtcagtcacctccttccccgtgccttgtgagagcggcagcctctcgcacagggaagatgctctgtgagagcagcagcctcgcacgagaaagatgtagaagagagtgtgcgcgcaacacactcatgtactgtacgatagactgaataataaagaagaaaacgatcc

SEQ ID NO: 21859 - DNA, 1291 bp, Zea mays
  Clone ID: LIB3354-126-D2_FLI
taacagtcttcgcacaaatattccctcccccaaggcccgaagccccgaaactttccggatctttcttccgccgcttcatcttctttgcgcaaaactagttttgtttctcgttcttctcttcgatttcggccgaataaagatggcgtcggctgcgcgcctcctcgcgccgttctccaggcgtggcgtcgtctctgtggctctggcgggggtggagaggcggcggccggaggcggcgtcgctcatgggggcgcctgtgctggctacggtggaagcctgcgcttcgatcaaggtcattcctttgtcgaatcagctggctcgatactcgacaactgcatttcagaggtttgggttttcaacttcagccccccaacaagatgataaggagacaaacaagcacacagatgatggggttaatagaagtgttggagcaagtactggagcttcaagtgaagccaataatgtgcctggaaccgagaaggcacaggaagcagattcagaagacctagacctatcaaaggaggaccttgtgaagctgcttcttgagaaagacgaatcattgaagtctaaagatgaagagtttaaagatatgaaggataaggtcctacgcagctatgctgagatggagaatgtccttgccagaacaaagcgtgagtcagagaacaccaagaagtatgccatacagagcttctccaagagcttgttagatgttgcagacaatttgtctcgggcatcatctgttgtcaaggcaagtttctcaaagatagattcatctaacgattctgatgaagctgtaacactactgaaaaccctactagagggtgttgagatgactgagaagcaacttggagaggtcttcaagaagtttggagttgaaaagtttgatcctttgaatgagaagtttgatccaaataggcactatgccattttccaaattcctgatccttcaaaaccatcaggaactgttgctgctgttgtgaaggttggctacatgttacatgatcgtgttcttcgccccgctgaagttggtgtcactgaaggtggtccaactgaagaagagccagaggagtaatctagatcaaacggaggttgctggctgcacgtatatctatgactactgccctttattggttggataagcatacatatcataggttatgtttttaactagatctgtgaggcaaatcactatttttgtagcatgttcaacgaggcaatttgttcaagctagtccagaactctcctttttcttgctcggtaataaaaacgagattgtagaacatgtacatcaccg

SEQ ID NO: 21860 - DNA, 535 bp, Zea mays
  Clone ID: LIB3354-126-G1_FLI
cgaaaacagagtttgcctgaatgtttgactaaggaatttaggcttacaatgaatatactgcggtctgttgtcaatggggatgtttatgaggtatggatgtcgtaccaatgagctgctgttgccttaaaaatgactcttcaacttggtgattgacattttcagtttgattttacgacagggcattagagctcttagcatcgataaagacaatgcccctaagtggaatcccactacccttgaggaggtgaagtacgaggacatcgaccgtctgttccagccgttcagtccggagctggaacttcaggtcccatctgatgattccaacaggtggagcggcaaatacgagaacacggtctatggcagagcttcccagtgactgtatacaagatcccccagccttttgttattttcatccgaaccactgcattacggaatattcagtttgcggcacgtgtgtatttcgagtgtttgtgtagcgcgacgttccaatgtatgaactgttgcaaaggttacacgatgacatgaagtttgatcc

SEQ ID NO: 21861 - DNA, 676 bp, Zea mays
  Clone ID: LIB3355-001-F8_FLI
caagtagcgccgccgacgtttcgagagcagagtatccaagctagccaagcgcgcacctcggtgacctagctagttcaggcgacgatatggcgtcaggtcaggaaagcaggaaggagctggaccgcaaggcccgcgagggcgagaccgtcgtccccggcgggaccggcggcaagagcgtcgaggcccaggagcacctcgccgaagggcgcagccgcggaggccagactcgcagggagcagctggggcagcaggggtacagcgagatggggaagaagggcggtctgagcaccacggacgagtccggcggcgagcgcgccgccagggagggcgtcagcatcgacgagtccaagtttaccaagtagtcctatcgcgtgcgtgcgtacgcagcgttcgtagctgtctgcgtagtgtaccttggccgtagctagtgctactctctactttggagtagctgaatgataataatgtagctagcagcatgcatgtaggcgatcatacatacgtacgtacacaggtacgtgtgtgtgatcatgtatgcttccagaagggtatcctagcttaatcagtcacgtcgtcaagtcgtcaatatggcaggttcgcgtcagggctttgtagtttgatagcctgtttcacgactcctcaataatcaagtagtgtaatgaaagtttggcggttc

SEQ ID NO: 21862 - DNA, 1013 bp, Zea mays
  Clone ID: LIB3355-001-G8_FLI
cttacatttgtgaggccaaacttcgctccgctgatatacaagctgctgttcaggtttgctcgctccttcatcaaagatacaaggacttctctccttgtcttatagaaggtctactgaagatcttctttcctggaaaatctggagatgatttggatgcagataaaaattcgagagccatgaagaagagaagcacattgaaacttttgattgaactatattttgttggaattgtcgaagatgctagcatatttgtaaatattataaaagatcttacatcagcagaacatttgaaggaccgtgaaggaactcaaacaaacctatctcttctatctacctttgctcgtcaagggaagttttttgtagggctacaacctcatggtcaagaagcttatgacgagttctttaaggacctaaatgttactgctgagcagaagaagttctttaagaaagccttgaactcttactatgatgctgtagctgaactactacaatcagaacatgcgtctcttcgtctaatggaggcggagaatgcaaaagttttaagtgccaaaggtgaactaagtgatgagaacacatcctcatatgagaaactcaggaagtcttttgatcagttactacgtggtgtttcctcgttggctgaatctcttgacatgcaacctccagtgatgccagatgatggaaatacaacaagagttactacaggaaccgatgcgttgccttcttctggaaaagaatcatctgcattggaacctatctgggatgatgaagataccaaagctttttatgaatctttacctgatctcagagcatttgtgccagctgtattactgggagaggttgaaccaaaatcaaatgagcaacatgttaagggccgtgagctatctggtgagtccacttcagaacaagagactgaactacatgacaatgttccaacttctgccactgaacgtcaactagaagttaaagtagatgatctagtgaaagagagtgaagacagagataaagagaaggtg

SEQ ID NO: 21863 - DNA, 695 bp, Zea mays
  Clone ID: LIB3355-001-H4_FLI
cactcactgatagcaagtagcgccgccgacgtttcgagagcagagtatccaagctagccaagcgcgcacctcggtgacctagctagttcaggcgacgatatggcgtcaggtcaggaaagcaggaaggagctggaccgcaaggcccgcgagggcgagaccgtcgtccccggcgggaccggcggcaagagcgtcgaggcccaggagcacctcgccgaagggcgcagccgcggaggccagactcgcagggagcagctggggcagcaggggtacagcgagatggggaagaagggcggtctgagcaccacggacgagtccggcggcgagcgcgccgccagggagggcgtcagcatcgacgagtccaagttcaccaagtagtcctatcgcgtgcgtgcgtacgcagcgttcgtagctgtctgcgtagtgtaccttggccgtagctagtgctactctctactttggagtagctgaatgataataatgtagctagcagcatgcatgtaggcgatcatacatacgtacgtacacaggtacgtgtgtgtgatcatgtatgcttccagaagggtatcctagcttaatcagtcacgtcgtcaagtcgtcaatatggcaggttcgcgtcagggctttgtagtttgatagcctgtttcacgactcctcaataatcaagtagtgtaatgaaagtttggcggttccttgtt

SEQ ID NO: 21864 - DNA, 448 bp, Zea mays
  Clone ID: LIB3355-002-A12_FLI
gcactaccacgcgaccacgcccccgctcctctcgtctctttcttcgcctcttccatcgcaggattcggcggccatgggcggcggcaacggccagaagtccaagatggcgcgcgagaggaacgccgagaagaacaagggcggcaaaggcagccagctggaggccaacaagaaggccatgaacatccagtgcaagatctgcatgcagaccttcatctgcaccacctccgaggccaagtgcaaagaacatgcggaggcgaggcatcccaagaacgacctctaccagtgcttcccccacctcaagaattagtaagcagcagaagcatatgatctgctcagctaaaagacaagtactacatatatatatatacgctgtgtgtcaattaatgggttgtaggctgctgttgatgcggctgcttcgttcgtgttgccccgtctgattatgtactgt

SEQ ID NO: 21865 - DNA, 403 bp, Zea mays
  Clone ID: LIB3355-002-D2_FLI
gtccggaggtcggcagcatgaaccaccaccaggcccagcccgtccgcaccggcgacgtctacccaccgaccgccgtcaagcgagaggcgagccacgagcgggacaagatcattgaacaaggagatcagcggggcggcgccctccacgtcgaccagacagatcttcccgccggcagacgcatggtcaccgccagcgcaggcggccaggtgatggcacagttcaccgtgcccgtgccggacaccaaggtcgcggaggccacggacgcggtcaccctcggcgaggccctccatgccgcggcgcagacgtcggcgggcgacaagcccgtggacctcgccgacgctgcggcgctgcaggccgccgaggcgcgcgcgacggggctgggcggcaacgtacgcggcggcgt

SEQ ID NO: 21866 - DNA, 424 bp, Zea mays
  Clone ID: LIB3355-004-D6_FLI
agcaacccgtgccggtgcaaggtggtcgggccgacgctggggttcgtcgcgttcgtggtggccggggtcatcgagtggccgctgggggccgccgtgtacctgttccgccaccgcaagggacgacgcatcatggcgcacccggccaccgtcgtgtacccgcgcgttaccagggccatcccgatctaatcggccgaccgatcagccaggtcgcggtttcatgtccgggtttgtgtcgccaacgtactgagatgtcgtcagtccaaatttgtgaatccttttacacccgcctgcctttctttctcaataagagtcgcaaatgtgtgtggtttcagtttgcgtacatttgtactccgattgtaagcatcgccgtcaatgtacgtaatactatgtatgtcatctcagtctatccgagtaacttcctatt

SEQ ID NO: 21867 - DNA, 974 bp, Zea mays
  Clone ID: LIB3355-004-E1_FLI
ccgcggtcccccacgggagccgctctcgtcctcctcctcctcggagtccatcgagcagggtggcggctggcccatcgaattccccttcaggcaggctgtcacggccgcctctctcaccttcaccggcgacacaatcgcgcaagtccgcagccgcatcgtcgaccgccgaagatgctgccccgactccaacaccaaggaactcataccagacatattgctgaaccatgattggattcgtgcacttcgtatggcttcctatggatttcttctttatggtccaggttcatatgaatggtatcagctccttgatcgatgcatgcccaagcagacatttgtaaatttgtctgctaaggtcatcctgaaccagatcgtgcttggtccttgtgttattgctgtaatttttgcttggaacaacttatggttggggaaactttcagaactcccatccaaatatcagaatgatgcccttcctactcttctatacgggtttaagttttggattcccgtatcgattgtcaactttggggtgattcctttgcctgctcgtgtcgccttcatgtcctcttgttccattttttggaacttttatctgtcgaccacaatgagcaaatgaaacctccagttagttgtcagttgccaacctatctggaacgaacaatctcatatggaccctgatactctgcaattttgctcagtttggttgggttcattacacagaggagcatctgaagaagttagtttcagcaggcataacagtgttaggtctatctttggacagtccttgtggtgtagtgacattaaactgtgaggccttactcagatgttgatgagcgtaaaggtcaattcagcaggcataacagtgttaggtctatctttggacagtccttgttgtgtaatcatgcatggagcatttgtctctattttgaattcaaaaaaatgtagttgagtttattatgtgcgatgtgtattgaatc

SEQ ID NO: 21868 - DNA, 627 bp, Zea mays
  Clone ID: LIB3355-004-E10_FLI
tccaagctagccaagcgcgcacctcggtgacctagctagttcaggcgacgatatggcgtcaggtcaggaaagcaggaaggagctggaccgcaaggcccgcgagggcgagaccgtcgtccccggcgggaccggcggcaagagcgtcgaggcccaggagcacctcgccgaagggcgcagccgcggaggccagactcgcagggagcagctggggcagcaggggtacagcgagatggggaagaagggcggtctgagcaccacggacgagtccggcggcgagcgcgccgccagggagggcgtcagcatcgacgagtccaagttcaccaagtagtcctatcgcgtgcgtgcgtacgcagcgttcgtagctgtctgcgtagtgtaccttggccgtagctagtgctactctctactttggagtagctgaatgataataatgtagctagcagcatgcatgtaggcgatcatacatacgtacgtacacaggtacgtgtgtgtgatcatgtatgcttccagaagggtatcctagcttaatcagtcacgtcgtcaagtcgtcaatatggcaggttcgcgtcagggctttgtagtttgatagcctgtttcacgactcctcaataatcaagtagtgtaatg

SEQ ID NO: 21869 - DNA, 521 bp, Zea mays
  Clone ID: LIB3355-005-A10_FLI
ctctgttgatagccatgggcatggagaagaagaaatcgagttcactggcatatctgcacgtctgcaggagcgcacgccatgctcgtccaaggtctgctggcgactgcgaacgtggagagggtggcggaggcgcacgtccgcgtgtacgaggagctgagcggcacggccgggggccggtacatctgctacgaccacgtggtgcgacgaggcgaggagttcgcggagctgcagcggcagctggggctcagggtccccgcgaccgcgacgcccgacggctatggcggcgacgacgacgacggccgggcgccgcggttccagctctgtaaccggaagctggcggcgctcatgtccgcgcggaggcggtgcacctacgacgcctacttccccatgccgcaggagtgagaccggaagaggagagagagctgctgatgctggacaacgactggagcgtgcgtgacaagtgacctcgtgtacatagcaatagtggtgatcggctcgcatcaatataataaatcggcctc

SEQ ID NO: 21870 - DNA, 753 bp, Zea mays
  Clone ID: LIB3355-005-D11_FLI
gcgaggagggcaggaagaccgaagaccgagccgtgcgggggctcgggacgggaacgggacaggaccccaaaatctcagatccttcctgcccgcccgcccgtgcccgtcgacgcgtcgttcttgccggccgcgccccacctccgccctctcctcctccagggggatcggatacgccacaggctgcgcgatggtgctgtgggtcttcggctacggctccctcatctggaaccccggcttcgacttcgacgacaaaatcctcggcttcatcaagggctacaagcgcacctttaatctcgcttgcattgaccacagaggcacaccggagcatccggcgaggacctgcacgcttgaaaccgacgacgaggccatatgctggggaattgcatattgtgtcaagggtggtccagaaaaagagctaaaagcaatacagtacttggagagaagagagtgtgagtacgaccagaaaatatccattgatttctacaaggaaggagatcccttgaaaccagctgtgacgggcgtcttagtgttcgtttccactccagatccaattggcaacaagtactatcttggccctgctcctctgcaggatatggcaaggccacgaagatgattcgatcatagagcttgcaaacgaggtgaggaaggtgctcaacagaacaaaggagaccaagatcactgttgtcgtgaggctgtatcgtctggagtaaaaaaaaaaagctaaaagccggcactaataatgatattaacttg

SEQ ID NO: 21871 - DNA, 650 bp, Zea mays
  Clone ID: LIB3355-006-D7_FLI
gctagacacagcgttgcaaactgaggtttaatcatcttagcaactacggtacgtgaccctgagtgcgtgattgttgcgaaacaatgaccacctcggtctacaccttaaaggtttgcgcgacatggcttttcatagtgctcaattggatctatcccctgagcataggagaaaagtatcaatttgtacagtggatccaagtattctataaagcatgcatcctccaatttcccacaagcgagaatggcatgatatgatggatgaaatggctgttgcgatcaattgtctttcaaggatcaattgtctttcaagaaccacactttgtattggtttgtgtgcagttcaagctctgcaaggtgaggtctgttcagtttggccagaaagtcatcccctacctgaacacctacggcgaccgcaccatccgctaccccgaccctctcatcaaggccaacgacaccatcaagatcgatctggagaccaacaagatcatggacttcatcaagttgtatttgctctttcatagacttcatcaagttatatacttagttaggctcaatgttagcacaaacagttgatgagcaagtttaaatttagagtacacttatgtatgagttatttgacaatacttatttatgagatattgaatattattt

SEQ ID NO: 21872 - DNA, 830 bp, Zea mays
  Clone ID: LIB3355-006-E4_FLI
gcagcgtcaagcccgagcctgtcgatatggcggcggaagaaggagatgggcaaggagggcctcatggtggtggcgcagctcaagcggctcgcggctctacccccggcggggggtcacccgcgcctggagcagttcatgcgttcgcacgtgtcgcggctcctccgcaccgacctcctcgccgtcctcgccgagctcctccgccaggaccatgtcagcctctcaatgaagatatatggtgttgtgcggaaagaaatctggtaccgccctgacatgtacttctaccgtgacatgctatacatgctagcgaggaacaagaaaattaatgaaacaaggcaggtatgggcggatctcaagtctgaagacgtgctatttgatcagcacacttatggcgacattgtgagggccttctgtgatgctgatttgattgaccttgcaatggaaatctatgatgacatgaggagctcccccgaccctcctctatcattgccgttccgtgttatcctgaaagggttggttccataccctgaactgagggagaagataaagcaggattttctggagcttttcccagatatgattgtgtatgatccaccagataccttatctgatatagatgaagaattcaagttttgatgaatgtacgccttcatccggattcagtgcttctgagttacattccctgcactgcaggcaaacctccatttctcgttcttttggtgggctagatcaattgtaaatgtagctgtctcgatctgcccagtagctgtggtaccaccaatttcaacctcttgatgaaccatttttgttaatctatgctttggattattgtc

SEQ ID NO: 21873 - DNA, 680 bp, Zea mays
  Clone ID: LIB3355-008-B9_FLI
ttcgttccgtccaggcaaggaagaaatcgagcagccaaggagaggagaagatggctcgtacgaagcagaccgcccgcaagtccaccggaggcaaggccccgcgcaagcagctcgccaccaaggcggcgaggaagtcggcgccgacgaccggcggcgtgaagaagccccacaggtacaggcccgggacggtggcgctgcgcgagatccgcaagtaccagaagagcacggagctgctgatccggaagttgcccttccagcgcctggtccgtgagatcgctcaggacttcaagacggatctgcggttccagagccacgccgtcctggccctccaggaagccgccgaggcctacctcgtcggcctgttcgaggacaccaacctctgcgccatccacgcaaagcgcgtcaccatcatgcccaaagacatccagctcgcccgccgcatccgcggcgagcgcgcgtaggcgtatctcgcgcccggccccagtggcggcggagggatggaggagtgcaatttgtaactttatgctgtttgttcgcttttagacggcgcggcgaagaagtagtgtaaaaacggctttacaagtctattttgtgcggtagttcgtgtaggccgcttcgtcccgaagcgatcttggtaaaagactgatcattcgtgttgccaaacgacacaattcgtattt

SEQ ID NO: 21874 - DNA, 684 bp, Zea mays
  Clone ID: LIB3355-008-C10_FLI
ttcatcctggtggttttgtgaggtcgaaagcggcgagcgaattagaagatgctggacaagctgtgggacgacgtggtggccgggcctcgcccggagacgggcctcgagaagctccgcaaggccaccaccgcccgtccgctcgtcatcaacaaagacgcggacggcggcagctacaagcgggcgcagtcgatgccgtcgaccccgacgacgccggtgacgccgtcgtcgtcgtcgtcgtcgacgacgccgcgcggcgccggcaacgtgtggcgcagcgtcttccacccggggagcaacctggccaccaagggcatgggcgccaacctcttcgaccggccgcagcccaactcccccaccgtctacgactggctctacagcgacgagaccaggagcaaccaccgctagatcgggcgagatggatggacagtgaagaggccatgtttgctggtccttgtggttatctaaaacgcacgcatgctctattatagctagtcatcactatatatatacttgtgtttgtgtattgttgttcttgttctgctggtgtctccgccgtttaatttgacctatgttatggagtgagtgatatatgtgccgtcactcctagtatatagtagtgagtgactagttggtatgtgtagtactgtactatcttttctccatatgcatgttttgccagcgcgt

SEQ ID NO: 21875 - DNA, 573 bp, Zea mays
  Clone ID: LIB3355-008-C6_FLI
cgaagcagacggcgcgcaagtcgacgggcggcaaggcgccgcggaagcagctggcgacgaaggcggcgcgcaagtcggcgccggcgacgggcggcgtgaagaagccgcaccgcttccgcccgggcaccgtcgcgctgcgcgagatccgcaagtaccagaagagcacggagctgctgatccgcaagctcccgttccagcgcctggtccgcgagatcgcgcaggacttcaagacggacctccgcttccagtcctccgccgtcgccgcgctgcaggaggccgccgaggcctacctggtgggcctcttcgaggacaccaacctctgtgccatccacgccaagcgcgtcaccatcatgcccaaggacatccagctcgcgcgccgcatccgcggcgagcgcgcctaggcggttcggttgcggcgcctgctcgctactgctggaggtgcttagtttagcccgtcatggttgtgttataggtgtgcgttgttttcaagagtaggcttcttgctatgtgctgatgttaacggaggattatgattagcagttctgaaaaaatgcaatggatgtgatctgctct

SEQ ID NO: 21876 - DNA, 584 bp, Zea mays
  Clone ID: LIB3355-008-D7_FLI
gcgcaacgcaatcctatgtcaggcgcgcaaggagctcagccgaagggcgccttcacggcgaccacctacacatcggctgcgcccaccggtggcggcgccggcgcggcccaggggcaggggcaggggcaagaccaccaggagagacggcagactccgcggacggagctccggtcggccgaggacgagcgcgggctgcctgtcaggaagctggaggacgcggtcgaggatgccgcgggcaagggcgggccggtgttcggcgccggcacggacgacgggaagccggatctcggggtcaccggcaccggctgatgctagccggatgtgcttcttgatgtgacgctcagtcaacgagcgagtcagcaagtgaaagcacaaggatgtgtccagcacatagtgcatacgatcggtcgtgtaaaatactgtacaaagtatgcacgtgcgaaataacactgttttgctgagcgtttgaaatagaaggtgaatgagatggaagagctgttagagatagattaagtatagtgtaccgtgcaaactgtgatgtaattaaccgtgtactgaattacaagttaatccattccaacctt

SEQ ID NO: 21877 - DNA, 916 bp, Zea mays
  Clone ID: LIB3355-008-E2_FLI
gtggaagcgttgagcttttttcttctttgtcttgctgcgcaagaagaagggaaacgagaggcgggcggcgatggcgaagaggctgctcccgtcgctgaaccgggtgctggtggagaagctggtgcagcccaagaagaccgccggcggcatcctcgtcccggaaacatccaagcagctcccacctcctgcattcgtgaagaacgactgaaccagccgccactcgcccgtccgactccggctccggccagctgcctctgtccctccgccgagctgcccgtccgccttcgtccctccggcccaggcgagcagaactccgcccccacccgccccgagccgagcagcagccagcagagccgcatcgccgccggggaacgctgagttgccggtccgccgccctgagaagatttccgtcccagcagcatagccgcagcgccgctgcccgtcgcctcaaggcaagtccgagcgccctgtcacaggccccagattaggttgatgtctttcctgagactgttgcctcaaaggctatcccaacttatcaggcaggtggagcaagatgttgagactgtaatccacgttctccagccgggtccaataggaattgtggagcacaaattcacagacgcggagatcttagaggccagggctacagtgaaaagagcagtggataattggcgaagaaattggacccttgagagaaatgttagcagataaatggaaaaaatatacccctggtgtcttctatcaacagtaattgaaataaatagggtgccatggctggatgcagttgttgccattagttagatttgagcacgatctgcttatcgggagttatgttaactgttctaaatgatcagtctgtttctctttgtttcatggtttgaaacgttcatatttagagaatgcagtaattcgactc

SEQ ID NO: 21878 - DNA, 904 bp, Zea mays
  Clone ID: LIB3355-008-E6_FLI
ctctcccctcgcctcctcgtctccccctaggggatcgtcggagaggaatcgcaaagagggccgtctcatccgagttaaggaagccatggagcacaaggaggctgggtgccaggcccccgagggacccatcctctgcatcaataactgtggcttcttcggcagcgcggcgaccatgaacatgtgctctaagtgccacaaggagatgataacgaagcaggatcaggccaagctggctgcctcctctatcgacagcatcgtgaacggcagcgacgccgtcatggagccggttgttgctggcagcaacacggtagtagctgttgcccaagtcgagttgcaaacaatgaacgtgcagcagcccgctgatgttgccggacccagcgagggggtggcggcgatctccaaaggggggaaggtagggccgaaccggtgcagcgcctgcaggaagagggttgggctcacgggattcaactgccggtgtgggaacttgtactgcgcgctccaccgctactccgacaagcacgactgcaagttcgactaccggactgctgccagggacgccattgccaaggctaatccggtggtgaaggcagacaagctcgacaagatctagggggggttccctacggttggtgtcaggaagattgtaaaccgcggtaactcgtcatgcggaactgctgccttgccccccgcgcctttctcttccatgtttgctgctacaatcttgttgttgggcattgcagtgcacggtgcacacttgtgtagcccgcctccgagaattctcctgcctctgcatctggtcagttcaaaaatgatttgcatgttggctatgttgtgtaagctctatttatggtggtctcgctgagacgggtatttggcttcgcagttatctagctatgtgatgtac

SEQ ID NO: 21879 - DNA, 714 bp, Zea mays
  Clone ID: LIB3355-008-G7_FLI
gttgctctagatccgttcatcctggtggttttgtgaggtcgaaagcggcgagcgaattagaagatgctggacaagctgtgggacgacgtggtggccgggcctcgcccggagacgggcctcgagaagctccgcaaggccaccaccgcccgcccgctcgtcatcaacaaagacgcggacggcggcagctacaagcgggcgcagtcgacgccgtcgaccccgacgacgccggtgacgccgtcgtcgtcgacgacgccgcgcggcgccggcaacgtgtggcgcagcgtcttccacccggggagcaacctggccaccaagggcatgggcgccaacctcttcgaccggccgcagcccaactcccccaccgtctacgactggctctacagcgacgagaccaggagcaaccaccgctagatcgggcgagatggatggacagtgaagaggccatgtttgctggtccttgtggttatctaaaacgcacgcatgctctattatagctagtcatcactatatatatacttgtgtttgtgtattgttgttcttgttctgctggtgtctccgccgtttaatttgacctatgttatggagtgagtgatatatgtgccgtcactcctagtatatagtagtgagtgactagttggtatgtgtagtactgtactatcttttctccatatgcatgttttgccagcgcgtaatgaatgtaatgtcagtactgct

SEQ ID NO: 21880 - DNA, 1117 bp, Zea mays
  Clone ID: LIB3355-009-B10_FLI
cacaccccccgagctgagcttagctccactccagctccaatcacagtcgtgaccagagcgcgagagctagctagagggccgtgaaaatgccgatcaataggatcgccctggggagccaccaggaggtgtaccacccgggcgccctcaaggcggcgttcgctgagttcatctccaccctcatcttcgtcttcgccggccagggctccggcatggccttcagcaagctgaccggcggcggcccgacgaccccggcgggcctgatcgcggcggcggtggcgcacgcgttcgcgctgttcgtggcggtgtcggtgggcgcgaacatctcgggcgggcacgtgaacccggccgtgaccttcggcgccttcgtgggcggcaacatcaccctgttccgggggctcctgtactgggtggcgcagctgctggggtccaccgtggcgtgcttcctgctccgcttctcgacgggcgggcaggccacgggcaccttcgggctgacgggcgtgtcggtgtgggaggcgctggtgctggagatcgtgatgaccttcgggctggtgtacacggtgtacgccacggcggtggacccgaagaagggcagcctgggcaccatcgcccccatcgccatcggcttcatcgtgggggccaacatcctggtgggcggcgccttcgacggcgcgtccatgaaccccgccgtgtccttcggccccgccctcgtcagctgggagtggggctaccagtgggtgtactgggtcggccccctcatcggcggcggcctcgccggcgtcatctacgagctgctcttcatctcccacacccacgagcagctcccctccaccgactactaaaagccgaagccgaccgacccaggggtgcgcagcgcagcgcagctagcatccagctctctctccccggcccgctcgccgccgtttagtttctctcgtgcacgtgcatgcatcgtagactgtctcaggccgccgctgcgccggcgccgctcgcatcgtttgcttttccttggaccagcagtcgtcgccgtcaggttgagctgcttgtaaccgttaattccggacccgtttgcttctgtaagatttgtgcatttgcctgtgagtattcaccggcccgcccg

SEQ ID NO: 21881 - DNA, 715 bp, Zea mays
  Clone ID: LIB3355-009-B4_FLI
cgttcaggatccacatcttcccgagcgagttcttggttggcctcttcctcttcggaccacctccaaggctcttggtgtagcttgccactctcaccaatcaagttttcatgtctgatctcgacattcagatcccaactgccttcgatcccttcgctgaggccaatgctggggactctggtgcagcagcagggtcaaaggactacgttcacgtgcgcatccagcagcgtaatggtcgcaagagcctgaccaccgtccagggattgaagaaggagttcagctacagcaagatcctcaaagatctcaagaaagagttctgctgcaatggtacagtggtccaggacccagaacttggacaggtcattcagctccagggtgatcagaggaagaacgtctcgaatttcctcgtccaggccggcattgtgaagaaggagcacatcaagattcatggtttctgagcaaccgccgggtccatatcaaaccaaccctgcatgcagggcatcttattatatataatatctgaggtggagcatatctatctggctgtgtactgcaagcaggcctagtacgccgcctgcgcgttcctcctattacacatataggcccctccctgcgtgtatgcttgttaccgtcgtgtcgaaccttgtactacgaggctccatcgaacatcgatggcttgcttctttatcagaacatgtttgaataaacgctatttggt

SEQ ID NO: 21882 - DNA, 814 bp, Zea mays
  Clone ID: LIB3355-009-B8_FLI
ggtgcccacccagcgtgcaacctaggcgagaaccgcctccccctccgctccttccagctcgctctgtaatctgcatcagcctcgcccgccgccgtcgccgccatggggaggggaaagttcaaggggaagcccacaggccgccgcaacttctccacacccgaggagatcgctgctggtacttcaggtcggccacgcacctttaagaagaaggaggaagaggaagatgaggaagaggtagaaagagaagagtctgaggaagaatctgaagaggattctgatgaaaagactaaacataaaggcactgagggtattattcagattgaaaatccaaacttggtgaaagccaagaatataaaggccaaggaagttgattttggcaagacaactgaactctcaaggcgtgaaagagaggagcttgagaaacaaaaagctcatgaacgttatatgaagcttcaggagcaaggaaaaacagaacaagcacgaaaagatttggaacgtcttgctttaataagacaacaaagggctgatgcggcgaagaaacgcgaagaggagaaagctgccaaggagcagaggaagtccgaagcacggaagtaactgcaacagtcatggaccaagagtccacgaagtgacgaaggcacgatctgcgtcgattggatatttgtttctaatgcaccagctaccttttcatagacccggcctctattctgtattcccataaaaatatgcattgacagttgacaccagtctcgtggtcgtggtttcctgtaaacttgagcttgacaaaactgaaaagtagtaaagatcagcttgcaag

SEQ ID NO: 21883 - DNA, 826 bp, Zea mays; identical to SEQ ID NO: 21835
  Clone ID: LIB3355-010-D6_FLI

SEQ ID NO: 21884 - DNA, 607 bp, Zea mays
  Clone ID: LIB3355-010-F3_FLI
cccagctggggccctgagctgagagcagagcagggagcgaaactttgcgctgagattgagctgctcctacttggaaggcggcggcgtcggcaatggggtcggagacgttcgtggagatcctgctggccatcctgctgccgccggtcggcgtcttcctccgctacggcatcggggttgagttctggatctgcctgctgctcaccatcctgggatacatcccgggcatcatctacgccgtctacgtcctcgtcgcgtgaaagcacaacatggtgtggtaggtatgacgacgatggtgaccgtccgcccgcccgccgggagctggaatatatgagacccagacccagtgcttctgatccatccattccatgcatgcagtgatgcaggcatacgtacgtttagcccatgctgtatgtttgtgtcttgctttagttagctttagctagctgctgcagcttagcttctctcagctcgtctaccgatccgttttgctgtgcccatggacatggatgggaagaaggaaccgtagcttgtatgcaagtgtgtactagagtccagagtttctactctgctactgattctgaatccagacatgttttctgagatcttc

SEQ ID NO: 21885 - DNA, 432 bp, Zea mays
  Clone ID: LIB3355-011-A5_FLI
gaggaggaggagcgtgcacggagacgcgaggaggaagaaagagagagggaggaggaagaagaacggcggagggaggaggaagaaggtggaggcggacgtggtgacgagccagagagggaggaagaaggcggtgacaagccgccataccggttgtccaagaaactgaagaaacgctaccatgcacgtgccggtgtgttcagcaggagtggctgagtgagcagccgagcagagctggcctctgctccgtacaaataaacaggtggcctcgtacagatggccaattgccacatcaccaccactcgtacagagtaccacctgccagtcggctatgtatgtgtgttcgttgtgtcgtttgttaagctttgctgcatgctgagtttagattccgcttgtataaaacgtaccctaaataagcagacaagttttcaggct

SEQ ID NO: 21886 - DNA, 1252 bp, Zea mays
  Clone ID: LIB3355-011-B1_FLI
gcgactttatttcaagaagacagaagaagggagagtcgtactgaggtgtaagaatggcgagtgcacaggcagtggggcaaggagaacgaggccacttcgttctgaagagcggacacaccattccggccgttggtctaggcacttggagggccggctcagataccgctcactctgttcggaccgccatcgccgaggctggatataggcacgtggacacagccgctcaatacggagtagagaaagaggtcggtagaggacttaaagctgcgatggagggcgggatcaacaggaaagatttgtttgtgacgtcgaagctatggtgcaccgagctggctcctgatagggttcgaccatcactccagaaaacactcaaggacttgcagctggattacctggatctctaccttatccactggcccttcaggctgaaagacggggcgcacatgcccccggaagccggggaggtgctggagttcgacatggaaggggtgtggagggagatggaaggcctcgtgaaagacgggctcgtcaaggatataggtgtctgcaattacacggtcgccaagctcaaccgcctgatgcggtcagcgaatgttccaccggcagtgtgccagatggaaatgcaccctgggtggaagaacgacaggatctttgaggcctgcaagaagcatgggatccatgttaccgcttactctccgctgggttcttcagagaagaacctagcgcacgacccgctcgtcgaaaaggtagccaacaaactggacaagaccccggggcaggtgctcgtcaggtgggcgctccagagggggacaagcgtcatccctaaatcgaccagggacgaaaggatcaaagagaacatccaggtgttcgggtgggagatccctgaggacgacttcagggccctgtgcggcatcaaagatgagaagcgcgtgctgaccggagaggagctcttcgtgaacaagacccacgggccgtacaagagcgcaaccgaggtgtgggaccacgaggactgagctgagctgccgtgccgccggatgcctcccactcccacctgatgaaccagaataaaggataccgacgcacctgtcagtcacctccttccccgtgccttgtgagagcggcagcctctcgcacagggaagatgctctgtgagagcagcagcctcgcacgagaaagatgtagaagagagtgtgcgcgcaacacactcatgtactgtacgatagactgaataataaagaagaaaacgatccac

SEQ ID NO: 21887 - DNA, 720 bp, Zea mays
  Clone ID: LIB3355-011-G3_FLI
gcgcccgttcaggatccacatcttcccgagcgagttcttggttggcctcttcctcttcggaccacctccaaggctcttggtgtagcttgccactctcaccaatcaagttttcatgtctgatctcgacattcagatcccaactgccttcgatcccttcgctgaggccaatgctggggactctggtgcagcagcagggtcaaaggactacgttcacgtgcgcatccagcagcgtaatggtcgcaagagcctgaccaccgtccagggattgaagaaggagttcagctacagcaagatcctcaaagatctcaagaaagagttctgctgcaatggtacagtggtccaggacccagaacttggacaggtcattcagctccagggtgatcagaggaagaacgtctcgaatttcctcgtccaggccggcattgtgaagaaggagcacatcaagattcatggtttctgagcaaccgccgggtccatatcaaaccaaccctgcatgcagggcatcttattatatataatatctgaggtggagcatatctatctggctgtgtactgcaagcaggcctagtacgccgcctgcgcgttcctcctattacacatataggcccctccctgcgtgtatgcttgttaccgtcgtgtcgaaccttgtactacgaggctccatcgaacatcgatggcttgcttctttatcagaacatgtttgaataaacgctatttggt

SEQ ID NO: 21888 - DNA, 1431 bp, Zea mays
  Clone ID: LIB3355-011-G9_FLI
ggcatccctccggaccagcagcggctcatttttgctggcaagcagctcgaggacgggcgcacgctggccgactacaacattcagaaggagagcaccctccacttggtgttgcgtctcaggggcggcatgcagatcttcgtgaagactctgactggcaagactatcacccttgaggtcgagtcttctgataccattgacaatgtcaaggccaagatccaggacaaggagggcatccctccagaccagcagcggctcatttttgccggcaagcagctcgaggacgggcgcacgcttgccgactacaacattcagaaggagagcaccctccacttggtgctgcgtctcaggggtggcatgcagatcttcgtgaagacacttactggcaagacgatcacccttgaggtggagtcctcggacaccatcgacaatgtcaaggccaagatccaggacaaggagggcattccaccggaccagcagcggctcatctttgctggcaagcagctggaggatggccgtacccttgcagattacaacatccagaaggagagcaccctccacttggtgctgcgtctcaggggtggcatgcagatcttcgtgaagactcttactggcaagacgatcacccttgaggtggagtcctcagacaccattgacaacgtcaaggccaagatccaggacaaggagggcattccaccggaccagcagcggctgatcttcgccggcaagcagctggaggatggtcgcaccttggctgactacaacatccagaaggagagcaccctccacttggtgctccgcctcaggggtggcatgcagatctttgtgaagacattgactggcaagaccatcaccttggaggtggagtcgtctgacacaatcgataatgtcaaagccaagatccaggacaaggagggcattccaccggaccagcagcgcctgatctttgctggcaagcagctggaggatggccgtaccctcgccgactacaacatccagaaggagagcaccctccacctggtgctccgcttgcgaggtggtatgcagatctttgtgaagaccttgactggcaagaccataaccctggaggttgagagctccgacaccatcgacaacgtgaaggcgaagatccaggacaaagagggcatccccccagaccagcagcgtctgatcttcgccggcaagcagctggaggatggccgcaccctagcagactacaacatccagaaggagagcactctccacctggtgctccgcctccgcggtggtcagtaagccatggttcatttaagctgctgctgtacctgggtatctgcgtcgtctggtgccctctggtgtacctctatatggatgtcgtcgtctaataaacatctgtggtttgtgtgtcatgaatcgtggttgtggcttcgttggtttaatggacctgttgtgtcc

SEQ ID NO: 21889 - DNA, 610 bp, Zea mays
  Clone ID: LIB3355-012-B1_FLI
cgcacctcggtgacctagctagttcaggcgacgatatggcgtcaggtcaggaaagcaggaaggagctggaccgcaaggcccgcgagggcgagaccgtcgtccccggcgggaccggcggcaagagcgtcgaggcccaggagcacctcgccgaagggcgcagccgcggaggccagactcgcagggagcagctggggcagcaggggtacagcgagatggggaagaagggcggtctgagcaccacggacgagtccggcggcgagcgcgccgccagggagggcgtcagcatcgacgagtccaagttcaccaagtagtcctatcgcgtgcgtgcgtacgcagcgttcgtagctgtctgcgtagtgtaccttggccgtagctagtgctactctctactttggagtagctgaatgataataatgtagctagcagcatgcatgtaggcgatcatacatacgtacgtacacaggtacgtgtgtgtgatcatgtatgcttccagaagggtatcctagcttaatcagtcacgtcgtcaagtcgtcaatatggcaggttcgcgtcagggctttgtagtttgatagcctgtttcacgactcctcaataatcaagtagtgtaatg

SEQ ID NO: 21890 - DNA, 558 bp, Zea mays
  Clone ID: LIB3355-012-C7_FLI
gagaggaagagcgcgcggagagcgagagcccgggagaaacagcggccggcggcaaaatggtgcagcggctcacctaccggaagcgccacagctacgccacaaaatccaatcagacccgcgtggtcaagacccctggtgggaggcttgtgtaccagtacaccaagaagcgcgcgagcggaccgaaatgcccggtcaccgggaagaagatccaaggaattccacacctgagacctgctgagtacaagaggtctaggttgccaaggaaccgcaggactgtgaaccgtccatatggtggtgttctgtctggtaccgcagtcagagagaggatcatccgtgcctttttggtcgaggagcagaagatcgtgaagaaggttttgaagatccaaaagaccaaggataaggcctccaagaactaggcgatataggcatcttccacaatgttcaagtcccttagatgatatggtttaaattttgagcggaagttgcggatccttttatttttttaaaatctcggtggaatgtttttcactcgtctatgtggatgtcagatattttgct

SEQ ID NO: 21891 - DNA, 1102 bp, Zea mays
  Clone ID: LIB3355-012-E1_FLI
caaggctaggcacaagcgaaccaaacccatggcgtccgacggcagcggcgtggtgacggtgtacggcagcaacggcgcggagctgctggagccgtccaagcagcccaagtcggcgactttctccgtcaaggtggggctggcgcagatgctccggggcggggtcatcatggacgtggtgaccccggagcaggcgcgcctcgcggaggaggccggcgcgtgcgccgtgatggcgctggagcgggtccccgccgacatccgcgcgcagggcggcgtggcgcgcatgtcggacccgggcctcatccgcgacatcaagcgcgccgtcaccatcccggtcatggccaaggcccgcatcgggcacttcgtggaggcccagatcctggaggccctgggcgtcgactacgtggacgagagcgaggtgctgacccccgccgacgacgcgcaccacatcaacaagcacaacttccgcgtccccttcgtctgcggctgccgcgacctcggcgaggcgctccgcagggtgcgcgagggcgccgccatgatccgcaccaagggggaggccggcacgggcaacgtcgtcgaggccgtgcgccacgtgcgctccgtcatgggcgacgtccgcgcgctccgcagcatggacgacgacgaggtcttcgcctacgccaagcgcatcgccgcgccctacgacctcgtcatgcagaccaagcagctgggccgcctccccgtcgtgcagttcgccgcggggggtgtcgccacgcccgccgacgccgcgctcatgatgcagctcggatgcgacggcgtcttcgtcggctcgggcatcttcaagagcggcgaccccgcgcgccgcgcccgcgccatcgtccaggcagtcacccactacagcgaccccaccatcctggccgacgtcagcacggggctcggggaggccatggtcggcatcaacctcaacgacccaaaggtggaacgatacgccgccagatccgagtgaaccctttctttccgtagtcgtctccatccatccatctgccttggattgcatttccgtcgtttcatgtctctcaatcagtaataatggaatgaatgaaatggtaagaaacaaagctatggt

SEQ ID NO: 21892 - DNA, 540 bp, Zea mays
  Clone ID: LIB3355-012-F10_FLI
gttttggcctcgccgcgcacgcctcctgaagcttctagacgttcgaggaggaggaggggaggctcccgccgccgccgccgcagccatggcgtccaccaaggtgcagcgtatcatgacccagcccatctggttggcgaatccttggtgggcgtgcgcggcggcagaacctcatcttccgtttcctccagagcaaagcgcgcatccagatctggctcttcgagcagaaggacctccggattgagggtcgcatcatcggattcgatgagtacatgaacttggtcctcgaagatgctgaggaaatcaacgtcaagaaaaacactaggaagacactgggccggatactcctcaaaggtgacaacataactttgatgatgaacagtggcaagtgaaagttcttatggcaggaacgatgtttggtgctcgcgttgagtatttctggcacgttgtactccatccattcagacttacatgtacctgctgttaatgacctgagtaaaattatgctagatgctggccacttgtgtgtgccatattggcatc

SEQ ID NO: 21893 - DNA, 871 bp, Zea mays
  Clone ID: LIB3355-012-G11_FLI
gggagctcgaggcggcggaggaaggcgttcgccacagtcgctgatttccctggggaagagatgggtctctcctttgggaagctgttcagccgcctcttcgccaagaaggagatgaggattctcatggtcgggctcgatgccgccggtaagaccaccatcctctacaagctcaagctcggcgagatcgtcaccaccatccccactatcggattcaatgttgaaactgttgagtataagaacattagcttcactgtttgggatgttggtggccaggacaagatcaggcccctgtggaggcactactttcagaacacacagggacttatttttgttgtagacagcaacgacagggaacgtgttgttgaggctagagatgagctccacaggatgctgaatgaggatgagctgcgtgacgctgtgctgcttgtatttgcaaacaaacaagatcttcccaatgctatgaatgctgctgaaattactgacaagcttggtctgcattccctgcgacagcggcactggtacatccagagcacttgtgctacatctggtgaagggttgtatgaggggcttgactggctttccagcaacatctccagcaagtcttgaagcttttcggcagggctcctagcgagaggatgtctgaacaacttatggctgctttttttttacatattattactaagacacaagctacagcagatatagtacttgtgaaaaaaagaaacttctgagctcttttgagggattgatactagattggattgtgtttttgtttttgggtcgataccatcgcctgttcggttccacaaaattgactgtcaactatatttacctatgttcggagattgtatggtaaattaaattgacatgc

SEQ ID NO: 21894 - DNA, 1064 bp, Zea mays
  Clone ID: LIB3355-013-H11_FLI
gccgcgaccaacagcgcctcgccgtcggcctcctcctcctcgtcgctcgtctcggtggaggaggcccccgagaagatggcccacgggtacctctccgacgggctcatgggcagggcggcgcaggagaggaagaagggcgttccatggacggaggacgagcacaggcgattcctggcgggcctggagaagctcgggaagggcgactggcgaggcatctcccggcacttcgtgacgacgcggaccccgacgcaggtggccagccacgcccagaagtacttcctccggcagagcagcctgacgcacaagaagcgcaggtccagcctcttcgacgtggtggagaacgccgagagggcggcgacgagctccatcaagggcatggagcgcctgcggctcaaggacgccatcacgaccgcgaccgcgactggctccgcagaacccggaaccgggacgacggcacagctcccgccggccctgtcgctcggcgtcggcaggccaccagcgaggcccgaccacgccgcgctgcctccgagcagcctgctgtccctgcagctgccgcggtgctcggcgggaattggccgcacggcgccgagcctggccctggcgccgccgaaacacagccacccttcttcgtcgctgacggcggcaaaggctggtggcctggcgccggacctggagctgaagatctcgaccgcccggcagagcgagcaccagcagcaggtccagatggggccatcgctgccgccgccgccgccgccgccgcagaggacgccctttctggggaccatcagggtcacatgacatgaccggcaaagacggcggcggttagtagggaatatcctgctggtaggagaagagcttttgcccatctgaagctggagaaggttgcttcaaaagataggacggggtgggaaaactggaaagaaggaagcttttggcagcgtgtgcgtgtgtgtgtgttgctggcacctggcagtggcagccgagacgacgatggcgtcgtgtatcatgtgggtgttgtgtatatcatatcatcatcatccgaaagatggaaactttactggcct

SEQ ID NO: 21895 - DNA, 700 bp, Zea mays
  Clone ID: LIB3355-015-E10_FLI
aagtgggagacccgcgagaggctgccgtgtagggactagggaccgtagagtaagcgacagcgaaggagggagagggggatggccgggatcgggccgatcaggcaggactgggagccggtggttgtgcggaagaaggcacccaccgccgctgccaagaaggatgagaaggccgtcaacgccgcgcgccgctccggcgcggagatcgagaccatgaagaagttcaacgctggtatgaacaaggcggcgtccagcggcacatccctcaacaccaagcgcctcgacgacgacacagagaacctcgcccatgagcgagttccaagtgacctgaagaaaaatctcatgcaagcaaggctcgataagaagttgacccaggcacagcttgctcagttccattgatagctgggaagtagcttgatccttggttggcctctttatgagatgaggatatggtgttcattgcagatgatcaatgagaagccacaggtgatccaggagtatgagtcaggcaaggcaattcccaaccagcagatcattggcaagctcgagagggccctgggaacgaagctgcgtggcaagaaataaccaggagcatcatagcgaagacaaggcaaactgtctgcttattatttgctatgtttggtatctcaagtcatgcggactgtttgtgttggtacaagagtgaattaactgtgttctcctg

SEQ ID NO: 21896 - DNA, 696 bp, Zea mays
  Clone ID: LIB3355-015-H11_FLI
ctcaccgatagcaagtagcgccgccgacgtttcgagagcagagtatccaagctagccaagcgcgcacctcggtgacctagctagttcaggcgacgatatggcgtcaggtcaggaaagcaggaaggagctggaccgcaaggcccgcgagggcgagaccgtcgtccccggcgggaccggcggcaagagcgtcgaggcccaggagcacctcgccgaagggcgcagccgcggaggccagactcgcagggagcagctggggcagcaggggtacagcgagatggggaagaagggcggtctgagcaccacggacgagtccggcggcgagcgcgccgccagggagggcgtcagcatcgacgagtccaagttcaccaagtagtcctatcgcgtgcgtgcgtacgcagcgttcgtagctgtctgcgtagtgtaccttggccgtagctagtgctactctctactttggagtagctgaatgataataatgtagctagcagcatgcatgtaggcgatcatacatacgtacgtacacaggtacgtgtgtgtgatcatgtatgcttccagaagggtatcctagcttaatcagtcacgtcgtcaagtcgtcaatatggcaggttcgcgtcagggctttgtagtttgatagcctgtttcacgactcctcaataatcaagtagtgtaatgaaagtttggcggttccttgttatt

SEQ ID NO: 21897 - DNA, 715 bp, Zea mays; identical to SEQ ID NO: 13498
  Clone ID: LIB3355-016-B3_FLI

SEQ ID NO: 21898 - DNA, 388 bp, Zea mays
  Clone ID: LIB3355-019-A2_FLI
caggactccttcaccaacgagacacaggactatgtgccgtctcatgtgccgcagaggtcgccgtctctggaggacgatccgtatttctcctaccccaacttgttctcggcgccaaaaccttgaaggcggaaactagtggcctgtaactgctagtagtagtcctattatgtcttggtcttcgctgttgcctcggaatttctgtgtgttgctgagtttggtacataacggtacaaaaggagactactgggttattacttggctacgaaacctgtctagtttgagtctctgtaaactgtacatgtacggtgtctgtatcagttttctgaaacatttctgcagttctacacgtaagtaatgccagatcatctagtttggttgggctgggccc

SEQ ID NO: 21899 - DNA, 745 bp, Zea mays
  Clone ID: LIB3355-019-C11_FLI
gtaaaagcaagcaactgttcttcagttggttcttcatggctgtcaaccttggagtgttcatctccggcactgttcttgtctggatacagcaaaatgtcgcttggtctcttggattcggcatctcctcgatatgccttgttatcgccgcagttgcctttttggttggaacaccgctttacagggttcaacttccaactgggagcccactcaagagtatagtcatggtgtttgttgcctcttataagaagagaggagtggcggttcctgctgatagcacactgttgtttgaagggaatgaatcaagcagcattgtgccgaacaaaattgaacacactgacgaattcaggtgcttagataaggctgctgtcgttgtagaggaccaagagatgaaggacagccatcgcccatggctattatgtacggtaacccaggtggaggaagtgaagattctgatccggatgcttccgatatggttcacctgtgtcttctattcggctgcaatgagccagactgctaccactttcgtccagcaggggaacgcgatgaacactaagatcgggtccttctcggtgccggcggcctccatgaactccgccgaggtgatcttcatgctcgtctgggttgtgttccaggacagcgtcgtcatcccgatagccaggaggtacacggggaacccgatggggctgacgctgctgcagcggatgggcgtcgggcggttgctggcgatcccatctctggcggccgc

SEQ ID NO: 21900 - DNA, 162 bp, Zea mays
  Clone ID: LIB3355-019-E3_FLI
gtttatcccttctagtctattacagaaatgttgttcggagctgagtctattataaacatcttggtctgagtttattgttgagtggtgccagtttttttcaatatacatttatcttaaaaacagcggtactgatgtttttttgtctaaagttaatgagtttgc

SEQ ID NO: 21901 - DNA, 794 bp, Zea mays
  Clone ID: LIB3355-020-C6_FLI
cgcacctcaagaagaagctcgccaagacgggcgccagggaaagcggtgccagcgccaagacgacgaagaagagcgatagggccgcggcgcccaaggggcagtgggagcgacggctgcagacgaacatccacaccgcacgccaggcgctccgggaggcgctgtccatggacgacactgcgccgccggcaatcaagccggagccgctgccgctgccgctgccgctggggcagctgccggcgccagccagccaggcgatgtacgcttccagcatcgataacatagcgcgtctgctggagggctggatgcgtcccagcgtcagtgggaatgcgtcagctgagtccatgtcctccttctcggcgttctccggtggtggcgacggcgcgtcggcaagccacatcggcacggcgcacacgccggaggggttcaccggcacgagaaaggaagagggcgcggggccggggccgtcgtcattaccaatgttcgagaactggctgctcgatgacggcatggggagcggtgatgcgtccctcatctgcgtcccgctggcggacccgtgcgagttcttttagactgaactggagggggataaggaaaaacagaataaaagtgctagattggaagaagaagaagaaagaagccaggaactcgattccctgataatatgatatagatcgacacagtgcaatgctggtcttgatatatagtatagttgttcaatccagttccttgcttcttatttctatgaatttggattttttttctattctcttttttgtttacaaaattaaggtttg

SEQ ID NO: 21902 - DNA, 804 bp, Zea mays
  Clone ID: LIB3355-021-C6_FLI
ggagggcatcccacccgaccagcagcgcctcatcttcgccggcaagcagctggaggatggccgcaccctggcggattacaacatccagaaggagagcactctccacctggtgctccgcctcaggggtggcatgcagatttttgtgaagacattgactggcaagaccatcaccttggaggtggagagctctgacaccattgacaatgtgaaggccaagatccaggacaaggagggcattcccccagaccagcagcgtctgatctttgcgggcaagcagctggaggatggccgcactctcgcggactacaacatccagaaggagagcacccttcaccttgttctccgcctcagaggtggtatgcagatctttgtaaagaccctgactggaaaaaccataaccctggaggttgagagctcggacaccatcgacaatgtgaaggcgaagatccaggacaaggagggcatccccccggaccagcagcgtctgatcttcgccggcaaacagctggaggatggccgcaccctagcagactacaacatccaaaaggagagcaccctccaccttgtgctccgtctccgtggtggtcagtaagtcatgggtcgtttaagctgccgatgtgcctgcgtcgtctggtgccctctctccatatggaggttgtcaaagtatctgctgttcgtgtcatgagtcgtgtcagtgttggtttaataatggaccggttgtgttgtgtgtgcgtactacccagaactatgacaaatcatgaataagtttgatgtttgaaattaaagcctgtgctcattatgttc

SEQ ID NO: 21903 - DNA, 895 bp, Zea mays
  Clone ID: LIB3355-022-D1_FLI
tcgctggtggccagtgccgctgcattgccctttccagcatcggccatggcacccacttccccaacacctagggccaagcctcgccaccgtgccttgtcttggagctccgaagaatgagcataggcttcccctgcaagccccaccgcgtcgccgctcctgccagccatgggcgtacgccccctcgagctcgtccggcgagtcatgccttgtccacgtcgagctcctcccctggaagctgtctctgagcccgaccgcaagctgtcatgtgtcctgctccatcttccagccgagtccctctctgctccagccatggtggccgtcagcttggagctctgtgatgactccatgccgcgcccctcttcaagctggcagctccacctcaaaattcgttgcgcgaccttgcctctccctcggctcgcatgcttgatctccctgctccttccgtcgccgaccttgggagtctagttcctcgacgcgctccacctattcgctgtttgccccacccagtggatagcggcgctcgccactccagacatagatatccatgcctcgtagttcgccctcaggtggcgtcgttgatctcgtctctgccatcgaattcgccttacatcttcgctcccattgtcgcagagaccccaccagctctgcacgccatccacgctttgtgttcgcatcggcatcccatgaatgtgtggtgaagacagttcgagcacaacccctgccaagtgttcgatggaaagtctgaaccaagattcatcgtcgatttgtgattatcaaattgttttggtcgtggtaagccgatgggttatgtaacaccccaggtgttaccatggccatggcacatctatgcactaatgactgtgatcatgtggaagaaacttgaggaggagaacat

SEQ ID NO: 21904 - DNA, 1059 bp, Zea mays
  Clone ID: LIB3355-022-E4_FLI
cgcgactcgccgcagaaagagagccgaggacggcagcgacctctcgctggcgtcggatatggatctcgacgccgacgcgcagcgcgccgcagtacgttcttttctgacttggtcatctgaggaatggacgcatgcaatgaatgcttcggaggataagctgaaagcagtgtcagaggaacttggacatgagatccgggttttttcaagtgagaactttgctctacaaccgagcaagctgcctagtgcagatcatgaggaaggtgacgacttttatgagcttcagcctgctgattactacaacttgatttcaaacaggatgggagagctatctaaaatgctaaagactcgcaagatgcgggaagcagaacttgctgctcagcgagcaaagcgaacaaaggcagtaatgagggtgcgattccctgatggctacatacttgaggctgactttcttccatcagagaggattcatagtctagtggacctgctcatgaaagtacttgctagaccagatctgccattctatctctatacagtacctccaaagaagcgaatactggacacatcacaggacttctatacatctggttttgttcctggagctaatgttcatttttcttatgatctgcccgaaggtttgttgttaaatgcagatgatctaaaagcaggacccttcctccgtgaaggaattctaagtttggatggattgtcacttctgctgaaacctgctagtcaacctgatgattctagaatgaactcttctactcatcaatctggtgcatctcaatctgaccctgtaccaacaacaaataagaagcctggcagaccaaagtggctgaaaaggtgataccactccaggcgtcagtacaaggattggaccctctgcccactgaagctgttgggggcattataattggggccccacctttttgtaggtgggagacaagtagcatgtaaacttgaatgtgttgctgactcaaacagaacagtgctctgctctggctaagcacctggccatcttacacatcgtgtaagccccatagtaacttgaatgtgttacac

SEQ ID NO: 21905 - DNA, 523 bp, Zea mays
  Clone ID: LIB3355-023-E5_FLI
tttctcaaaaatacatactccaacggaagcatggggcgtaatgtggtagcaggcagcgtgagcgcttctctggttttaaggtaagtcatcttcaatttttttcacagtttggctgtggcgcgtcactcaaactcagtgacatgctgcgcagtgcaaagaaactgcgacgtgagagggagatgttctgtaggcagatgcagaagcggctgacgatccaggaacgggagagtttgtacaccaagtggggagtctcactgtcctccaagaggaggcggctgcaggtcgctcggcgcctttggacggagaccaaggatctggagcatgttagggagagcgcgtccctcgtggccagactgatcgtgctcctggagcctgggaaggcgctgagggagatgtttggtctgagcttcgcgccgcagcagttcacccggagatcgcacaatagttggcgatatggccgttcttctctagactgactgaactcgaaaaactcagctgagggggaaaaaacgttccgtccttt

SEQ ID NO: 21906 - DNA, 1274 bp, Zea mays
  Clone ID: LIB3355-024-B4_FLI
gcggaggggaggcaggggagcccccgcggcgccgctccgctcgaaatccccaaaaaggtaagatcaaatcaaatcagatctctccacccccagcccatccatggcgatcgtgtacgccctggtcgcgcggggcacggtggtgctggccgagttcgccgccgtctcgggcaacgccggcgccgtggcccgtcggatcctcgagaagctgccgcccgacgccgagtccaggctgtgcttcgcgcaggaccggtacatcttccacgtcctccgatccgacgccgccggcatcaccttcctctgtatggccaacgacaccttcggaagaaggatcccctttctctacctggaggacatccaaatgaggttcatgaaaaactacggcagagtcgcccactctgcgctggcttacgccatgaacgatgagttctccagagtgctccatcagcaaatggagttcttctccagcaacccaagcgccgacacactcaaccgtctccgtggagaagtcagcgagatacacaccgtcatggtcgacaacatagagaaaattcttgacagaggcgatcgcatatcgctccttgtcgacaagacatccaccatgcaagacagcgcctttcacttccgcaagcaatccaagaggctccgtagagctctttggatgaagaatgccaagcttctagttgtgttgacagttgtcatagtagtgctgctctacttgatcatttctgctttctgtggaggcctttccttgtcatcatgcagatcatgagtaacacaccagatggctttgcccctcccttaaatggaggggtaggacaccatggaatgatgcctactgtgttgagcaccggagcttccggaggcaaaaaaaaaagggggtatcgatggataccactgtggtttgcagtaactgggatcagattgtacagtggacgagtggagttggccgttgctgtttttgatgtcgccatggttgtgggtgaactcaattcttaaatcgtggtgtgcttagcatctttcttggcttgtcaaactgtcgttgtgacttgtgagggatgggactagtgagttgggttttgtagagttacatggttatcaatgtgcagacatatatgtatgccgcgatgagtgttagtacatgcctactatggttatcggtgtacgaaagtgtcttagctgctgttgttttgagtctgccatggatggatgtggttgtgttttgaaggaactgccgttgtggccatgtgatgaataaaagcacgtaaagcaagcag

SEQ ID NO: 21907 - DNA, 686 bp, Zea mays
  Clone ID: LIB3355-024-E9_FLI
ctcaccgatagcaagtagcgccgccgacgtttcgagagcagagtatccaagctagccaagcgcgcacctcggtgacctagctagttcaggcgacgatatggcgtcaggtcaggaaagcaggaaggagctggaccgcaaggcccgcgagggcgagaccgtcgtccccggcgggaccggcggcaagagcgtcgaggcccaggagcacctcgccgaagggcgcagccgcggaggccagactcgcagggagcagctggggcagcaggggtacagcgagatggggaagaagggcggtctgagcaccacggacgagtccggcggcgagcgcgccgccagggagggcgtcagcatcgacgagtccaagttcaccaagtagtcctatcgcgtgcgtgcgtacgcagcgttcgtagctgtctgcgtagtgtaccttggccgtagctagtgctactctctactttggagtagctgaatgataataatgtagctagcagcatgcatgtaggcgatcatacatacgtacgtacacaggtacgtgtgtgtgatcatgtatgcttccagaagggtatcctagcttaatcagtcacgtcgtcaagtcgtcaatatggcaggttcgcgtcagggctttgtagtttgatagcctgtttcacgactcctcaataatcaagtagtgtaatgaaagtttggcggtt

SEQ ID NO: 21908 - DNA, 693 bp, Zea mays
  Clone ID: LIB3355-024-F2_FLI
ctcaccgatagcaagtagcgccgccgacgtttcgagagcagagtatccaagctagccaagcgcgcacctcggtgacctagctagttcaggcgacgatatggcgtcaggtcaggaaagcaggaaggagctggaccgcaaggcccgcgagggcgagatcgtcgtccccggcgggaccggcggcaagagcgtcgaggcccaggagcacctcgccgaagggcgcagccgcggaggccagactcgcagggagcagctggggcagcaggggtacagcgagatggggaagaagggcggtctgagcaccacggacgagtccggcggcgagcgcgccgccagggagggcgtcagcatcgacgagtccaagttcaccaagtagtcctatcgcgtgcgtgcgtacgcagcgttcgtagctgtctgcgtagtgtaccttggccgtagctagtgctactctctactttggagtagctgaatgataataatgtagctagcagcatgcatgtaggcgatcatacatacgtacgtacacaggtacgtgtgtgtgatcatgtatgcttccagaagggtatcctagcttaatcagtcacgtcgtcaagtcgtcaatatggcaggttcgcgtcagggctttgtagtttgatagcctgtttcacgactcctcaataatcaagtagtgtaatgaaagtttggcggttccttgtt

SEQ ID NO: 21909 - DNA, 825 bp, Zea mays
  Clone ID: LIB3355-028-A3_FLI
tccgtccgcaggagggctcggccaaggcggaaggcgcacacagcgaggcgacgccggtatcggacaccggcgttgaggagtggaaaggcgccccggctgccacggacgcggccaacggcgcgtcggggccggcgggctatactcacaaggtcaagtccgcggctgcgggcaccacggagtacggcaagcagctggcgagcacagtgtacgagaaggtcgccggcgtcggcaccgccgtggcgggcaaggtgcagcaggccacacagtcgcccagcacggcgacgccgggagccgacgcgcagcaggacacggacgccgccgcgacggccacccccggcgccggcgggcagtccaaaggaacgaccgtcacggggtacatcgccgagaagctccgtccgggcgacgaggaccgcgcgctcagcgaggcgatctccggcgccgtgcagcgccgcaaggaggacgtcgggggcacggtagcgcagcgcgtgccggcgccaggccaggtggtgaccaaagcgcgcgaggccgtcgcgtcgctcaccggcgggaagcgggtctcggagaccgtgcaacccaccacagcaacagggaaagatgtgaaggaagtctatgcggcggaggcgcctgtgatccatggggaggagatcggcggcccgaagctgaacaccaataccatgtgagctgctcatggagagcgcgggtgatctctgagtattgtgtcaggtttgtgtacacagtacacgtgaatggtgtggtttgcgctgtggagtagagtaggagctggaataataagcgtgctggttgcgttcgccgtggtgcgctttt

SEQ ID NO: 21910 - DNA, 339 bp, Zea mays
  Clone ID: LIB3355-028-F3_FLI
gcggacatctccgacttggcctgaaaaacttaacacaccaccaaatcaaagtctcagggctactacctgccatgccaacgagggagatcaagctctgaatcggtcggcctggggcctagtgattgtcacagcaggccgtggaggtcaaatcagaacatttcaaaactttggttttcctgtaagagtatagcatgaatatgaatacgtaagataatagtcactgccattcaggagtgtagtttgtgtatagataggagatagtgggtgagtttcacactatccagggattgggtctgattgttccttggcgtgcatgctagagatcagaatcttcatctg

SEQ ID NO: 21911 - DNA, 1332 bp, Zea mays
  Clone ID: LIB3355-028-F5_FLI
acaacagcctaaaagtgtgcatatattaagacacgtggatatggatgtatacattcacaaaaatcagatcagccaactaaagctcttacggccaggccatcatcccgttccgccgagtgagcacatcacatcagatcaaaatcggcgcgtccaagcgtggttccggcgtgtagctagtacacggggagacgagccgggagcccctggccacaagtctccccggcgagtcctccaccacaagctcgcccggcagcggcagctcactgattgctccagttgcgtgctcgcgcgcgcaagctcgtcctcctccatcgcagtcggtggccttatcttgttcgtccttgcctccctcgttgttgcgacttgcgagacgacaggacaggatagcgagctgggcctgggagtatagaccgcagacagagaggtggagcggccatgaagatccagtgcgacgcgtgcgagggcgcggctgccaccgtggtgtgctgcgccgacgaggccgcgctgtgcgcgcgctgcgacgtcgagatccacgccgccaacaagctcgccagcaagcaccagcgcctcccgctcgaggctctctccgccagcctcccgcgctgcgacgtctgccaggtacgtacatcaccagcgcattgcgcatgcgccacacgcggcacaaggcaggcaggcacgagctaacaacgaggccaccaccccgccccgcgcgcgctcgcaggagaaagcggcgttcatcttctgcgtggaggaccgggcgctcttctgccgggactgcgacgagcccatccacgtcccgggcacgctctccgggaaccaccagcgctacctcgccaccgacatccgcgtcggcttcgcctccgcttcgtcagcgtgcagtgacgcctgcgacgcccacgacgactccgaccaccacgccccgcccaaggccgccgtctcctccgcggcgcagcaggtgccctcgccgccgcagttcctgccacagggctgggccgtcgacgagctcctgcagttctccgactgcgagtccagcgacaaggcaagacgatagcgcaagctccggtccatgaccaacaacctgcctgcgtgcacccaccgtctcatgcatggtcttgtgtgtgtgtgtgttttgcagctgcacaaggagtccccgctcgggttcaaggagctggagtggttcaccgacatcgacctcttccacgagcagacgccgaaagccggcaggagattggctgaggtaccggagctttccggaacccaggccgcgaacgacgcggcgtactacaggccagccaaagccactgccactgccggcgccggggtgcgccagag

SEQ ID NO: 21912 - DNA, 841 bp, Zea mays
  Clone ID: LIB3355-028-G11_FLI
ccggtaccgactggttagttgtagagggtatgcggtgcgcacgtgcacgtgcgcgcaagtcgtctggaataaaaatgctctagtcgcagtcgcagcacacactgaattctctttagctagctaagagagggtagccacaccaagacaggatgcagacagcgaaggtgaaggcgaaggacatggtgagctcggcgaaggagaaggtgaaggaggggtcggcaaagatgcagggcaagacgggcgaggcgacggcggccacgcacggcgagaaggagatggccaaggaggcggcccgcgccaagaaggaccaggccaacgccgacaagcaccaggagaaggccgaccaccgagcggacgccgccactggccaccacggcacgcgcgtgcccctcaccggcccgcacggccaccacggcgctggcgcggccgtcgaccccgcgtacccgtcctccggcaacacgtacccggcgtcgggcaagtacatctaggtgactgcgtcggatgagcgaggccagggtcgtggtcgcacttgcgtttttgtgtacgtagcgaccgagaagatcgatcctggctgtacgcctgcagtaccggtaccgactggttagttgtagagggtatgcggtgcgcacgtgcacgtgcgcgcaagtcgtctggaataaaaatgctctagttgctgttaggttgcttaatttcagtgtagtcgttcgttcacgggcactgttgccctctatgtagtatgtttttttttttgtttttaatcgttttagtgtttgaccaagtacgcgtaatagatttgtaagttcgacaacgttttaagagttcaattcacgcaattcacgct

SEQ ID NO: 21913 - DNA, 670 bp, Zea mays
  Clone ID: LIB3355-029-C3_FLI
cttcctcttcggaccacctccaaggctcttggtgtagcttgccactctcaccattcaagttttcatgtctgatctcgacattcagatcccaactgccttcgatcccttcgctgaggccaatgctggggactctggtgcagcagcagggtcaaaggactacgttcacgtgcgcatccagcagcgtaatggtcgcaagagcctgaccaccgtccagggattgaagaaggagttcagctacagcaagatcctcaaagatctcaagaaagagttctgctgcaatggtacagtggcaggacccagaacttggacaggtcattcagctccagggtgatcagaggaagaacgtctcgaatttcctcgtccaggccggcattgtgaagaaggagcacatcaagattcatggtttctgagcaaccgccgggtccatatcaaaccaaccctgcatgcagggcatcttattatatataatatctgaggtggagcatatctatctggctgtgtactgcaagcaggcctagtacgccgcctgcgcgttcctcctattacacatataggcccctccctgcgtgtatgcttgttaccgtcgtgtcgaaccttgtactacgaggctccatcgaacatcgatggcttgcttctttatcagaacatgtttgaataaacgctatttggt

SEQ ID NO: 21914 - DNA, 857 bp, Zea mays
  Clone ID: LIB3355-030-C8_FLI
cgccaccaccacacgttcacggtagcgagagcttatcgtcgtcggcggcgaagatggtgtcgctgaagctgcagaagcggctcgccgcgagcgtcctcaagtgtgggaaaggcaaagtctggcttgaccccaatgaagtcagcgagatctccatggctaactcccgccagaacatccggaaattggttaaggatgggtttatcatcaggaagcctcagaaggttcactctaggtcccgtgcaagaagggcacatgaggccaagcagaagggaaggcactctggatacggcaagcgcaggggtaccagggaggctaggctccccaccaagattctgtggatgaggaggatgcgtgttctgaggcgcctgctccgcaagtaccgtgaggccaagaagattgacaagcacatgtatcatgacatgtacatgaaggtcaagggtaatatgtttaagaacaagagggtacttatggagagtatccacaagtccaaggctgagaaggccagagagaagacactttcagatcagtttgaggccaagcgtgcaaagagcaaggcaagccgtgagaggaagattgctaggagggaggaaaggctggcccagggcccaagagaaccaacagcacctgtcgcagccccagctccatctactggggtgccaaagaaagcaaagaagtgaagtatggaaacaaagctgtagctttttggtactatataagcatgactttggagcacctgaagtattttgctgttctatagtttcgtgtctcaatattctgagtcttgtatctctaccgttctgttggataatgcatgccgtaagagttgtttatggagcttttgttgttacaggacccct

SEQ ID NO: 21915 - DNA, 672 bp, Zea mays
  Clone ID: LIB3355-030-G11_FLI
gttggcttctcctccccctccggttcgggttcgggttcgtgaggttctccggggttcgggttcgtgggtgagcggatcgagatggcggcgtcggatgttgagtaccgctgcttcgtcggcggcctcgcctgggccacggacgaccactccctccacaacgccttcagcacctacggcgaggtcctcgagtccaagatcatcctcgatcgggagacgcagaggtcccgcggcttcggcttcgtcaccttctccacggaggaggcgatgcggaacgccatcgagggcatgaacggcaaggagctggacggccgcaacatcaccgtcaacgaggcccagtcccgcggcggccgtggaggcggcggcggtgggtacggtggtggccgtggaggcggcggctacggcggtggcgggcgccgtgatggcggtggcggctacggcggtggcggcggctacggtggcggcggcggctacggtggtggtggcggcggctacggcggtggcaaccgtggcggcggctacggcaactccgacgggaactggaggaactgagcggtggggcccgcgcggccaagttatcctgttcgctaccgtgatgtttaccctagtccagagggtttatcttcgttcgtgtcgtgtttgttgttgcccatctgtgtttttgattgcaaggtc

SEQ ID NO: 21916 - DNA, 678 bp, Zea mays
  Clone ID: LIB3355-030-H8_FLI
ccgaatctttcgccgtcccatcagcccagcaattcttcgctgttcgaggacccctcggtttcgaccgaagcccagcaagccgaccacacaccgctgccgttggttccgtcccaagagatgggcaagtcctggtcgctcatcagccacctccacaccgtcgccgggccaagcatcaccctgctgtaccctctgtacgcgtcggtgtgcgcgatggagagcccgtccaaggcggacgacgagcagtggctgtcatactggatcatacactccttcgtcaccctcctggagatgctcgccgagccgctcctccactgggtacccgtgtggtacccggccaaggtgctgttcgcggcgtggctggcgctgccgcagttcaagggcgcctccttcgtctacgagaagctcgtcagggaacagctccggaactaccgcgccagatacccgcgcaagggcgccgccgccgccgccgtcggcggcgacgacgacgaccataaggtgcacatagccaaggctgaggctgagcacgaccatgtgcagtgaaagcgtgtggagacgacgcaggagctgaccggagatcatcacaggaacttctgtagatctggtgttccaaggtgttcattcgatgtatcatcctacgtatctctgtaactcttgtggactgccggtgtcgcgtaatgt

SEQ ID NO: 21917 - DNA, 873 bp, Zea mays
  Clone ID: LIB3355-031-C10_FLI
gcctcgggtcaaaccctaagcagggagttgatttatccgctgcagccatgagtaagttgcagtctgagtctgtcaaggatgccatctcccagattgttggggatgccaaggagaagaataggaagttcactgagactgtggaacttcagattggtctgaagaattatgatccacagaaggacaagcgtttcagtggctctgttaagttgccccatatccctcgtcccaagatgaaggtgtgcatgcttggtgatgcccagcatgttgaggaggccgagaagatgggacttgactacatggatgttgaggctctcaagaaaatgaacaagaacaagaagcttgttaagaggcttgccaagaagtaccatgctttcttggcatcagaggccatcatcaagcagattccccgtctccttggtcctggtctcaacaaggcaggcaagttcccgaccctggttactcaccaggaatccctcgagtccaaggtgaacgagactaaggcaaccgtcaagttccagctcaagaaggttctttgcatgggtgttgccgttggcaacttggcgatggaggagaagcagatccagcagaacatccagatgagcgtcaacttccttgtttcccttctgaagaagaactggcagaatgtgagatgcctctacgtcaagagcaccatggggaagccatacagggtgttctaagtatgctcttttgtgaagtctgctaggttctggcaccgaggttttattgaattaaacttttgttaagagtatgtttttggacgatcctatatttcgtcctggcgctactatgtttcagaatggtggtactactataagtatcctggcgctttaagtattgcttgaaaggatcaat

SEQ ID NO: 21918 - DNA, 598 bp, Zea mays
  Clone ID: LIB3355-031-E5_FLI
tacactagtgcttttgctagctacttgtgcgagaagagagagcgcacggcgatagatatggcgcatagcaagcgcgaaatcaagcccgggagggcgcataccaaggtggccggcgacgacgagatgctgcggaccgggttcttcgacggcacgccgctggagggcggcaagatcgccgactcccagcccgtcgacctcttcgccgctgcccgccgcgtcgccgacgccccgtactcatcgcagcaggaaggaccacacgaggaggggaccaacaagaacgccgtcatcgcggagtcggagcccgtcgacctgcccgcgagcgcgcggggcgtggcggaggtgaaccgtgctgggccggaggagcagacaggccgcggtcggcagggcatggccgagcccaccgccggtggacgtcgcttgggattaggtcgcccggccccggcttaacgatccagatcaagcagtactcgactaccgccactacactacctgctctgctcgtgtcttgtttccagttttctttctctgtaagcggtgtagggtttgccaaacttttatgtacgaattatgaatatcaataaagtcgatctgctgctgc

SEQ ID NO: 21919 - DNA, 459 bp, Zea mays
  Clone ID: LIB3355-032-B6_FLI
ataaaacaaggaccgactggtctgaaaggtttcacacgtaccagcgcgcacgcacaatgtcgggagcacagggcgcgcacccggtcggccagacgacgccgacgacgtacgagtcggtgggcggcggggagaaccgcacgcgcacggacctgcggtcgcgggaggaccagggcgccatccagatcgagaaggtgcaggacaaggtcgacgatgccgcggggcgtggggtagaccagagcaccttcggcgccaagaaggagggccgcgacgacaaggccgatgccggggcaaccggcacaggcgcgtgattttgtgcccttccgcagtacctgagcgtgtgtgtaccatagctttgtgtccgctgcttggctgctctgtatgcgcgcgcgtggaatgtgtgaaacctttctgtaaaaatgcacttgttagattgaaataaaacaaggaccgactggtctg

SEQ ID NO: 21920 - DNA, 1493 bp, Zea mays
  Clone ID: LIB3355-034-H11_FLI
ctccggaccagcagcggctcatttttgctggcaagcagctcgaggacgggcgcacgctggccgactacaacattcagaaggagagcaccctccacttggtgttgcgtctcaggggcggcatgcagatcttcgtgaagactctgactggcaagactatcacccttgaggtcgagtcttctgataccattgacaatgtcaaggccaagatccaggacaaggagggcatccctccagaccagcagcggctcatttttgccggcaagcagctcgaggacgggcgcacgcttgccgactacaacattcagaaggagagcaccctccacttggtgctgcgtctcaggggtggcatgcagatcttcgtgaagacacttactggcaagacgatcacccttgaggtggagtcctcggacaccatcgacaatgtcaaggccaagatccaggacaaggagggcattccaccggaccagcagcggctcatctttgctggcaagcagctggaggatggccgtacccttgcagattacaacatccagaaggagagcaccctccacttggtgctgcgtctcaggggtggcatgcagatcttcgtgaagactcttactggcaagacgatcacccttgaggtggagtcctcagacaccattgacaacgtcaaggccaagatccaggacaaggagggcattccaccggaccagcagcggctgatcttcgccggcaagcagctggaggatggtcgcaccttggctgactacaacatccagaaggagagcaccctccacttggtgctccgcctcaggggtggcatgcagatctttgtgaagacattgactggcaagaccatcaccttggaggtggagtcgtctgacacaatcgataatgtcaaagccaagatccaggacaaggagggcattccaccggaccagcagcgcctgatctttgctggcaagcagctggaggatggccgtaccctcgccgactacaacatccagaaggagagcaccctccacctggtgctccgcttgcgaggtggtatgcagatctttgtgaagaccttgactggcaagaccataaccctggaggttgagagctccgacaccatcgacaacgtgaaggcgaagatccaggacaaagagggcatccccccagaccagcagcgtctgatcttcgccggcaagcagctggaggatggccgcaccctagcagactacaacatccagaaggagagcactctccacctggtgctccgcctccgcggtggtcagtaagccatggttcatttaagctgctgctgtacctgggtatctgcgtcgtctggtgccctctggtgtacctctatatggatgtcgtcgtctaataaacatctgtggtttgtgtgtcatgaatcgtggttgtggcttcgttggtttaatggacctgttgtgtcctctatgttgtacccaaaactcttctgcagcagtatggcttgaatccttatgaagtttgatatttgaact

SEQ ID NO: 21921 - DNA, 556 bp, Zea mays
  Clone ID: LIB3355-034-H7_FLI
gcttcgccctctcgctccagccgcttcacagcgccgccgctcgcctctccgaccgccgcgagaatgccgttcaagaggttcgtggagatcgggcgcgtggccctggtgaactacggcaaagactatggccgcctcgtcgtcatcgtcgatgtggtcgaccagaacagggcacttgtggacgcccctgatatggtcaggtgccagattaacttcaaacggctctcacttactgacatcaagaagctgattgtccagaagaggagggctgcgctcagtgactttgacaggttcaaggtcatgctggcaaggatcaagaggggtggtgctatcaggcaagagctcgccaagctgaagaaggcgtccacggcttaagtcccttttggtggatggcatgttagtttttggtttcatgttgcatcagcattttgttttgagtgttgtcaaagccagaattagtaatatgtttcatgtgtacccttttcaaacttcatcaagaatgggtgtgctctggatattttgtcgggaatgatatgaaatacttaagttagcttgcgac

SEQ ID NO: 21922 - DNA, 681 bp, Zea mays
  Clone ID: LIB3355-035-B3_FLI
cagacaacactcaccgatagcaagtagcgccgccgacgtttcgagagcagagtatccaagctagccaagcgcgcacctcggtgacctagctagttcaggcgacgatatggcgtcaggtcaggaaagcaggaaggagctggaccgcaaggcccgcgagggcgagaccgtcgtccccggcgggaccggcggcaagagcgtcgaggcccaggagcacctcgccgaagggcgcagccgcggaggccagactcgcagggagcagctggggcagcaggggtacagcgagatggggaagaagggcggtctgagcaccacggacgagtccggcggcgagcgcgccgccagggagggcgtcagcatcgacgagtccaagttcaccaagtagtcctatcgcgtgcgtgcgtacgcagcgttcgtagctgtctgcgtagtgtaccttggccgtagctagtgctactctctactttggagtagctgaatgataataatgtagctagcagcatgcatgtaggcgatcatacatacgtacgtacacaggtacgtgtgtgtgatcatgtatgcttccagaagggtatcctagcttaatcagtcacgtcgtcaagtcgtcaatatggcaggttcgcgtcagggctttgtagtttgatagcctgtttcacgactcctcaataatcaagtagtgtaatg

SEQ ID NO: 21923 - DNA, 608 bp, Zea mays
  Clone ID: LIB3355-036-E2_FLI
agtgtgtccgctccccctcagtcctagcggtagcgtgcgcgcgggagacgtagatggcggcttcggcggcggcggcggcgacaccggtggcgccgacagaggggacggtgatcgcgatccacagcctggaggagtggagcattcagatcgaggaggccaacagcgccaagaagctggtggtgattgacttcactgcaacatggtgtcctccgtgccgcgccatggctccaatttttgctgatatggccaagaagtccccaaatgttgttttcctgaaagttgatgtcgatgaaatgaagaccattgctgagcaattcagcgtagaggccatgccaacattcctgttcatgagggagggcgacgtcaaggacagggtcgttggcgcagcaaaggaagagctagcaaggaagcttgaactacacatggcctcgtagatcagtgatgccgtaatgtagtattcgcctaaataagaggacgcctcgcctcaactctgagaaaactagtgcttctgtgatggtaattcgtatgagagagtgccccctttggtggtacttcttcgtatgtagtattaactcctgtcttaatatgttgccctgcttgtgcttttc

SEQ ID NO: 21924 - DNA, 818 bp, Zea mays
  Clone ID: LIB3355-038-A8_FLI
ggttggttggctttataggcgtgtggtgcatataattaggtgcgcgaacccgtcggaggggcgcaagccagacagaagacagcccgtcagcccctctcgtttttcatccgccttcgcctccaaccgcgtgcgctccacgcctcctccaggaaagcgagagcttctgcataagaacaacaaatcaaaagcttgatcagctcggtgcctacaaaacctcaacaaccaagtttcatgtctgatctcgacgtccagcttccatctgcctttgatccgtttgctgaggcaaatgctgaggactctggtgctggtcctggaacgaaggattatgtgcatgtgcgcatccagcagcgcaacggcagaaagagtctgactacagtccagggtctgaagaaagagttcagctataacaagatcctcaaggatctgaagaaggaattctgctgcaatggtactgtagttcaggacccagagctaggccaggtcattcagctccaaggtgaccagcgcaagaatgttgctactttcctagttcaggctgggattgcgaagaaagagaacatcaagattcacgggttctaagggacctgtaaatgcttgtgccctatattgtgtgcctccacatattggggagcttgaagcatcgacagttactagtcattgcttacttatataagaacataagtagtatttgctattgtcaagtgtgccttgcttgatgcaagttgtgttttcgtatcattattattatgcacggccatcgtacgtgtatggcttgtatgggttattgccaacttaataaaagcacactctgtttgcct

SEQ ID NO: 21925 - DNA, 994 bp, Zea mays
  Clone ID: LIB3355-038-C1_FLI
ctgcaaccccgcccgatcaatcttcctcgttccgccgctccctcgcctccggcagcgaggtgaggccaccgatcggaccttccctagcggcggcgcctaccaacctcaagtgcgtgggttgcttgtcctgcaggagcgatggctctgtctgcgacgctacggatttctcttagcgtcgcgttctttggggttctggcgttcgtgcttggtgtcatcgccgaaaacaaaaagcctgcttccgggactcctatcctaggaaaggatgtcgtcatctgcacgtttccaagtgatccgactcttgcgatggggagcctgtccattgtggcacttgtggtagctgccatcgtaggccatgttgccatcttctttccatactcgggcaagtcagttcctcgtggagcgctgtttcaaagcaccagcttgacagtgttctttgttgttgctgagcttgtctcagccctggctcttgcaatgtcgctgtgggcaactgtcaccgagggtcttcaccgcagcaagaacatccaccacgacatggactaccagtgccctactgccaagaccggcctgttcggcggcgccgctttcctcgcccttgacgctgctctcttctggcttgtttgccagatgctggccctcaatgcaagggctgactaccttgacgaggatgacggcaagggagaatatggccagatttatgctgctcaagtcgatgatggctcgaaggtctgagcctatgtggtcatgctcggcagggttctatgattagtgtcatttggctacattatgccatcaacaaagtcgctttagctctcagtaaatttgtatataagttgcaaagtcttacataaggctggtggttattgcactttcgtgtttcagtgtgatcgataaacagtatctcagtacaatcggtttgctatgccccttggcgaacttgtccttgagttttctggtgtctgaatggcactataatataatatactccctctgttcc

SEQ ID NO: 21926 - DNA, 266 bp, Zea mays
  Clone ID: LIB3355-038-C11_FLI
cttccgtaccccgaccccggccaccgtgtggaaacagaaacagcaatggcggggaggctggtgccgagcacgaagaaggcgatggagcaccgggaggagaagcccaaggtgccgtcgagcgacccgggctccgacctcgacctggtgcagctggtggccgggcagcagccgcccaacatctcggagatgaagccgctgacgcgggaggcgtacggcggcgggatgtacgcggccgaggaggagggcggccggcggaggggccccgc

SEQ ID NO: 21927 - DNA, 711 bp, Zea mays
  Clone ID: LIB3355-038-H3_FLI
gcgatggcggcggctgatgtggagtaccgttgcttcgtcggcgggcttgcctgggccaccagcaacgagtcgctggagaatgccttcgcctcctacggcgagatcctcgactccaaggtcatcaccgaccgggagacggggaggtcccgcggcttcggcttcgttaccttctcctccgagaactccatgctcgacgctatcgagaacatgaacggcaaggagctcgacggccgtaacatcaccgttaaccaggcccagtcccgtggcggtggcggtggcggcggtggctacggcggcggtcgcggcggcggcggcggttatggtggcgggcgccgtgacggcggttatggcggcggtggcggctacggcggtcggcgcgaaggtggcggcggcggctacggaggcggtggcggctacggcggtcggcgcgagggtggcggtggcggctacggcggcggtggcggcggcggctggagggactgatgtgtgggcccatcctggcttcggccgagttatcttatctatctatagtatcgtgttaccgttcgcttctgtcaccgtgttagtgtccgttctacctttggattaggtgttggtaccctgttgttcgctttggttgctcccgctatgaaacgagacgagagaagaatgagcaaggtttttgttcgcagctatttttgtccaatgatattgatatattgttcccctgtc

SEQ ID NO: 21928 - DNA, 558 bp, Zea mays
  Clone ID: LIB3355-039-H9_FLI
acgcccgaggcgcacgtgttcaaggccgacctccccggcgtgaagaaagaggaggtcaaggtggaggtggaggacggcaacgtgctgctcatcagcgggcagcgcagcagggagaaggaggacaagggcgacaagtggcaccgcgtggagcgcagcagcggccagttcgtgcggcgcttccgcctgccggagaacgccaagacggaggaggtgagggccgcgctggagaacggcgtgctcacggtcaccgtgcccaaggccgaggtcaagaagcccgaggtgaagagcatccagatctccggctgaagaagacatggacgggaggtgaatggtcgcgtcgcgttcgcgtcgcggcgtcggatcttgggtttcagcgacgcgactcgtgtgtgtgtgctgtgtggttgctctgctttggtatgtttggtgtgtacgtgtgctgttcagtgtttcctggtcctcgtctgtactttgcgctgttcggtgagcttcctggctcagtatgttgtgttgtgcgagtgaataaataaaaacaaaccagctgtagtatattcacct

SEQ ID NO: 21929 - DNA, 1023 bp, Zea mays
  Clone ID: LIB3355-041-C8_FLI
ccatcatccaggccgcaagaaacgcctcctccggccctccctccctctcgccgtccgccgtcctcctcgccatggctctggactcggttcctccttaccccagcgacctgggctccagcagggccgccgccgccgccaggacccagcagaggatcaggaaagaggagcgcacctggacctcggacacgtacgctccgtacgacgacgggcaccagtggaggaagtacggcgagaagaagctctccaactcccacttcccaaggttctactacagatgcacatacaagaacgacatgaagtgccccgcgacgaagcaagtgcagcagaaggacagcagcgacccgccactgttctccgtcacttacttcaaccagcacacctgcagcagctcaagcgccctcggcagcgccagagacgtcgcgtcccagtcgtcttcaaagaaggcggtgtcgatctgcttcagcccgcacgccccctccgagcagacctcgttcctgacgacgactacggtcgcgccgccggttatgcactcctacggcgccaaccgacagcccgacaggagcgcctacaaccaacagccccagtggtggacaggcggtgtgccatctcccacaagcaacggccctgctaagatggaggtcgcggagtccacgcagaagccgagcggttcgtacggcagcaccaccggcaacgctccgtccaggacgctgctaccgatcggccagtccaggtgcatcgagtacttccatttcttgtgatgagcttccgggaaggcaagctggggctcgggcactgcagcttggtgtctgcttgtttggagtggcaagtggagtttgtatctggagctggaggcgaaggcgaaaatgttgctgccgtcgtcctggcctcctggcctgaactacacaggccgggcggggcccaatcagtatactgactgacctgcattgcattacatacagagactgcctgctgcttactgtactgtacatctttgcatttgggttcaagccacgttttggtgct

SEQ ID NO: 21930 - DNA, 313 bp, Zea mays
  Clone ID: LIB3355-042-E12_FLI
cgggctcaccgttgacctccccgtcgtcggcaaactcacgctgccgctcaccaagtccggcgagctcaagctccccaccctctccagcatcttctgatcgatcgatctgcgtgctgctcgctcgatccgtaactgcggccttgcgtgttcatgactgatctgcctactcgataatatgtaaaccgctctcttgagtgttgttgttgtgctgcttgagtagtacgagacctaataataataaactacagtgatgtgtattatgcaagtttcagaccaataaataataatacgaaaaagacgcgtctgcacattc

SEQ ID NO: 21931 - DNA, 1043 bp, Zea mays
  Clone ID: LIB3355-044-A9_FLI
cgagaatggcctgctcccacctcgccgccgcgggtggctcttcccctgccgccgccgcagtggttcgttccccgacgcattccccagccgccgccttcgcgcgcctccggtcgacgccgcgtttctcgagcgccggcctgtcggttaagggaagcagggcggctttcccgtgggtcgccgccgcggggccggccgcggcggcgccggtggccgacctggacggccgcccggccacggagaagcagcccatcattgtcatcgataactacgacagcttcacctacaacctatgccagtatatgggggagcttggattgaacttcgaagtataccgcaatgatgaactgaccatagaagatgtaaagaggaagaacccaagaggaatacttatttctccaggtcctggtgaaccacaagattcagggatatcattgcagactgttcttgaattaggcccaaccatcccaattttcggagtttgcatgggcctgcagtgcattggggaggcatttggaggaaagattatccgtgctccttctggagtgatgcacgggaaaagctctccagtttattacgacgaggaattaggaaaggccttattcaatggcttgccaaacccttttacagcggctaggtaccacagcttggtcattgagaaagaaaccttcccacatgatgctttggaggctaccgcatggactgaagatggactcatcatggctgctcgccacaagaagtacaaacacatccagggtgtccagttccacccggagagcatcatcacccctgatggcaagaaaatcatcctcaacttcgtcagattcattgaggagctggagaagcagcgttcctaatctacgggaggtagatgcgacgggtggtttcatagatcaggcggaagcagagacataagccactgtgaagttccggcactggcagtggaagtttagctaggaatcaacgtttccctctcataattcgttgttctcgtggtaacataatctgtgtggaccgaatgtcgaataaagtccaggcgtccagct

SEQ ID NO: 21932 - DNA, 1763 bp, Zea mays
  Clone ID: LIB3355-044-B2_FLI
cgactttatttcaagaagacagaagaagggagagtcgtactgaggtgtaagaatggcgagtgcacaggcagtggggcaaggagaacgaggccacttcgttctgaagagcggacacaccattccggccgttggtctaggcacttggagggccggctcagataccgctcactctgttcggaccgccatcgccgaggctggatataggcacgtggacacagccgctcaatacggagtagagaaagaggtcggtagaggacttaaagctgcgatggagggcgggatcaacaggaaagatttgtttgtgacgtcgaagctatggtgcaccgagctggctcctgatagggttcgaccatcactccagaaaacactcaaggacttgcagctggattacctggatctctaccttatccactggcccttcaggctgaaagacggggcgcacatgcccccggaagccggggaggtgctggagttcgacatggaaggggtgtggagggagatggaaggcctcgtgaaagacgggctcgtcaaggatataggtgtctgcaattacacggtcgccaagctcaaccgcctgatgcggtcagcgaatgttccaccggcagtgtgccagatggaaatgcaccctgggtggaagaacgacaggatctttgaggcctgcaagaagcatgggatccatgttaccgcttactctccgctgggttcttcagagaagaacctagcgcacgacccgctcgtcgaaaaggtagccaacaaactggacaagaccccggggcaggtgctcgtcaggtgggcgctccagagggggacaagcgtcatccctaaatcgaccagggacgaaaggatcaaagagaacatccaggtgttcgggtgggagatccctgaggacgacttcagggccctgtgcggcatcaaagatgaggtgagtgacggatgacatggcttttgggggtttaaggctttagcgataactttagcatgacttggttatcagtatgttctatgtaggttatgaagctaagaggaaaaatgaaaactagtatgggaagttttcttagctgatacgtaagacttattggcatcaattgagcttgttaagttgttacgccacttatgacaggctacagcatattgccctagtggaataatgccattttttcacactcaaaataggggggtttgaatgcaatagagttaatagttagttaactaaaaattgatagtgtatctagctaactactatgttggatgtttcggctaattttagcaactaattatcaattaactattagttctagaatacaaacgtggtctaagataagaattatagtttccagatttgaggcacagagtcgtttgatccgtctactgcagcactcgtttgtgtgtgtgtgtgtgtgtaaaagtgcgccgttttgcctgatctgcagaagcgcgtgctgaccggagaggagctcttcgtgaacaagacccacgggccgtacaagagcgcaaccgaggtgtgggaccacgaggactgagctgagctgccgtgccgccggatgcctcccactcccacctgatgaaccagaataaaggataccgacgcacctgtcagtcacctccttccccgtgccttgtgagagcggcagcctctcgcacagggaagatgctctgtgagagcagcagcctcgcacgagaaagatgtagaagagagtgtgcgcgcaacacactcatgtactgtacgatagactgaataataaagaagaaaacgatccacatct

SEQ ID NO: 21933 - DNA, 536 bp, Zea mays
  Clone ID: LIB3355-044-G1_FLI
cagatttagccttgaataggagtgcataaaaaacatatatccatgtgtctaaaccttgacttgttttcgttaaggttttaactctggcctatcccaacatggttgaagccatcataggcaggaatgatgaagcgataatgaactttgagaagattgaccctgcaagaccagagacatgtgttgctcttgcagcaatgtgggaaagaaaggatgaaagaaaagctttgacatatgcagaaaagagccttcgagttgatgacagacatataactggctatataatgaagggcaatctgcatctttcattgaatcgaccagatttggcagtgacagacttcaggggggctcaagaattgagggctgatcttcgttcttatcaaggattggtgcgtgcttatctagcactttctaaatgcaaagatgcattattcactgcacgcgaggcgatgaaggttatgcatcagtctgcaaaagctcttaagctagttggtgatgttcatgcaattagttccagtgggagggagaaggcaagaaag

SEQ ID NO: 21934 - DNA, 269 bp, Zea mays
  Clone ID: LIB3355-047-C12_FLI
cgcgatctagccgagctctcgaaaccctaggtgcgtgccgaccggcggcggcggcgaggtgatggcgatggacccggacgcggtggcgaaagccttcgtggagcactactaccggacgttcgacaccaaccgcgcggcgctggtggggcactactaccggacgttcgacaccaaccgcgcggcgctggtggggctgtatcaggagacctccatgctcaccttcgagggccagaagttccagggcccatccgagcttgccggcaatggcg

SEQ ID NO: 21935 - DNA, 682 bp, Zea mays
  Clone ID: LIB3355-047-H5_FLI
ccccgagccgccaaaaccctaccgccgccgcgaatcccgcacgaccccaaccatgaccgtgctgagccgccctaccccgggcacggcccagtgcttcgggcggaagaagaccgccgtcgcggtcgcgtacacgaagccggggcgcggcctgatcaaggtgaacggcgtcccgattgagctgatccgaccggagatgctccgcctcaaggccttcgagcccatcctgctggcggggcggtcccggttcaaggacatcgacatgcggatccgcgtccgcggcggcgggaagacgtcgcagatctacgccatccgccaggccgtcgccaaggggctcgtcgcctactaccagaagtacgtcgacgaggccgccaagaaggagatcaaggacatctttacccgctacgatcgcaccctcctcgtcgctgacccccggcgctgcgagccgaagaagttcggcggacgtggtgcccgcgccaggttccagaagtcgtaccgttgagcggctgcctgctccatctcgatttttcagatcgttgtgggtgttcttcgctttatttcctatcaatggatctgcttatctggttctatatctagctgctgctttaccataatgtttagactttaatgcctagcctgaaaccttgtttgcaatgtgaaattaatgtgagagattatgaagact

SEQ ID NO: 21936 - DNA, 702 bp, Zea mays
  Clone ID: LIB3355-048-F9_FLI
gccatctctaaaccctacccacagccaccgccgccgccgccgctccctgacccctagtgtccggatttaacttcaaacatggcggacgtcgatgtcgagccggaggtcgccgccggtgctcccaagaagaggacgttccgcaagtacagctaccgcggcgtcgacctcgatgcgctgcttgacatgtccaccgacgacctcgttcagctcttcccagcgcgcgccaggagaaggttccagaggggtttgaagaggaagcccatggcgctcatcaagaagctgcgcaaggcgaaaaaggatgctcctgtcggcgagaagccagagccagtgaagacccatctccgcaacatgatcattgtccccgagatgattgggagcattgttggtgtctacaatggcaagaccttcaaccaggttgagatcaagcctgagatgattggccactatcttgcagagttctccatttcctacaagccggtcaagcacgggaggcccggtattggtgccactcactcctcgcggtttatccctctgaaatgagttgttacccagatctgtagcgtcccaagggtgtccagtggcattgccctttcagctttgctgcttgtttcgaacaagttacatacccaagacattttgttctgtttccagcactagatttcaaagctaagcattgcataactatgctgttttgttggaagt

SEQ ID NO: 21937 - DNA, 676 bp, Zea mays
  Clone ID: LIB3355-049-D6_FLI
acaaagtagttgttgcacttgcatgcatgctggcaaaccagcgctgagtttttttggttttaacaaaaagtttatttatttacaaagagaaaggccacccctttgatctgttatcatgtgtaatgttgataccatgcaggagcattcctggccatggcggtactggggaaaatggaccagatggtggcgttcaagggagtatccttgacgattgcgccccttggagcagtctgctgcgtgcttttcagcgctccagactcgcctgcggccaagaaatacaatatgttcgtcgcgcagattgcttgcgcggcctttggcgtattagccctctcgttgtttgggcctggctggttagcgagaggcgccgctctttcagcctgcatagcattcatgaccatcacgggtacctcgcatcctccagctgcgagcttgcccctcttgtttatcgatggccccaagtttcacagtttgcagctttggtacgcgcttttccctggagctgcaggctgcatcgtcctttgcttgattcaagaggtggtggtttacctgaagaagaacttcaagttttgactcaagcagcttgacgctatggatttttgtggaagtggtccgattaattattcaatcatgtaacataaattacattgcctgcatttgcgataaagttgtgaaaatg

SEQ ID NO: 21938 - DNA, 2957 bp, Zea mays
  Clone ID: LIB3355-049-F2_FLI
agagaggaggccgtgggtgcgcaaggataagaatggctggagagaagcccgcgcgcgtgatttgccgctcggctgggcgcgagattttttacgagctgagcggcgcaggagataagccagacacgcacggtaagaaaaaaatatcagcaaaagaaagagagagcgatgagaaggatgccaaggaagatggcaacgacttgcggatgacgctgggacagacttcagaaaaatcaaggaccggatagaatccaaggctcgttgcgtggagaaggtctggaacctgcgcgcggtgaagagaggcataaagtaccacgccatgactagtactgataaaaaaaatcgatggggataaggcttttgaaagaaaattgtagtttttcctcttttcatataatttgtttcgaggagaacgaattatagatataaataaatccaagttttagtattaggatttggagggattaaacgaactggtttaaaataagtttcggactacgtattttattttctgaatcacgaaatggaaattcagaggaataacagcttagacggttctgcccgaatctcgtttggataattttcgtgactattccggccacgatataaatagaccaaattgcaatgagttcggcttcggtattttaatctgctctgcgtgattagtcgaaaccagatccgctaaggcatacgcgatttcgtcgccaaaatagcatgcagacggataagttggatcttaacctcgcgcacgatttctctcagacaacgcgtgatacagattattttgccccgaacaccttagttgtcgagttcaaattaatttgtccgggataaaatcatccgagtgagtcgagcttccgaatttcgtattcgcgcgagcgatgaattttaaataatcaccggacgcaccgatttttagaacgacgatgttccgaacatcacgaaaatttaggaagagcccggatgaataaaaacaagaacgacgtcgcacccgcgacagacgaaacagatgcgatattaaaatcgcaataggcgaagatgtttaaaaattcatcatccgttttatccactgattacgtgcttaaatccgtactcgctgtcgagcggaatataaacacctggggtgttacagatgtcgccccccacctcatcatactttgtcctcaaaccgaacacatccttaagcgtatcctaagcatcgcgtaggcgctaaggcacgctcacaagccaaggcgtctacctcgccttgcccaggtgcgtaaggcgtcatcgggcatcctcggggtgttgtcggggcggcggcggcggtggtgtggagcctccttccccgtcggcgcgcgggcttgttacctcttagctcaggcagcgcacgggagtggagcggctgcgtgcacgcgtgcttcctctgccctctctgtctcagcacaggcggcaccagtcagaggagaaggacgcaggggagggagagctgcgggggagggaacgaagaggtgctgctggcgcgggggagggaacgaagagatgctggcggcgggggaggagaagaaaggcatgctgtcggctgcaaggagacttgatattttaacctaaaactgctattgggctaaactggttatgggcttttttcttttcttttttctatttctctcttctactaggctgaaatgggcctactaggtttgtgctagcttgcctattaattttgaattagtgttatataagtaatatttggtctaatattacttataattaaggcgtcgcctcgccttacgctttaccgcctaaaaggtaaaaagggggtcggtcgccttatatcgtcttaccgccttaataactatggaatggagtacacttgattgttattgagcattaatgaagtgtaaactttcgagtcacattcttttcagaaggttttacttcattaatcgaaccttgtttctgaatgagcattatgttagtcactgcatttacataaattaaattgcagttcccaccggcatatggcgcccagcctgtcatgtacaatactcaacctggagcatcaccgcacggttacatgcatcctgctggtccacagtatgggcaacaaatgacgattggggggcagactcgtccagtttattattatgcgcctgagatgcaacaatacagaggaagaaacttttagatataccattctgaactgctcttagatggaagtcgctgcaatccccacaagtgggattttgaccagcaaaaaccgctattacaatggaaaaaactggtcctgttgtgttgctcggattggttggacaaaaaagcgcaccgactttgtgttgctcggattgcctggtcaaaatgctcttcattgtcctgtatcagtgttgctcggaagcaggttcactggaatttcatattatttttgtcagactattgatgttgtaaattgaattgcgggtcatctgttcgacccggaaatgacattcataaatgtgtgaggttgccccatgtaacatttatgtgttccttaacgttgttctgatgtaagatttggacgaaatggatcaaattgctgacctatctgctcgtttatacccagctggagtagcaagcatggaggggacgtagagtcttactagcgtttgggatggagacctaaaaattgttagggcttacgtttataatttgcgaaccagggtggttataagattgttgccattatcgtgtagtcactggattgaaaggtgttggtgggcattgacatctgatgtggttcatgtgttggtaatggacggcggtattatagggaagtaggtagtgtttggtttaccatgggtaatggtatcgcaatggaagttaaaaagcggtggatttcaaatcaatgaataccattgcatgttttgcttggttgagttttgtaatacttttttattccaatacactgtttgttttggaaaccaatgtaacgtaatgaaattaag

SEQ ID NO: 21939 - DNA, 717 bp, Zea mays
  Clone ID: LIB3355-051-A11_FLI
cgcgtctcggttcatcaagtgcgtcaccgtgggggacggtgccgtcggaaagacctgcatgctcatctcctacacatccaacactttccccactgacaagaagattacaatagactgcgtccgttgagctatcgtggtgctgatgtttttctgctcgccttttctcttatcagcaaagcaagctatgagaatgtctctaagaagtgggttcctgaattaaggcactatgctcctggcgtgcccataatccttgttgggacaaaacttgatctgcgtgatgataagcagttttttgttgatcaccctggtgctgttccaatttccactgcccagggcgaagagctgaggaagctaattggtgctgccgcctacatcgaatgcagttcaaaaacccagcagaacataaaagcagtgtttgacgcagcaattaaggtggttctccagccaccaaagcaaaagaagaggaagaagaaggtgcagaagggatgcaccattttgtaactacaaacggtagagggcaacagtctggctgcggcgctgctgccaatgataaccatcgcctccttgctgtataatatatcgcctgatcatgccaccagcatgcacaagggagatggtggttttaggatccttgtcctactgtgttgtgtagaccaccgggtgtagttgattgtatctggttgtttgtatgtatgtacaagacaaaactagcactgc

SEQ ID NO: 21940 - DNA, 549 bp, Zea mays
  Clone ID: LIB3355-051-D8_FLI
aaatatcatatatgatcgaaactaaaccgatatgactttctccggagcatcgcaatccgagttcctggtgtaccacccttgctctccgaggcatatgacttttccagctaatccgttaatcctatgaccggagggctgccttgccttatcgattatccccgttcgaagtcggctttgcttctgcttgttttagcttatacccctgatccgtatatctgccttggccccgctttgcattcataaatgtcactattcgtcgagtgcttccttacctgtttatcaccagctcccattgccaactctaaattacatgaatttcactagtccgccaatccaattaggattgtcctcccgtcggttgcatcgctcctgctcgcagtagtcgtttctttgccggtgaatcaattgaatttcttctaaacagaataaggccggcatcctgctctcgactatccctaccttggttggtaaagttactactcaaaggatggcttttctttcctacctactattgtatttgattcacttcttttcaaatacgagggtgag

SEQ ID NO: 21941 - DNA, 1664 bp, Zea mays
  Clone ID: LIB3355-051-E11_FLI
gccactcggagtagcgtagtgcggtgcggtgcggtgcggtggtgagtgacaggaaggatggaagaaggcttcaccggcggcgtccggatcgtgtccaggcgtctcgtccggccggagccgaccgcgagctcgccggacaacaacagcgcgccaccggaggaggaggaggatgagataatgcacatgacgccgtgggatctgcgcatgatcacggtggactacatccagaagggactgctcctgcccaagcccccggcagcaggcggggcgcacgcgcaccgactcgtggacggcctcgcctcgtccttcgcgcgcgccctggcccgcttccaccctctggctggccgcctcgccgtggatgccaccaccggcggcccgggcgtcgtcgtctcgctccgctgcagcggcgagggcgccgagttcgtccacgccgaggcgccggatgtcaccgtcagcgacatcatcacgccgcccgcaggccgttactacgtccccagcgcgctggtctggtcgctcttcccgctgaacgggctgctgggcacggacgccgccctggacgacgactcccgcgcccccctgctatcggcgcaggtcaccgagctcgccgacggcgtcttcgtcgccatgtcgctgaaccacgccgtgggcgacgggaccacgttctggcacctgttcaacacctggtcggagatcagccgggccggcggcgaggggcgcgaggcggagctctccacgccgcggccggtgctagacaggtggttcctcgacacctgcccggtccccatcgctctgccgctgcgcaagctggaggacatcgtccggcagcccgagtacccgccggtgcgggagtgcttcttcgacttccccgcggagagcgtgcggaagctcaaggcgaaggcgaacgccgagattgcggcgggaggcggcaccgcgccggccgccgtcgtgctgtcgtctctgcagtccctgctcgcgcacctgtggcgggcggtgtgccgggcccgggatctcgcgccgggcgcggagacggcgtacctcctcctcgtcgggtgccgcgcgagggtgcgaggcgtcccgcaggcgtacgtgggcaacgccgtgacgctcgccgtggcaaagtcgaccgccggcgaggtgctgggcggcgggctgggctgcgcggcgtggctcttgaaccgcgccgtggcgtcgttcgacgaggcgggcgtgagggccgagctcgcggcgtgggcgcgcgaccctcggttcgcgtacgtggagccgcgcgggtacggcggcgccgcaacggtcatgaccgggagctcgccgcggttcgacgtctacggcaacgacttcgggtggggccggccaatgagcgtccgcagcggcgccgggaacaagatggacgggaaggtgaccgtgtacgagggccgcggcggcgcgggcagcatggcgctggaggtgtgcctggcgccccaggcgctcgccaggctcgtcgccgacgacgagttcatggaggctgtgagcgctgccgcgccgtgaatgcctccgccgcctgtggctgtgctgagagccacctgtacctttgagagacaattcttctatccatcagttgcatgaaatctgggcttttgttcggcgaccatgttgtccattcatttcgtttgaagaagatttgagttgtc

SEQ ID NO: 21942 - DNA, 694 bp, Zea mays
  Clone ID: LIB3355-051-F9_FLI
gacaacactcaccgatagcaagtagcgccgccgacgtttcgagagcagagtatccaagctagccaagcgcgcacctcggtgacctagctagttcaggcgacgatatggcgtcaggtcaggaaagcaggaaggagctggaccgcaaggcccgcgagggcgagaccgtcgtccccggcgggaccggcggcaagagcgtcgaggcccaggagcacctcgccgaagggcgcagccgcggaggccagactcgcagggagcagctggggcagcaggggtacagcgagatggggaagaagggcggtctgagcaccacggacgagtccggcggcgagcgcgccgccagggagggcgtcagcatcgacgagtccaagttcaccaagtagtcctatcgcgtgcgtgcgtacgcagcgttcgtagctgtctgcgtagtgtaccttggccgtagctagtgctactctctactttggagtagctgaatgataataatgtagctagcagcatgcatgtaggcgatcatacatacgtacgtacacaggtacgtgtgtgtgatcatgtatgcttccagaagggtatcctagcttaatcagtcacgtcgtcaagtcgtcaatatggcaggttcgcgtcagggctttgtagtttgatagcctgtttcacgactcctcaataatcaagtagtgtaatgaaagtttggcggttc

SEQ ID NO: 21943 - DNA, 805 bp, Zea mays
  Clone ID: LIB3355-052-B10_FLI
gctgatattccagttgcaaaaggagcgctaggaagaagaagcaacgagccatggcctccggtggcccgaaacccaaactggcctacatcatcttgtacgtgagggacgtggggaaggccgcctccttctacgacgccgccttcggctacaccgtccgccgcctcgaccagtcccgcaagtaaaacacgcgcgcgtgcgccctgtgctgcctgatccggatgcgcgcctaattaatctgccgcatctgcgcgcctttctgggtttactttgcaggtgggcggagctggagagcggggcgacgaccatcgcgttcacgccgctgcaccagcgggagacggacgagctgtctggggcggtgcagctgccggactcgtcggccgccggccggggctccgtggaggtctgcttcgcctacgcggacgtcgacgccgcgtacaagcgcgccgtggagaacggagccgtggccgtgagcgcgccggaggacaagccctggggccagaagtccggcttcgtgcgggacatggacggcaacatcgtgcgcatcgcgagctacgtgcgagagtagtcgcattccgctgcatcaccatcggtcgatcgatcagcctttcccatgcatgtctcgtatactacacgtctacacgtgtaccaaaaaaataaatataatcgttgtgcaggtcatgtttgtcttgggagaggtaggaccgtggaagatgtaaatggaaccgtggagcagtgaatacaaaaagcgccatctcgtccctgtttccattgatctgtacaattaatgaatagagacttctaaatc

SEQ ID NO: 21944 - DNA, 832 bp, Zea mays
  Clone ID: LIB3355-052-C4_FLI
ctcgcttccggcgccatggagacgaagcgggtggccatcatcggcgccggcgtgagcgggctggcggcgtgcaagcacctgctggagcgcggctgccggcccgtggtgttcgaggccggcaccgtcgtgggcggcgtgtgggcgcgcgtgccagacagcacggcgctgcacacgccgcggcccatgtaccagtactccgacttcccgtggccggacaccgtcaccgaggtgttccccgaccaccggcaggtcatgtcctacctggacgcctacgcgcgccacttcggcgtgttggactgcgtccgcttcggccgccgcgtgctcgggatggagtaccacggcgtcgccgaggacgacgtggcggcgtgggaggagtggggcggaaacggccaggcgttcggctgcgccggcgctggcgagtggcgcctcaaggtggccgacgccgagggacgcattgaggtacatatgtggttactacactccattaaccccgttgagggcaacagaagaaagtgataagccttttgggccaaatggcggtcacgtacaactctatcatcaaacctcctcactatcgtaccgtcaagcatctcaaggatcggtggttcacgagcatctagaaggtcacccttttcaacgacatctacaaacacttgtctgtggcctagccgagcagattagatgatgctatgccgctcaaagctggagcacaagtggcatgctcttcgtcactagcccaagtggtgtgtgtggcacagtgagtctgactctagcagtgcgagcaaatgagctcatctcaatgtagaggacgattgtagctatgcattgctgc

SEQ ID NO: 21945 - DNA, 892 bp, Zea mays
  Clone ID: LIB3355-052-C8_FLI
gtcagggcttcttattgggtggatctcggtggcacgcgtgctgcaggatctgcggcggtgggcagtggtcggccggcgatggcgcaccgagtggacaacgagtacgactacctcttcaagatcgtgctcatcggcgactccggcgtcggcaagtccaacatcctttcccggttcacccgcaacgagttctgcctcgagtccaagtccaccatcggcgtcgagttcgccacccgcaccctccagatcgaagggaaaaccatcaaagctcaaatatgggatactgcggggcaagagaggtaccgtgcaatcacaagtgcttactacagaggagccgtgggtgcacttctagtctatgacatcacgaagaagcagacatttgaaaacatacagaggtggctccgcgagctccgtgaccacgcggactccaacatcgtgatcatgatggtcggcaacaagtccgacctgaaccacctgaggtcggttccagaggaagatgggcaggcgttagcggagaaggaaggcctatccttcctcgagacatccgccctcgaagcccttaacgtcgagaaggcgtttcagaccgtcctctccgacatccatcagatcataagcaagaaggcgcttgcagcccaagaggcagcaggtagtggacctccaggtcaaggaaccaccatcaacgttgcggattcgtctgccaacatgaagggagggtgctgctcttcctaggtgtgcagacaaagacatgctgctgctgctgcaaaaaagagagagagaaacctcatggatcgtacgatactttaggtgttatgtaggtgacgactccttttggcctgtaactccggtgggttgtaatcacagttcatacttctgcaaagaaatcctcctctcaggt

SEQ ID NO: 21946 - DNA, 720 bp, Zea mays
  Clone ID: LIB3355-053-D10_FLI
cagtcgcagcacacactgaattctctttagctagctaagagagggtagccacaccaagacaggatgcagacagcgaaggtgaaggcgaaggacatggtgagctcggcgaaggagaaggtgaaggaggggtcggcaaagatgcagggcaagacgggcgaggcgacggcggccacgcacggcgagaaggagatggccaaggaggcggcccgcgccaagaaggaccaggccaacgccgacaagcaccaggagaaggccgaccaccgagcggacgccgccactggccaccacggcacgcgcgtgcccctcaccggcccgcacggccaccacggcgctggcgcggccgtcgaccccgcgtacccgtcctccggcaacacgtacccggcgtcgggcaagtacatctaggtgactgcgtcggatgagcgaggccagggtcgtggtcgcacttgcgtttttgtgtacgtagcgaccgagaagatcgatcctggctgtacgcctgcagtaccggtaccgactggttagttgtagagggtatgcggtgcgcacgtgcacgtgcgcgcaagtcgtctggaataaaaatgctctagttgctgttaggttgcttaatttcagtgtagtcgttcgttcacgggcactgttgccctctatgtagtatgtttttttttttgtttttaatcgttttagtgtttgaccaagtacgcgtaatagatttgtaagttcgac

SEQ ID NO: 21947 - DNA, 829 bp, Zea mays
  Clone ID: LIB3355-053-G12_FLI
cacaagtgcacgctcacctgtcacctcacacacgcagctaagtagctaacgccggaggcgagaacaagaaaaagctcgacatggccgaggagaagaagcagggcctgcagctgctggacttctgggtgagcccattcgggcagcgctgccgcatcgcgatggacgagaagggcctggcctacgagtacctggagcaggacctggggaacaagagcgagctgctcctccgcgccaacccggtgcataagaagatccccgtgctgctgcacgacggccgccccgtctgcgagtccctcgtcatcgtgcagtacctcgacgaggcgttcccggcggcggcgccggcgctgctccccgccgacccctacgcgcgcgcgcaggcccgcttctgggcggactacgtcgacaagaagctctacgactgcggcacccggctgtggaagctcaagggggacggccaggcgcaggcgcgcgccgagatggtcgagatcctccgcacgctggagggcgcgctcggcgacgggcccttcttcggcggcgacgccctcggcttcgtcgacgtcgcgctcgtgcccttcacgtcctggttcctcgcctacgaccgcttcggcggcgtcagcgtggagaaggagtgcccgaggctggccgcctgggccaagcgctgcgccgagcgccccagcgtcgccaagaacctctacccgcccgagaaggtctacgacttcgtctgcgggatgaagaagaggctgggcatcgagtagagcatccatcggtcggccggtggctggccgggagtaataatgacgaaccaataatctagttttggttttagtgt

SEQ ID NO: 21948 - DNA, 692 bp, Zea mays
  Clone ID: LIB3355-054-B7_FLI
gttccttagggttttgtggaggggcgatggcggcggctgatgtggagtaccgttgcttcgtcggcgggcttgcctgggccaccagcaacgagtcgctggagaatgccttcgcctcctacggcgagatcctcgactccaaggtcatcaccgaccgggagacggggaggtcccgcggcttcggcttcgttaccttctcctccgagaactccatgctcgacgctatcgagaacatgaacggcaaggagctcgacggccgtaacatcaccgttaaccaggcccagtcccgtggcggtggcggtggcggcggtggctacggcggcggtcgcggcggcggcggcggttatggtggcgggcgccgtgacggcggttatggcggcggtggcggctacggcggtcggcgcgaaggtggcggcggcggctacggaggcggtggcggctacggcggtcggcgcgagggtggcggtggcggctacggcggcggtggcggcggcggctggagggactgatgtgtgggcccatcctggcttcggccgagttatcttatctatctatagtatcgtgttaccgttcgcttctgtcaccgtgttagtgtccgttctacctttggattaggtgttggtaccctgttgttcgctttggttgctcccgctatgaaacgagacgagagaagaatgagcaaggtttttgttcgc

SEQ ID NO: 21949 - DNA, 494 bp, Zea mays
  Clone ID: LIB3355-054-D12_FLI
cctacttccgtccccatcagtggacccagccgagatcgactggatctcctggctcgggcggctttgatggttcctggggtcggcccggggaggagttcgaggcgatgagcaggcttgcgtcggggctccagcgcccgcggaggtcgttgtcgccgtgcgaggtgctgtgggctggtgttactcgcggctatcgtgctcggccgcctgtggaggaggttcatcggagtgacggcgtcggcgccgctcttcgtgctcttcaacatcctcctatcgtggggcgtttacatcttcgtaatccgtagaagtgagctcttgtggtaatgcttgcggacttgcactgtattggtaggacacaatcgatcgctgtggtgtggatatttgctatttttgtcttgctgcctctggaagttagtaaaattacctggaaggttatacctctatgtcttagcttgagaaatttgtaattttgccactatcagttttggcttcctgtt

SEQ ID NO: 21950 - DNA, 1546 bp, Zea mays
  Clone ID: LIB3355-054-G9_FLI
gcttgcctgcgatttggttagtgcttgagcggcctgcgatttagctagctaaatctcacgtgagggcgactgatcgaggtgtccgacctgcaaccaggcgattggaggcgcttgattttggaacaacagctagcttcttcacaagttccgagggaggagcagataaacttaataaaggatttggagagaaaggagactgaatacatgagacttaaaagacacagaatttgtgtggatgactttgatctgctcactatcattggaaaaggtgcttatggacaggttcaactatgtcgggaaaaatccactggtaacatttatgccatgaaaaagctgaagaaaactgatatgcttgtgaggggtcagtttaaaagtctgcgccaagtcaaaatttgccttataaaaggggcagaggaagcactagaggtggagaagtccaaatgaacagcttcagcattggcagaacaacaggagaaaattggcattttcaacagtcgggacacctgattatattgctccagaggttctactaaagaagggatatggactagagtgtgactggtggtctcttggtgcaatcatgtatgaaatgcttgttggttatccaccattttattcagatgatccactagttacatgccaaaagattgtgcattggagaagctatttgaattttccagataatccaagattgtctcttgaagcaaaggatctcatttgtcggttattatgtgatgttgatcacagaattggcagcggaggagcagatcaaataaaagctcatccttggtttcgaggagttgaatgggacaagctgtatgagatggaggcagcatttaagcccctagttaatgatgaactggatacacagaatttcatgaagtttccagatttaaaccctgctccagcaagagcaagttctggggcttcaaggaagatgatgcttaattctaaagatcttagctttgtggggtatacatacaagaattttgaggccgtgaaaggtttgcatcagtttgcaggcagtagttgccataatattctgaatactgagtccttttcagatccacattttctattctctgcaatcttcagagaagttcctcatttacaaggcactctgctggctccccatctgatacagcagatatggacgcctcaatggaagctaacgggaccgacacacacatgcgcactggttcagctggcgaccctatggcgccataatctgccctgttgttttcgtgaagtaccctgccctacaccggcatcatgcatgcacctcgacaacatggctacatctgaagagacctggttgtggacttgcatttattcaggtctggtgcccttctactatttggcgagcaccttcgtagttgtacaaaccagaggtatttgtgtagtatgtttcaggtgagacaagttgggcaggtctggccctgggtatatacttcttgacgctggttgcccaggttggcatagtattaggtcgtcgccttccttgtggcagctctttgcccgtttatttaacaataatatatattat

SEQ ID NO: 21951 - DNA, 672 bp, Zea mays
  Clone ID: LIB3355-054-H7_FLI
ctcaccgatagcaagtagcgccgccgacgtttcgagagcagagtatccaagctagccaagcgcgcacctcggtgacctagctagttcaggcgacgatatggcgtcaggtcaggaaagcaggaaggagctggaccgcaaggcccgcaagggcgagaccgtcgtccccggcgggaccggcggcaagagcgtcgaggcccaggagcacctcgccgaagggcgcagccgcggaggccagactcgcagggagcagctggggcagcaggggtacagcgagatggggaagaagggcggtctgagcaccacggacgagtccggcggcgagcgcgccgccagggagggcgtcagcatcgacgagtccaagttcaccaagtagtcctatcgcgtgcgtgcgtacgcagcgttcgtagctgtctgcgtagtgtaccttggccgtagctagtgctactctctactttggagtagctgaatgataataatgtagctagcagcatgcatgtaggcgatcatacatacgtacgtacacaggtacgtgtgtgtgatcatgtatgcttccagaagggtatcctagcttaatcagtcacgtcgtcaagtcgtcaatatggcaggttcgcgtcagggctttgtagtttgatagcctgtttcacgactcctcaataatcaagtagtgtaatg

SEQ ID NO: 21952 - DNA, 795 bp, Zea mays
  Clone ID: LIB3355-055-C7_FLI
ggtgaccaagcagagtgacgacgacgcgacaatcaagtccgtagctccggcggtagactttgatatggctttagctcgtctgtgcctcaacagggccatcgctggccgcgcgcaggcgctggcgaggccggcgctcgccgcagccccggcgacagatccgaaacttcactcgcttctctcaacctcggcagccgactctgccgcctcaggcgaggcaaaccgccgagatgtcgccgtgtcggagcgctccgcccccaatcgccgctgggcatggcgagacctccgcgacttcaccccgttcagcctcgtggacggtctcgggagcgcgctgtcgcaggtggcggagaccctgggccgcccgctggagcgcctggcgccgtcgcggctgctgtccgggaaggtgcgcgaggacgaggcgcggtaccggctgcgtttcgaggtgccgggcctcggcaagggcgacgtgcgcgtggccgtggaggacggggtgctggtcatcgagggcgagaagcgtgagcacggggaggagggcgacggcggcgagtggtggtcgaccagcgggtaccacgccagcctgctgctcccggacgacgcgcgcgccgaggggatcaccgccgaggtgaaggacggcgtgctgtacgtcaccgtgccgcgcaccggggagcgcaagcggaacgtcaccgaggtgaaggtgcagtgatgcgtgtcgtgtcactcaactcttgtgagtgcttcttgtttgtgagcccgtgactgttgtgtattttctccggaaataaaatacgtatcgtgtac

SEQ ID NO: 21953 - DNA, 1008 bp, Zea mays
  Clone ID: LIB3355-055-D1_FLI
cacttttccgttcgatttggtgggccgaggtctctcgctcgtggagtcgtagtacagcgcttcccgcacggcgatgtcggcgacgccgctgcccccgccgggccccgatggcgcggtggcgctcctgcctccgccgggtacggacatgactgggatctgcttccgcgaccagctgtggctcgacacttacccgctcgatcgcaacctcgtcttcgactacttcgcgctctcccccttctacgacatcacctgcaacaacgagtccctccgatcgcgtcaaatccaccccctcgacatgtctcatctgacgtacaacacttagcttggctccccatctcccaccaattcgtctggatttttttggtttggtattggtattcgattggtgttgtggtcgcaggaagatgaccgggatggagtaccttctgagcgaagtgatggagccgcacctatttgtgatccggaagcagaagcgggagagccccgagaaatctagccccatgctcgcctactacatccttgacggctccatctaccaggcgccacagctctgcaacgtcttcgcctcacgcataagcagggctatgcatcatatatcaaaagcctttaccatagcatgttcaaagttggagaagattggaaacgtggaaaccgagcccgatgcagtagcctctgaatcaaagacccaaaaggaagcaatcgacctgaaggaactcaaacgaattgatcatatcctgtcatccttgaaacggaagataggggctgctcctcccccacccccttaccccgagggctatgtcccaccatcagcagaacaagagaaagcgccggatgatgtggcagcatcagaggcaccgcctcaacttgaccctatcattgatcaaggtccttcgaaaagaccaagatttcaatgaaagatttgtagcttaaacctgctgactcgacaacttcctgtatgctttaaagtcgccgacgtggactttataaatccattcttgctggttggtt

SEQ ID NO: 21954 - DNA, 1074 bp, Zea mays
  Clone ID: LIB3355-056-E10_FLI
gcaaagcaaagccaaagcaatctcaagtgaatcaaaccgccagacttcgcagtcctcctccactaccagagcatgcgcgttgcccccgcgacccgaaccgccgccgccgctcaccctccgagcgccttcctgctcctcctcggttgcgcgtccctcgcgatcggaggagcagccatggccggccacgtcctcggcggcgtgaaggagaacccagccgcggccaacagcgccgagtccgacgggctcggccgcttcgccgtcgacgagcacaacaggcgcgagaacgcgctgctggagttcgtgcgcgtggtggaggccaaggagcaggtggtggccggcacgctgcaccacctcacgctcgaggccgtcgaggccggaaggaagaagctctacgaggccaaggtctgggtcaagccatggctcgacttcaaggagctccaggaattcagccacaagggggacgccaccgccttcaccaacgccgacctcggcgccaaggaaggtggacatgagcctggttggcgtgaggttccagtagaggatcctgtggtcaaagatgctgcacaccatgctgtgaaatcgatccaagagaggtccaactccctgtttccctacgaacttctcgagatccttcgtgcccatgcacaggttgtggaagactttgcaaaatttgacattctgatgaaactgaagagaggcagcaaggaggagaagatcaaagctgaggtccataagagcctggaaggggcctttgtgctaaaccagcatcagccggcggagcatgctgagtcgagcagccagtgaactgacgtaactgtgtgagctgtagtaacgtacttcgtgttacgtagaataaggagaaaacgaccaatccggttttatctggatgtcatgtatggtcgacggtcgttgctggcttggcttccggagtccgaacgcagcaggcatactggtgctggaagacggtacctgctgtcgcacttgccgttataataggcattggaacttgtcgatttcgggagctgatctgtttgtaccgtattgtttataatatgatggatcgtatgatatccc

SEQ ID NO: 21955 - DNA, 580 bp, Zea mays
  Clone ID: LIB3355-056-H4_FLI
tcggttcacttctccaggtaaggaaagggttcgtactcatggcgccgccgcagccaaagtcgggcctcttcgttggcatcaacaagggtcatgtcgtcaccaagcgcgagctgcctccccgcccgtgccaccgcaaggggaaatcaacgaagagggtgtctatggtcaggggcctgatcagagaggttgctgggtttgctccttatgagaagcgtatcactgagcttctgaaggttggcaaggacaagcgtgccctgaagcttgctaagagaaagcttggaactcacaagagggcaaagaagaagagagaggagatggcgggcgtcctcaggaagatgaggtcggctggtacgcacactgacaagaagaaatagagagcatttcaagttcatggagcctgccagagattatgttccagtgtctgattttccatacatgtagaacctaatagacatgtcaaagtattatgtatcgaaccagctcatgggattttgctccttccaatgcatccagggtttatgtatcgaaccagtttatgggatcttgctcctattccaatgcatccatggtttgtgaatct

SEQ ID NO: 21956 - DNA, 966 bp, Zea mays
  Clone ID: LIB3355-057-D9_FLI
gggaggaggagggagagggaggatgcaggcgcatcaccgtcagtcgtactacgcggtgctcggcgtgcagccgggcgccaccgccgccgagatccgcgccgcctaccaccgcctcgccatgaggtggcacccggacaagatcgccagcggcggcggcggcgccgatccggcgcgcgcggaggaggccaagagcaggttccagcagatacacgaggcgtaccaagtgctgtcggatgacaagaggagggcgctgtacgacgccggcatgtacgacccgctggacgacgacgacgaccaggaggacgtcgagggattccacgacttcgtgcaggagatggtctcgctcatggccagagaggagcccgtgtacagcttggccgagctgcaatccatgctggacgggatgatcaaggatttcaccgcgccacagccttggcctagcggcttctacactggtggcggtggcggtggggcgtcgtcgccgtcgccgctcggcaaaccaagcagccaagagcagagtacggcttcgtcacgcttgcatccctacgggttcggggacgcgccgtgcttcagccgcacggcgttctcacaatgatggcgatgatgaataaataaatttatacatggatcgagcttttatccttctggcagcaatgggggttttctcgctcgtggaggtggagggagagtaagaacccgtgaaagccatcgtccgccagggtcagactctgattggcagttgcaattgctttggactgcggctgcagggatgaaagaaggtgaggtgggaagatagaccacaaggggcacgtagtcgcctagaatctccacccacaaggggtgtttgtttgtttgtactgtttggtttggtttggttttcgtctcttgcctggcatggtagagatgagttatgccagagcatttgtatacaagggtatgccattgccatcaagaataagttacgtc

SEQ ID NO: 21957 - DNA, 729 bp, Zea mays
  Clone ID: LIB3355-058-B2_FLI
gtccaagcattcaccggagaatcccaaatcacactctccagtaaccgcccgcttctccagccgcatctctagccgagtctatctcctcctcctcctccgccgccgcaactatcctaatggctcgcttcgccgtggtcgccgccatcgtcgccctcctcgccgtcgtcgcggcggcgcaggccccggccgccaccccgaccacagctcccaaggccgcgcccaggatggccccgctgccgccaccccctgtgcggtccccggccaccgccccggcgccggccgccaagccgccgaccgccgcggcgccgtccccgctggcctctcctccggccccgcccaccgagggccccgccgcctctgcgccgtccgcgaaggccccgacctcgtccgtctccaccaccccggccggcgcccccaccgtcgcgccttccggcagcggcgccgcctcgcgcgcctccgccctcggcttcgtcgccgtcgccggcgcggtcgcagccgccgtcatgttctagacgcctccccgcggcgtcgggcggtgttgtttatactatcgtgttttacttttgtgcgtgtgtgtgtgggtgggtcgtgggtgattctttcttagatactgagagagcagaggttatgtgagagattctagtgggggtagcgatgggctgttacatatgaatatcatgattcatgatccagaggattattaatggaattctttcatttgtttctagt

SEQ ID NO: 21958 - DNA, 566 bp, Zea mays
  Clone ID: LIB3355-058-C5_FLI
gtttgttctctatggaggaagatgcgagtgagatctccccagcgcataacttatacccttgcttcttggttgttcatgatgttgcagcgttttcctgtagaatcaaaaggaagacgaaagaaattgcaggaggttgggtatgtgactaccatatgcttttcttgtttcttgatcagatgcgtcatgatgtgccttaatgcgtttgataaagcagcagatcttgatgttctgaaccatccaatcctgaacttcttctattacctgctggttgagatagtgccttcagctctggtgctcttcattctacggaaactgcctccaaagcgtgggatcacacaataccacccgatccattagagagcaggccttgggaacaggcaaaggttttctggtggatagtgttacacaacgtggtaaatacagaagggagagtgaaaagtaccactcgagctttgcccagctttttatacggaagtctttagaatcccaggttgaaattgtgtgtaaaattgcgatctctttcactaagatttagaaaatgtaacttatataactttgttattctc

SEQ ID NO: 21959 - DNA, 822 bp, Zea mays
  Clone ID: LIB3355-059-D3_FLI
ggccaagatccaggacaaggagggcatcccacccgaccagcagcgcctcatcttcgccggcaagcagctggaggatggccgcaccctggcggattacaacatccagaaggagagcactctccacctggtgctccgcctcaggggtggcatgcagatttttgtgaagacattgactggcaagaccatcaccttggaggtggagagctctgacaccattgacaatgtgaaggccaagatccaggacaaggagggcattcccccagaccagcagcgtctgatctttgcgggcaagcagctggaggatggccgcactctcgcggactacaacatccagaaggagagcacccttcaccttgttctccgcctcagaggtggtatgcagatctttgtaaagaccctgactggaaaaaccataaccctggaggttgagagctcggacaccatcgacaatgtgaaggcgaagatccaggacaaggagggcatccccccggaccagcagcgtctgatcttcgccggcaaacagctggaggatggccgcaccctagcagactacaacatccaaaaggagagcaccctccaccttgtgctccgtctccgtggtggtcagtaagtcatgggtcgtttaagctgccgatgtgcctgcgtcgtctggtgccctctctccatatggaggttgtcaaagtatctgctgttcgtgtcatgagtcgtgtcagtgttggtttaataatggaccggttgtgttgtgtgtgcgtactacccagaactatgacaaatcatgaataagtttgatgtttgaaattaaagcctgtgctcattatgttc

SEQ ID NO: 21960 - DNA, 812 bp, Zea mays
  Clone ID: LIB3355-059-H9_FLI
cgaagaatcgccatcacagcaagctacgcgcactgaaatcctccaatccacaggacacagctctacttccgcagttcgcactcgcacgcaccgagccgctagcaacgaagcagaaatgtcgctggtgaggcgcagcagcgtgttcgacccattctccatggacctcttcgaccccttcgacagcatgttccgctccatcgtgccgtcgtcgtcgtcggcggcggcggcctccgagaccgccgccttcgccagcgcccgcatcgactggaaggagacgcccgaggcgcacgtgttcaaggccgacctccccggcgtgaagaaggaggaggtcaaggtggaggtggaggacggcaacgtgctgctcatcagcgggcagcgcagcagggagaaggaggacaagggcgacaagtggcaccgcgtggagcgcagcagcggccagttcgtgcggcgcttccgcctgccggagaacgccaagacggaggaggtgagggccgcgctggagaacggcgtgctcacggtcaccgtgcccaaggccgaggtcaagaagcccgaggttaagagcatccagatctccggctgaagaagacatggacgcgaggtgaatggtcgcgtcgcgttcgcgtcgcggcgtcgggtcttgggtttcagcgacgcgactcgtgtgtgtggtactgtggttgctctgctttggtatgtctggtgtgtacgtgtgctgttcagtgtttcgtggtcatcgtctgtacattgtgctgttcggtgagctccccgactcagtgtgttgtgttctgcgagtgaataaataaaaacaaacc

SEQ ID NO: 21961 - DNA, 286 bp, Zea mays
  Clone ID: LIB3355-061-E11_FLI
aaacaaaactgaagcaacccaacataagggcatttatgacacgataaggaatggaaaattcagtgctcatacctcctatcatactacagatttatagcagtggcagtgtggcttgtcgttttctcatcctgctctatttagccttcagcacctctgaactcagctgtcagctcgagttcagaaaaaaaaataacatatcacactgctttaatggggcgatcaccatgctgtgagaagattggactgaagaaaggcccgtggacaccggaggaggatcagaagctgc

SEQ ID NO: 21962 - DNA, 1564 bp, Zea mays
  Clone ID: LIB3355-062-C8_FLI
cttctctgtctccgcggaatcgtactaatctcccgacagatcgcctcaccaagtcaccagtcaccaggcctttgactggtgttgtccgaatagttgagaatggctgacgaggatatccagcctatcgtatgtgacaatggcactggaatggtcaaggccggtttcgctggtgatgatgcgccaagagctgtcttccccagcattgtgggaagaccacgccacaccggtgtcatggtcggcatgggccaaaaggatgcctacgtaggtgatgaggctcaggccaagagaggcatcctgacactgaagtacccgattgagcatggcattgtcaacaactgggatgacatggagaaaatctggcatcacaccttctacaacgagctccgtgtttcgcctgaagatcaccctgtgctgctgaccgaggcccctctcaaccccaaggccaacagagagaaaatgacgcagattatgtttgaaaccttcgaatgcccagcaatgtatgttgctatccaggctgttctttcgttgtacgctagtgggcgaacaactggtattgtgatggattccggtgatggtgtgagccacacggttccaatctatgaaggatacacacttcctcatgctattctccgtttggatcttgcggggcgtgacctcaccgaccacctaatgaagatcctcacagagagagggtactccctcactacgagcgctgagcgggagattgtcagggacataaaggagaagcttgcctacgttgcccttgattatgaacaggagctggagactgccaggagcagctcctctgtcgagaagagctacgagatgcctgatggtcaggtcatcaccattgggtcagaaaggtttaggtgccccgaggtgctgttccaaccatcccttgttggcatggaatcgcctggcgtccatgaggccacgtacaactccatcatgaagtgtgatgttgatatcaggaaggatttgtatggtaacgttgtcctcagtgggggatctaccatgttccctgggattgccgatcgtatgagcaaggagatcacgtccctggctcctagcagcatgaaggttaaagtgattgcgccacctgaaaggaagtacagtgtctggatcggtggctctattttggcttctctcagcacttttcagcagatgtggatctccaagggagagtatgacgaaactggtccgggcattgtccacatgaagtgcttctaagtttttttgggaaatttttccaaaaaaaaaaagaagtttctggggaagttcgacatggtacgtcaggcgttaccggctcattgtgaaccaatacatgaactgccatgataaggttataagcagaaataacagtagcactggctccaattcctgaagatgagtctggtgctccctgctgtatgaaatggatcccactcgtatattcgtcaccgcgccgcactggtgtaacgtgttgcctcagagtttgcttttagctggttccttttttaaaaataagtactgtttttggttggctaccagtcattttgaacttcagtagcaaattatcttattt

SEQ ID NO: 21963 - DNA, 798 bp, Zea mays
  Clone ID: LIB3355-062-E7_FLI
ttccgcggttcaatcaccgcctacgtagaacccctccgctccttccagctcgctctctacctgcaccagcctcgcccgcccttcgctcgccgccgccatggggaggggaaagttcaagggaaagcccaccggccgccgcaacttctccacaccggaggagatcgctgctggtacttcaggtcgccctcgcacctttaagaagaaggaggaagaggaagaggaggaagaagaaagagaagagtcagaggaggaagaatctgaagacgagtctgatgacaaacctaaacataaaggtactgagggtattattcagattgaaaatccgaacttagtaaaagtgaagaatataaaggccaaggaagttgatcttggaaagacaactgaactctcaaggcgtgaaagggaggagcttgagaaacaaaaagctcatgaacgttatatgaaacttcaggagcaaggaaaaacagaacaagcacggaaagatttggaacgtcttgctttaataagacagcaaagggctgatgctgcaaagaaacgcgatgaggagaaagctgccaaggagcagaggaagtcggaagcacggaagtaactgcaatatcatggacgatgagaccacgaaagcatgatctgcgttagttggatatttatttctaatgcatcagttatcttgttataaacctggtccctattctgtatccccataaaatatgcattgacaaaattagtaacagtcttgtgggcgtgtcttcctgtaaacttgagcttgacaaaattagaaagtagtattaaggtcagctt

SEQ ID NO: 21964 - DNA, 1301 bp, Zea mays
  Clone ID: LIB3356-001-A11_FLI
cagttccccgaggcttagaattcggatccctcccagcacatccatccccttcccttccctcgtgccccgccggctctccagcgcgccgtctctgcccagatccaggagatatgcctcgctatgatgatcgctatggaggcacgcgcttgtatgttggcagattggccccccgtactcgttctcgtgatttagaatatctcttcggcaaatatggaagaatacgagaagtggagttgaagcgcgactatgcatttattgagttcagtgaacatcgtgatgccgatgaagctcggtaccaactagatggcagggatgtcgatggaagtcgcattgttgttgagtttgctaaaggggtcccacgtggtccaggtggctcacgtgaatatatgggaagaggccctccaccaggcacaggtcgttgtttcaactgtggaatggatggtcactgggcaagagattgtaaggctggtgactggaaaaataaatgctaccgttgtggagaaagagggcatatagaaagaaattgccagaacagtcctaggagcgtcaggcgtgaaagaagttactcacgctccccatctccacgccgtggaagaggtcgcagtccaagctatagcaggagcaggagtcgtagccggagctatagccgatcgaggtccctatctggatctcctaggggaggccgccgtgaccgtgatgataggagatcgaggagtcttagctacagcaggagccccgtgcggtcgccacctgcaaaggaaaaggagcgcagtcccacacctggcggaagcaggagcccaaggagtcgcagcccacaggatcaggtgatgagcccaccacctaaggataacggcgacaggaatggttcagaccgtggcgacagccccagagggagggaagacagcaggagccgcagccgcagcccatccggtggtaaccgcagccctgcagctaatgggcgtagcccgagccccagaggtgaccgtggcccgagccccatggctgaccgtagcccgagcccaaagggcaatggtaacaacgatggtggtgatgatgatactggccgtggtggttcccccacaggaagcaagtcaccctgaacgctgcaccgtctcagttcttaggtgcttcgtgatgcagtgggcaaacataccaaagacgtgatagctgtatcgtttccctatctgagacgtggacttatttagcttgctttgatcttggactcttattttttctcttatggatatatgatatgatgccttcgggctggcttggatctgaataagtgaatgtggacacgc

SEQ ID NO: 21965 - DNA, 1107 bp, Zea mays
  Clone ID: LIB3356-002-D9_FLI
cagggtcaactgccctttttacttcaagattggggcctgtcgtcatggggatcgctgctctcgtctgcacaacaggccaactatatcaccaactcttgtgcttgctaacatgtatcagcgccccgatatgataacccctggagttgatgctcaaggccaacctattgaccctgagaagatgcaggagcattttgaggacttctatgaggacatctatgaggagttggggaagtttggtgagattgagaatctgaatgtttgtgataaccttgctgaccacatgattgggaatgtctatgtccagttcagggaggaagagcaagcagccgcagcatacaatgctcttcaggggcgcttttactctggccgccctataattgttgagtattctcctgtgaccgacttccgtgaagcaacctgtaggcagtttgaggagaacagctgcaaccgtggtggctactgtaatttcatgcatgtgaagcaaattggcagggatctcaggaggaagctgtatgggcgttctgcttccaggaggtaccatgggagaagccgaagccgaagcccgccaccacaaaggaggggccaccgtgaccgtgatgactaccgtggtggcggcggtggtggaaggggaagaggtagcaggtatgacaggtacgatgatggagccggcagaggtggcaggcatgacaggtatgatgatggagcaggcagaggcggcagacatgacaggtatgatgatggaggaaggcgcaggcatggtagccccccaaggcgtgcaaggagcccagtcagggaaagcagcgaggagcgaagggccaagattgagcagtggaaccgtgaacgagagggaaaacagtgagggctactgttcgccggactctctcatccctatattctaagtatgcttgtgtggatgacattctgcctggctaagtaaaacctttttaagatcaggattcctcggttcattttatggttaaaccagacatcatttgtttccatctgtgttgtgtcggatcctttgctattatgttattttgacaattggtgtcaaatcttttgaggtgtgctattagcttatgatgatgtcagttgtggtttgtcact

SEQ ID NO: 21966 - DNA, 471 bp, Zea mays
  Clone ID: LIB3356-002-E10_FLI
ggccagagttacatgaacaagtcaatgcttgatgacccttgggtggacctgcaacctggtgttggcaacatactaatacctagaggtgagtatgactccaacaagtcctggctcccagaatcgctgcgaaaaaagaaggaaacgccgcctgctcatggacaaattaaaccggcgccaggattgagcctatcagaataccttgacctgtctttcaatgaggtttctgataaagagaagtaggcctttatgtatgcatatctacgacgacagattgatgtagtctttgcgatcatttgcaatagatctgttccctctgaaatcatgtgcaccttttatcttcgctcctcccattgccctgtactgtgctgccatggcaattttactagtatttatgcgttatagcgatcttgttgtaattccttgaatttaaggaactgaataacttatgatctcttaatagatagaggaagc

SEQ ID NO: 21967 - DNA, 938 bp, Zea mays
  Clone ID: LIB3356-002-H10_FLI
ctgcatcgcccccccgcctgctcctcctcccactcccgaccgcctcccgccatgcgctatcgccaacccagacgccacctcttcctccccttctcccctcccgcgcctgtaagttccacctcgcctcggcacgctcgccgtcccgcgccaccgcttcggttttcggcgacgacgaggatgagatggcgcgtgcgtgcagggctgctgctgctgctcgtccctgcgccttctcccccgcgacgacgcgctctcgtccccctccgcctgcgcgcaccgcctcaagccttggtcttggtgtgcccaatcccccacctcgtcctcctaacgcttgtccccgcccgctccccaccctgatctacctgtctctacccttacctcttccatttctacttctccccgttgctgctctgctcctgctgccacaagagtattcgccttcaatcgttgctcgcgcctgtgatttcgtgccgcacgccgacttgtttcccgttttcgctgccgtcttctgttggatcggatttgtatggatcgcttccgagatcggatctacgctgttgcggttaaactgttaaagcttgaggaggttgctggtatcataaaggactttgatgaacctggtactcttgcaccaactggtcttttcgttggaggtacaaagtacatggtgatccaaggtgaacctggagttgtcatccgaggaaagaaggtgatggcctcacgggtgctcctgctttctggcgatttgtgtccttacctgtgataaatacatgtgtgagctaaatctattgatctgcttgtttatgtaacggtacttcaaaactgtatcaccggttatgtcttggcatgcttctttacggatctgttatccatgcatggcagacaatagttggcattttagcagcacaacaatatttctaactattaagtgttaattatct

SEQ ID NO: 21968 - DNA, 1420 bp, Zea mays
  Clone ID: LIB3356-004-D9_FLI
tcagaaacgtagtctgaacttgttcgtggtcctgtcgccttcattagttcgttctgcgcgggaaccgccgatgggggacgccgtggaggacatcgtcatcgccggcgcgggcctcgccggcctcgcgacggcgctcgggctacacaggaaaggggtgaggtgcctggtgctggagtcgtcgccggcgctgcgcgcgtcggggttcgcgttcaccacgtggaccaacgccttccgcgccctggatgccctcggcgtcggggacaagatccgggagcaccatttgctctacgagcggatgatcgccttctctgcagctactggtgaagctgctgcagaagtgagcctaaagattcagagcaaaagcgggccacacgagatccggtgcgtgaagcgggacttcctgctgcggacgctggccgacgagctgccggagggcaccatcaggtactcggccaaggttgtcgccatggaggaagacggcgtcggcggcgccaagaccctgcagctgcacctggcagacggttccaccataaaggccaaggtcgtgatcgggtgcgacggcgtgaactccgtggtggcccagtggctgggcctgccgaagccgatcctgtcggggcgctcggccaccaggggcctcgccgagtacccgggcggccacggcttcggccccgagatcctgcagttcatcggccacggcttccgctccggcgtgctgccctgctccgacacctccgtctactggaactacacctggtacccgtcccccgcggacggcgacgccgaggagagcgtggccaagatgcggagccacgtggtcgccaagctgcggggcgccaaggtcccggccgaggcgctggaggtggtggagcggagcgagatgagcgacgtggcgtcgtcgccgctgcggttccggtccccgctggcgctggtccgcggcagcatcagccgcggcggcgtgtgcgtggcgggcgacgcgctgcaccccatgacgccggagctcgggcagggcgggtgcgcggcgctcgaggacggcgtcgtcctggcccggtgcctgggcaaggccttcgccctgctcggccaggagcgggatgaggggcgggtcgtcacggcggcgctggaggagtacgcggcggcgaggcggtggcgcagcatccagctcatcaccgccgcctacgtcgtcggcttcatccagcagagcaacaacgccgtggtcaggttcgtcagggacaggttcctgtctcggctgctgtccaaaacgctggtcgccatggcggactacgactgtggggcgctatgatctgccgcccctggctggtctgcaagcaatctacgcagcacactcgttctagaaaaactaacgtaataaatcgctggtgtcaagtcaacggttgacctgtgaccgaatgaaaggagtttcatc

SEQ ID NO: 21969 - DNA, 529 bp, Zea mays
  Clone ID: LIB3356-004-E4_FLI
gcacaacggcacgattctcctcctccgtccgcgtagctctcggtttcggcgatgtcggggcgcggcaagggcggcaaggggctgggcaagggcggcgccaagcgccaccgcaaggtgctgcgcgacaacatccagggcatcacgaagccggcgatccgtaggctggccaggaggggcggcgtcaagcgcatttctgggctcatctacgaggagacccgcggcgtgctcaagatcttcctcgagaacgtcatccgcgacgccgtcacctacaccgagcacgcccgccgcaagaccgtcaccgccatggatgtcgtctacgcgctcaagcgccagggccgcacgctctacggcttcggcggctaggccgcctccccttctgatgctttgatgtgacggccgtggtcggttgtgtgtctagttggccggtctactgtagtttgttctgtatcttcgtttcgaggtgttccagtttctagcccatttggtgtaatattttcactgctattatcaatggaaagccctcggttct

SEQ ID NO: 21970 - DNA, 599 bp, Zea mays
  Clone ID: LIB3356-007-E4_FLI
gacaatcttatcccgtgttggatacaccaagggtccctgcctcctccacgtccattggttcctctcgtgttgattggaccaggaacagggtgtgcaccattccgtgcatttgtggaggaaagggctgcacaggctgcagctgaaccaacagccccggttctgttcttttttggctgtagaaaccaagaaaacgattttctatacaaggatttctggctaactcatgcgcaggatgagggggtgttgtcctcgaaaaggggcggtggtttcttcgtcgctttttcccgggatcagccgcaaaaggtctacgtgcaacacaagataaaggaacagagttcaagactgtggaacttattactgtccgatgcagtgatctacattgcaggctcttcgacgaaaatgcctgccgatgttacagctgcgctagaggaggttatttgtaaagaaggtggtgtcaagcaagcggatgcttcgaaatggctcagggatctagaaagggctggtagacttaacatcgagacatggtcatagttgtgatgggcaagaaagtacatattatttatgtttgctgaatatagaaccagtgagaatttcactgt

SEQ ID NO: 21971 - DNA, 443 bp, Zea mays
  Clone ID: LIB3356-007-G9_FLI
ccgaggaatagatggagtcacacaaatggcactgacacacacttgacctcccggtgacgcagcgccgaccgcgcacacactccccagactccgcagggacccaacgcagcggtcaaacaaaggcagcggcagccggccggcagcggcaacggcgtaactcccaagtcacctccgcctcgggctccaaaaatccccacccgacctcgagactgagcggaccgacggtgatgtcgtcgtcggtgcccccgccaccgccccagcaggagctggagtcgccctccgccggcggcgacaaggtcctggccgcagcgcagcacatcgtcaagtccctcgccacctccaagaacgccgctgacgacatgatccgcatactctccggcttcgacaaccgcctctcctccatcaccaacgaccacctcttcccctcccccgaccttaccgcc

SEQ ID NO: 21972 - DNA, 1490 bp, Zea mays
  Clone ID: LIB3356-008-A3_FLI
acagcaagagctgtccctgattatttggaccaaaaaagaatacaaaagctgctgcttcttggaccacctggtgctggtacgagcactattttaagcaggctaaatacttgtacgggactaggttcacccaagaagaacttgaaggtatcaaactgatgatccaaagcaatatgttcaagtatcttgggattttgctagagggccgcgagcgttttgaggaagaggctttgtctagattgaattacacgatttctcagggtgaagaaactcagcatgatgaaaataaagccaatggatcaaattcttgtatatactccataaacgcgaggctaaagaaattttcagattggcttttggatatcatagcaatgggcgacctagatgcattcttccctgctgcaacgcgtgaatatgctccgtttgttgatgagatgtggaaggaccccgccatacaagcaacatttaaaagaaaggaagaattgcattttctccctgatgtggctgagcacttcttgagcagggccgttgaggtgtcaagcaatgagtatgaaccttcagagaaagatgtaatcttcgctgaaggagtaacacaaggaaatgggctagccttcatcgagttcacacttgatgatcgcagcccaatgtctgaaccttatatcgacaacagtgaggcacattcgcagcctctcaccaaatatcagctgatcagagtcagtgcaaaaggcatgaatgatggctgcaaatgggtggaaatgtttgaagatgtccgcatggtaatattctgtgtagcactcagtgactatgaccaattgggaccccctgtaagtggcagcagtcggcctcttgtgaacaaaatgatgcaaagcaaagagttgtttgaggctacaatccggcagccatgcttctgcgatactccatttgttctggttctgaacaagtacgaccttttcgaggagaagatcaaccgcgcgcccctctctagctgcgagtggttcaacgacttctgcccggtgcggacgcaccacaacaaccagtcgctggctcatcaggcatactactacgtggccatgaagttcaaggacctgtactctgcgcagacgaaccggaagcttttcgtgtggcaggcccgtgcccgtgagcgccagactgtggacgaagcattcaagtacattagggaggttctcaagtgggaggaggagaaggatgacaactgctaccaggaggaatccttctacagcacgactgagatgagctcctccccgttcatcagagcggaatgagatttttttgtttttgttttagctgatcaaatcaatcactgataatcagtgtatattgattgtctaattgatttgcttattcgtatcctagttggtattggttgtgtgtattttagaactaaggctgggctggcatataagaatcgagtgtccatgcattgtatgtaccagtactaatttaattttatccagctggttaaaatgtactcc

SEQ ID NO: 21973 - DNA, 1721 bp, Zea mays
  Clone ID: LIB3356-008-B6_FLI
gaacgccatgattgacgcgctgtgcggccacctggcgcagatcggcggcggcgggcccgagtacgatcccgtcttcgccgcgatccaccgccgccgcgccaactggttccccgtcctccacatgcagaagttctaccccgtcgcggacgtcgccgccgagctgcgccgagttgcggacgcccgcgccgccgcagggtcctgctgctactccgaggaggccgcgtccacggtgatccacgagcccatggaagaggctgaggctgaggctgaggctgagcccgaacccgagcaggagcacgagcaggatccggcaccggcggccgagctggctgacggcgccgtggagtaccacgagccggacgtggaagttgattcatcgggagattcgtcggagcggaagcccccctccaccgaagatgacaccgtcgcagacggacatcatactgatcaaggatctcaaggggaacacagcctaccagagagctatcccatctgctctgaccacgaggagtgcattgcccgtcctgagaggatcaagatccagaaaggtttcgtggccaaggaatccgtgaaggggcacatggttaatgtcgtgaaaggcttgaagatatatgaagatgcgtttacgacatcagagatcatgaaagttgcagatttcatcaacgaaattcgtcaggctggcagaaatggagaactttcaggtgagactttcatattcttcaacaagcagatcaaaggaaacaagagggagatcatacagcttggtgtaccgttatttcaacctaccacagaggatgctaattgtcacacagaaccaatcccccttgtcctgcaggctgtcattgaccaccttgttctttggcgtttaataccagaaagcaggaaaccaaatagtgtcgtcatcaacttcttcgatgaggatgaacattcgcagccctacttcaagcctccccatcttgacaaccccatttgcactcttctgctgtctgaaaccacgatggcatttggcaggtcacttgtcactgacagcaacggtaactacaaaggacctctcacactttcactaaagcaagggtccttactagtgatgcgtgggaacagtgccgacatggcgcgacatgtggtgtgcccgtcgtccaaccggcgcgtgagcatcacgttcgcaagggtgaggccatcgacgccggtggacatgagcccactcccgtcccccaccaaggccatgacaccctggcagccgcagccggtcacggcctcccaggtgccgtcgcccgtgagcatgacgcagaagcccccggtcagcggtgccataatcggttatgccccgaccccgcaggccgtgctggcgcccgcagcctggggcatggccatgcgcgcgcccgtcatgatggtggctgcagcgcctgcgaggcccatggtgatggcctcatcgggcaccggcggcggcaacatcagcaagcggatgggccgcagcggcaccggcgtgttcctgccttggacggtcggcccgaagcggtacaacaagcaccttccaccgcgcatccagaagcgccggttctcggcgatgatgtcgcccatcgaggcgcagggctgaggacccgcccgacgtcatgtcgccgtcaaaccgaacggccaagatcaagtaggacccggtgcaacgagccaccgtttaattcctagggttcttggagtgttttttttttctctctcgtcgtcgagtc

SEQ ID NO: 21974 - DNA, 740 bp, Zea mays
  Clone ID: LIB3356-008-E11_FLI
cagaggtgggctggcttctcctccccctcttaccaagtcctcctcgggttagggttccttagggttttgtggaggggcgatggcggcggctgatgtggagtaccgttgcttcgtcggcgggcttgcctgggccaccagcaacgagtcgctggagaatgccttcgcctcctacggcgagatcctcgactccaaggtcatcaccgaccgggagacggggaggtctcgcggcttcggcttcgttaccttctcctccgagaactccatgctcgacgctatcgagaacatgaacggcaaggagctcgacggccgtaacatcaccgttaaccaggcccagtcccgtggcggtggcggtggcggcggtggctacggcggcggtcgcggcggcggcggctatggtggcgggcgccgtgacggcggttatggcggcggtggcggctacggcggtcggcgcgagggtggtggcggcggctacggaggcggtggcggctacggcggtcggcgcgagggtggtggtggcggctacggcggcggcggcggcggctggagggactgatgtgtgggcccatcctggcttcggccgagttatcttatctatctatagtatcgtgttaccgttcgcttctgtcaccgtgttagtgtccgttctacctttggattaggtgttggtacccctgttgttccctttgtttgctcccgctatgaaacgagacgagagaagaatgagcaaggtttttgttcgc

SEQ ID NO: 21975 - DNA, 615 bp, Zea mays
  Clone ID: LIB3356-008-H12_FLI
agaggattcagaaggagctcaaggatctgcagaaggaccctcccacctcgtgcagtgcaggtcctgttggtgaagacatgttccactggcaggcaacaataatgggtccatctgatagcccatattctggtggagttttcctagtcacaatccattttcctcctgattatcctttcaaaccaccaaaggtggcatttcgtactaaggtgttccatccaaacatcaacagcaacgggagcatttgcctcgacatcttgaaggaccagtggagtccggcactaacaatctccaaggtgctgctgtccatctgttccctgctgactgatccgaaccccgacgaccctttggtccccgagatagctcacatgtacaagacggaccggcacaagtacgagaacaccgcgaggacctggacccagaggtatgccatgtagtattttctctacctggcctttggggtcgctgctgccgggacctggacgtgcctccatgtattcgttctatccttcctgtataatgatgaaccgaattgggtttgcagtacagtgccgcgtgtggtgctgaatgcagaatgctgctgtattgtgtcacttggaagctgtaattctcagtgtc

SEQ ID NO: 21976 - DNA, 1239 bp, Zea mays
  Clone ID: LIB3356-009-A3_FLI
tcagaaacgtactctgaacttgttcgtggtcctgtcgccttcatcagttcgttctgcgcgggaaccgccgatgggggacgccgtggaggacgtcgtcatcgccggcgcgggcctcgccggcctcgcgacggcgctcgggttacacaggaaaggggtgaggtgcctggtgctggagtcgtcgccggcgctgcgcgcgtcggggttcgcgttcaccacgtggaccaacgccttccgcgccctggatgccctcggcgtcggggacaagatccgggagcaccatttgctctacgagcgtatgatcgccttctctgcagctactggtgaagcagctgcagaagtgagcctaaagattcagagcaaaagcgggccacacgagatccggtgcgtgaagcgggacttcctgctgcggacgctggccgacgagctgccggagggcaccatcaggtactcggccaaggttgtcgccatggaggaagacggcgtcggcggcgccaagaccctgcagctgcacctggcagacggttccaccataaaggccaaggtcgtgatcgggtgcgacggcgtgaactccgtggtggcccagtggctgggcctgccgaagccgatcctgtcggggcgctcggccaccaggggcctcgccgagtacccgggcggccacggtttcggccccgagatcctgcagttcatcggccacggcttccgctccggcgtgctgccctgctccgacacctccgtctactggaactacacctggtacccgtcccccgcggacggcgacgccgaggagagcgtggccaagatgcggagccacgtggtcgccaagctgcggggcgccaaggtcccggccgaggcgctggaggtggtggagcggagcgagatgagcgacgtggcgtcatcgccgctgcggttccggtccccgctggcgctggtccgcggcagcatcagccgcggcggcgtgtgcgtggcgggcgacgcgctgcaccccatgacgccggagctcgggcagggcgggtgcgcggcgctcgaggacggcgtcgtcctggcccggtgcctgggcaaggccttcgccctgctcggccatgagcgggatgaggggcgggtcgtcacggcggcgctggaggagtacgcggcggcgaggcggtggcgcagcatccagctcatcaccgccgcctacgtcgtcggcttcatccagcagagcaacaacgccgtggtcaggcgataaggctcaagtgggtcaac

SEQ ID NO: 21977 - DNA, 473 bp, Zea mays
  Clone ID: LIB3356-009-A7_FLI
ggagaccccgagacgagcaaggcggcgagggagggcaaagaccacgtaccagcgcgcacgcacaatgtcgggagcacagggcgcgcacccggtcggccagacgacgccgacgacgtacgagtcggtgggcggcggggagaaccgcacgcgcacggacctgcggtcgcgggaggaccagggcgccatccagatcgagaaggtgcaggacaaggtcgacgatgccgcggggcgtggggtagaccagagcaccttcggcgccaagaaggagggccgcgacgacaaggccgatgccggggcaaccggcacaggcgcgtgattttgtgcccttccgcagtacctgagcgtgtgtgtaccatagctttgtgtccgctgcttggctgctctgtatgcgcgcgcgtggaatgtgtgaaacctttctgtaaaaatgcacttgttagattgaaataaaacaaggaccgactggtctgaatccc

SEQ ID NO: 21978 - DNA, 778 bp, Zea mays
  Clone ID: LIB3356-009-B11_FLI
caacagcaaaaagggctaagcccagacttgcttagatacaaaggtcccatacactgcgcaagaactatagttcgagaggaaggcctctttggtctttggtctggagcactaccaaccgtcatgcgcaacggcacaaaccaagcggcaatgttctcagccaagaacacgtttgatattgttctgtggaagaagcatgaaggggacgggaaggtgctcctgccgtggcagtcaatggtctctgggttccttgcaggaacagcaggccctgtctgcaccggacccttcgatgtcgtgaagactaggctgatggctcaagggagaactggggacgccaagtacaaaggcatggtccatgcgatacgaacaatatatgccgaagaggggctgcgagccctgtggaaaggcttgcttccccggctcatgaggatcccacctggacaggctataatgtgggctgtagctgatcaggtgatgggcctctatgagcgaactcatctgcagccagttcatatttgaccattctattgcagtgctggtgctgcactgaatttttttttgttggttctcaatcggtggttagacgtggaagtcgtcgattatggatattcgtttgttcattgcttagagttgggtattgatggaagcaatggaagactcttgtactactattttgttgtcaataatcatgaaaccctccaccttttggactggggatatctcggttgtggtgactattatggttgttagactgcagtagcatcaatttgtatgattgaat

SEQ ID NO: 21979 - DNA, 140 bp, Zea mays
  Clone ID: LIB3356-010-A5_FLI
tagcctaaacctgtatgattgttgagatgagtagtctttcttgctgctgttaaaaaaagaacaaggatgacaacgagaaaatacaagatctaaagaagattgatagtgtcgcatcataaggccagggtgcattcccttat

SEQ ID NO: 21980 - DNA, 545 bp, Zea mays
  Clone ID: LIB3356-010-C3_FLI
cgacgcggcggcgagagcgcgagagtaggaggaggcgtcggccatgacggggaaggcgaagccgaagaagcacacggcgaaggagatcgccgcgaagatcgacgcggcgacgacgaaccggggcggcggcaaggtcgggcaggcggatcggctagggcaggacaagggcgggcacgcgaagctggcgtgcccgctctgccgcaccccggcgcccgacatcaagtccatgcagatccaccacgaggcgcgccatcccaagctccctttcgagccggagaagctcgtcaacctgcactcctccacccccgccgccgccgaggccaccacctccaagcccaagcccggggtccgcggcagcctcaagaagtagctggctggcttgcctgcctgactgcctggggtaattcccttcgatttcaatcccatccaccgacccgatctacaatcaatcaaagtaccgcccgccctccggcctgcggtgtactgttagtctgctgctgctgcttcttatcgttgttatattgctgatacatgtctcgcgtgat

SEQ ID NO: 21981 - DNA, 1102 bp, Zea mays
  Clone ID: LIB3356-010-F1_FLI
cccacaccccccgagctgagcttagctccactccagctccaatcacagtcgtgaccagagcgcgagagctagctagagggccgtgaaaatgccgatcaataggatcgccctggggagccaccaggaggtgtaccacccgggcgccctcaaggcggcgttcgctgagttcatctccaccctcatcttcgtcttcgccggccagggctccggcatggccttcagcaagctgaccggcggcggcccgacgaccccggcgggcctgatcgcggcggcggtggcgcacgcgttcgcgctgttcgtggcggtgtcggtgggcgcgaacatctcgggcgggcacgtgaacccggccgtgaccttcggcgccttcgtgggcggcaacatcaccctgttccgggggctcctgtactgggtggcgcagctgctggggtccaccgtggcgtgcttcctgctccgcttctcgacgggcgggcaggccacgggcaccttcgggctgacgggcgtgtcggtgtgggaggcgctggtgctggagatcgtgatgaccttcgggctggtgtacacggtgtacgccacggcggtggacccgaagaagggcagcctgggcaccatcgcccccatcgccatcggcttcatcgtgggggccaacatcctggtgggcggcgccttcgacggcgcgtccatgaaccccgccgtgtccttcggccccgccctcgtcagctgggagtggggctaccagtgggtgtactgggtcggccccctcatcggcggcggcctcgccggcgtcatctacgagctgctcttcatctcccacacccacgagcagctcccctccaccgactactaaaagccgaagccgaccgacccaggggtgcgcagcgcagcgcagctagcatccagctctctctccccggcccgctcgccgccgtttagtttctctcgtgcacgtgcatgcatcgtagactgtctcaggccgccgctgcgccggcgccgctcgcatcgtttgcttttccttggaccagcagtcgtcgccgtcaggttgagctgcttgtaaccgttaattccggacccgtttgcttctgtaagatttgtgcatttgcctgtgagt

SEQ ID NO: 21982 - DNA, 2166 bp, Zea mays
  Clone ID: LIB3356-010-G7_FLI
gcagcttagcctagcactgctgcagcttgcttgctttgctttgcttcttcttggccaggcctcagagcagagctttggcttggctagtcgtcgtccgcggatagtctccgctgcaccgtgtgcgtgcaagcaaggcaaggcaaccaggcagccgcggcgacgaccgatcgtcaacaatctcgatcgccttggccggcggccggccgggccaccgcaagccgcgagcgatggaagagcagctgggcccggtggcggtgacgcacctgctgcagcacacgctgcggagcctctgcaccggcgacgccccgcagtgggtctacgccgtcttctggcgcatcctgccccggaactacccgccccccaaatgggatctccctggcgccgcgtacgacaggacccgagggaacaggaggaactggtacgcgctgctaactgcacacacagcacgctctcatattccttcctccttcctttgtggttctgtgcatgtcttcggtggagtcccatgtgaatgccctcggtgtgttcttgcgcgtctcgcttaggattctggcatgggaggacgggttctgcaacttcgcggcggccagcagctctgccgccgcgtccgcgtgcggccaagagggggcagcggcagctgcggcggttgcatatgccggggactgtgaggcagctgtgcaggatgcggtgaagcaccagcaccagcaggcgcagggcctgcagcctgagctgttcttcaagatgtcccatgacatctacaactacggcgaagggtaggtggctgactagtccgcatgcacaccacgattagcgagccggttaaccttcctctcctgttaatgatggcgccggggccctcctcctcctcctcctgttcttggtgcggtttcctttcgtgctgcagtctgatagggaaagtggcggcagaccacagccacaagtgggtgttcaaggagccccaggagcacgagacgagcaacctcatctcctcctggagcaaccctgcagactctgtaagaagctcctccatctctgtctatcttttacacaaattaaactgcaccgtcgtttacctcaagccactaatctcctgtgtgagccatgcacatatggcctgtgttctttcgcagcatccgaggacgtgggaggcgcagttccagtgcggcatccaggtgcacacttttaggccttgacaaatcgcaatccggccccttttgatcagaggcagcagctagcgctagctagctgtgggctgtgtggcctacctctctgctgcgatgccaagacatggccagctagctgactctgccatgccatggccaattggcctgcctgcctgcgtcggcttttcttttttctttttttccccccctctcgctcacattctccgctttgctctgcacttgtgcagaccatcgccctgatcgctgtcagggagggcgtcgtgcagctcggctccatgaaaaaggtaacggaggacctgagctacgtggtgatgctccgccgcaagttcgggtacctcgagagcatcccgggggtgctgctcccgcacccgtcgtcggcgggcgtgttcgcggccggtgggtgcgtggggcccccgccggacatcgccgcggcgtggtcgtcgggcctgatgcaaccgccggccgccggcgccggtccgccgctggagctctacgacccctacggcgccggcgcgatggccgcagggccaggcgccgccgccgccgctgcgtccatgcacatcatgccgtcgatgagcagcctcgaggcgctgctctccaagctgccgtcggtcgtgccgccggcgccgcagccagccgggtccgtgcccggagcggcgccgccgtccaaggacgacgattacgacgacgtgcagcagtgccatggcatggacgacgtggcggcgagcaacggcgcagcaggggtcgtcgagagcgcgagcgcgagcccgagcggcgctgcctccgcgcccatgtcgtcgtcgtcgtcctactttgtcaacgtgggcagtagtattaatcccggcgatcatgggttttagctcgtcgtggcagcccggccggctgctcgtctcgtctgatggcacatggccatggcgtgcttgttaattaattgtgctggtcttcgctagggcgaaaacctatcgatcatatattaccagtt

SEQ ID NO: 21983 - DNA, 464 bp, Zea mays
  Clone ID: LIB3356-011-C4_FLI
gctccgtgctccagcgggagtccgcggcggcggtgaagatgattatcccagtgcgctgcttcacctgcggcaaggttattgggaacaagtgggatgtctacctcgatctcctccaggctgactactcagaaggggatgctctggatgctttggaattgttccgctactgctgcaggcgaatgctcatgacacatgttgacctcattgagaagttgctcaactacaacaccctagagaagaccgagacaagttaagcgagcacatcatgctccaaaaacactactgtttggcagtatcatagagcttaggtagtatgttgtctcttctctatcagtagaaatgggttgtgagtgtgaacatgcttttgctcatgagcattcaaggacttttcatgcgacagtgcttgttgccacctatgcaacgatgttggatattttaagtgatataattgctaaaagaaagct

SEQ ID NO: 21984 - DNA, 775 bp, Zea mays
  Clone ID: LIB3356-011-E12_FLI
aggaagatggggctcgcgttcgggaagctcttcagccggctcttcgccaagaaggagatgcggatcctcatggtcggcctcgacgccgccggtaaaaccaccatcctctacaagctcaagctcggcgagatcgtcaccaccatccccaccatcggtttcaatgttgaaactgttgagtacaagaacattagcttcactgtctgggatgtcgggggtcaggacaagatcagacctctttggaggcattacttccagaacacccagggtcttatttttgttgtggacagcaatgaccgtgaccgtgttgttgaagccagagatgagctccacaggatgctgaacgaggatgagctacgtgatgctgtgctgcttgtttttgccaacaagcaagatcttcccaatgccatgaatgctgctgagattactgacaagcttggattacactccctgcgccagcgacactggtacatccagagcacttgtgccacaactggcgagggtctgtatgagggcctggactggctgtccagcaacattgcgagcaaggcttgaggcctaccttgaatatcaactgcgaactgactaggagctccggatgtatcatggaaactcaggacagaatcgcagttgcaatctgttagatgtcttctaccggcactatatatttttttttgtttgatgtgtaatgatgttactgttcaacgcttattaccctactatactgttggatgttctttggacctgtttcatttcgcacaaggattggacttccaat

SEQ ID NO: 21985 - DNA, 629 bp, Zea mays
  Clone ID: LIB3356-011-F10_FLI
gatacattgaagattatggcatttcttgtcactgtaagccttctcctggttcatcagttgtgtgtggcagagactgctattgtagcatgcttttctcttgctgttcatcacaatgtgaatgtgatattgcgtgcaccaataaatcattccagcacagacctcttacgaaaaccaaattgattaagacagagaaatgtggtcatggattggttgctgaggatgaaataaagaaaggagaatttgttattgagtatgttggagaagttattgatgacagaacatgtgagaataggctatggacaatgaaaaggctggatgacactgacttctacctttgtgaggtcagcagtaatatggtcattgatgcaacaaacaagggaaacctgtcccgatttataaaccatagttgtgaaccaaacacagcgatgcagaaatggactgttgatggagagaccagggttggaatttttgcacttcgtgacataaagataggggaggagctgacatatgactataaatttgtccagtttggagcagctcaggtttgtcattgtggatcttcaaagtgcagaaaaatgctaggcacaacaaagtattcaggaagctcacagaatcatcgtaccaagaag

SEQ ID NO: 21986 - DNA, 1235 bp, Zea mays
  Clone ID: LIB3356-011-F3_FLI
tgcaggcttgcgcctgtcacttctcccctgtccttgctccccctcgatcccgcatcagtgcgtcacattcaccgggaatggcaacgctcaaggtcccagccactgttcctcccgtcgccgatgactgcgaccagctgcgcaaagcattccaagggtggggcacgaacgaggcgctcatcatctccatcctcggccaccgcgacgccgcgcagcgccgcgccatccgccgcgcttacgccgaggcctacggcgaggagctcctccgctccatcacggacgagatctccggcgacttcgagagggccgtgatcctgtggacgctggacccagcggagcgcgacgcggtgctggccaacgaggcggcgcggaagtggaagcccgggaaccgtgtgctcgtcgagatcgcctgcacgcgcacctccgcgcagatcttcgcgaccaggcaggcttatcacgagcggttcaagcgctcgcttgaggaagacatcgctgcgcacgtcactggggacttccgcaagctattggtgccacttgtaagtacttaccgctatgatggaccagaggtcaacacaaggttggcacactcagaagccaaactacttcatgagaagatccatcacaaggcttacagtgatgatgagatcatcagaatcctcaccactaggagcaaacctcagctgattgctacattcaatcattacaatgatgcatttggccaccgaatcaacaaggatctgaaggctgacccccaggacgagtacctcagaacgctgcgggcgatcatccggtgcttcagttgccctgacaggtactttgagaaggtggctaggcaggccatagcggggctaggcacagatgagaactccctgaccagggtcatcaccacccgcgctgaggtggacctcaaactgattaaggaggcgtaccagaagaggaacagcgtgccgctggagcgggccgtcgcgggggacacctccggcgactacgagagcatgctcctcgcgctcctggggcaggagtgatgagccgtactggtgcgctggtgcctttctgaccggcgccgtggtgtttgttcgtgatcgtaataaacctgattgcctagctgtacgtgaggctgtttcttcggtcctggtactgtcgctgcagcatgcatagcagtggaccagtggtgataaataagttactgtgctttcgacgaatgaaccctttttttgtgtctaagttgtggaacctcg

SEQ ID NO: 21987 - DNA, 651 bp, Zea mays
  Clone ID: LIB3356-012-B9_FLI
ctccgtccagcggaaattcgaaaccagcgtccagcactagggtgaactggctgtttggacccgttctttatcttgcgtcgttcagccggcgtcctctctctctctctcgtggcgacgactgggcgacctccccgcccccgctgctctacgccaggtgcccaggtcttcgtcgggcccttcgccgaagagcagccaacaggtatgcgcaccccttctcttcccttcccgctgtgcgaagctgaggacccaaaccctagctgacactgttttggctatttgcgtttggatcggatctaatttcaggtgtatacgtgtagtattatgctttctaacttgattttcttgcaaaataaaaacatgggtccgctcatcttccctactgggtccgcctgggcatatgtaggaattttagctatcttttagccgattgaatcaacttctagaatcactacattaacttgtattcgttgagatttacttctttaggttggtgacatattttgccagattactgggtatattgtcagctatattagtctactaatggatgttgccttttcttggtggtagctttaactgcgatttcggttgtttgtttcgtttctatcagatattaataatctaaaatggtgtgcagcttaggttaaaatc

SEQ ID NO: 21988 - DNA, 729 bp, Zea mays
  Clone ID: LIB3356-012-D5_FLI
ttctcctccccctcttaccaagtcctcctcgggttagggttccttagggttttgtggaggggcgatggcggcggctgatgtggagtaccgttgcttcgtcggcgggcttgcctgggccaccagcaacgagtcgctggagaatgccttcgcctcctacggcgagatcctcgactccaaggtcatcaccgaccgggagacggggaggtctcgcggcttcggcttcgttaccttctcctccgagaactccatgctcgacgctatcgagaacatgaacggcaaggagctcgacggccgtaacatcaccgttaaccaggcccagtcccgtggcggtggcggtggcggcggtggctacggcggcggtcgcggcggcggcggctatggtggcgggcgccgtgacggcggttatggcggcggtggcggctacggcggtcggcgcgagggtggtggcggcggctacggaggcggtggcggctacggcggtcggcgcgagggtggtggtggcggctacggcggcggcggcggcggctggagggactgatgtgtgggcccatcctggcttcggccgagttatcttatctatctatagtatcgtgttaccgttcgcttctgtcaccgtgttagtgtccgttctacctttggattaggtgttggtacccctgttgttccctttgtttgctcccgctatgaaacgagacgagagaagaatgagcaaggtttttgttcgcagct

SEQ ID NO: 21989 - DNA, 527 bp, Zea mays
  Clone ID: LIB3356-012-D7_FLI
gccgccgcttcgtcgtctccgccgcagcgatgccgtcgcacaagaccttccggatcaagaagaagctggcgaagaagatgcgccagaaccgccccatcccctactggatccgcatgcgcacggacaacaccatcaggtacaacgccaagcgcaggcactggcgccgcaccaagctcggcttctgagcgcgcggatcggccggctcctgcgtcggaattctagggtctctacctttcctttggttttatcgatgtctcttgtgtttctgtaagctagcaaacagttccagaaagcttttgttaagattttgatgacgctaagaggattgatgctactatgctgtactcaggattccatgctgcattgcgatgctaaattaaagaacctctgttaccttactttatgtgtagtgttgcagtgattgagtcctagatttgatcactgggtcagttccgatgcatggattgtggtgtctctctttgactacgctggaatgaaatgaatacataagccattcatataccttc

SEQ ID NO: 21990 - DNA, 1047 bp, Zea mays
  Clone ID: LIB3356-012-G12_FLI
ctcccgactccttttcctctctctctctctctcggcctcatccatccaaccaggcgagccaacaagcaagcaaaagtaaacggggcgaggagctggagagacgccggcgacgcgaagcaaccgcccgatcggagccgcggttgagcaggaggagggagccggagatggtgggtctcgtcggcggcagcacggcgcgggcggagcacgtcgtcgccaacgccggaggggaggcagagtacgtgcgccgcatgcaccgccacgcgccgaccgagcaccagtgcacctccaccctcgtcaagcacatcaaggcgcccgtccacctcgtgtgggagctggtgcggaggttcgaccagccgcagcggtacaagccgttcgtcaggaactgcgtcgtgcgcggggaccagctcgaggtgggcagcctgcgcgacgtcaacgtcaagaccggcctgccggcgacgaccagcaccgagcgcctcgagcagctcgacgacgacctgcacatactcggcgtcaagttcgtcggcggggaccaccgcctccagaactactcatccatcataactgtccaccccgagagcattgacgggaggccgggcaccctggtgatcgagtcgttcgtggtcgatgtgcctgatggcaacacgaaggacgagacatgctacttcgtcgaggccgtgatcaagtgcaacctcaattctctcgcagaggtgtcggagcagctagcagtggagtcacctacgtcgctgatcgatcagtgaagtcacctgcgtcgcccatcgatcagtgaccaccggtacaaaaaagaagcttcgaaggctggctggagagttcaacctttttgagaccggtggtttcgccatcgtcttctgcgtgtaatgtctcttggaatatggaagtattagtcgttgtgtaggattaaacatctgtagtagcttgtatgctagggatggttgtttagccttagaaactgcacctagatacctcatggcatgtatgcatactgctagtatgtgtagagatcagggaaagcatggagcgggttttgcc

SEQ ID NO: 21991 - DNA, 1313 bp, Zea mays
  Clone ID: LIB3356-012-H5_FLI
tcccgagccccagctactctcctatccaagcccttctcgctcaatggagcaggtacgcctccgtggtctcatcctcggccccgccgccgccgccgccgccccctccatctccgcctcgaggtccatcgaggtcgagcggtggaggtaccacttcctcgtcgctgaaccctgcagaggtcgccaagttcgcctccatcgccgagacatggtgggattctagtggcccattcaaacctttgcatgtgatgaatccaacccgactgtcttttatccgctccactctctgtagacatttcaggagggatccaaattcatctaagccacttgaaggtctcaaagttattgatgttggatgtggaggtggcattctgtcagagcctcttgctcgaatgggtgctacggttactgcaattgatgctgttgacaagaatataaagattgcaagtattcatgcggcatctgatccaacaactgcttcgattgagtattgttgtgcaacagctgagggactggtaaaagagaaaaggctgtttgatgctgtaatttctcttgaggtgattgagcatgtcgccaatcctttggagttctgtgaatccctctcggctttgacaattcctaatggtgccactgtgatttccacaatcaaccgatcaatgcgagcatatgccactgcaatagttgctgctgagtatatcctcagatggcttcctagaggcacacatgagtggtccaaactggttaccccggaggagcttgtcctaatgctgcaaaaggcttccgtctccgtcgaagagatggcagggttcgtttacaatccgttgagtggagaatggtccctgtcagatgatatcagtgtgaactacattgcttttggcgtcaagaagggtgaagcatcatcgacaaatggcagagatgcaagtttatcatagctgaagaaaaacacgtgaccttgaattgtcgggcatcattttcagaggaccaattcatgtcactgaaatcttactgctaaggatgcaaccaagtagcagaagagaattctcttgccctttgttagtcttggaaactggagcttgtggagtgatgcttcctggaagcgccattgagaagtcaagttgacaacaagtgactgctaacaagtagagctatctgccttttttgggtaatgtttcgggcagtttttctcaattttgtggcaatcactgatgatctaaataaaaataatactactacactgctgtacgtgaaaactgaacagatttgctgtctggaaatgtaactatttttaacagttaaggcttgttcgtttttgcgtt

SEQ ID NO: 21992 - DNA, 354 bp, Zea mays
  Clone ID: LIB3356-013-A2_FLI
gctatatcgtgcttacaacctctgcgggaattatggatcacgaggaggcccgacgcaagaacgtcggaggcaaagtccttggtttcttttattaattaaagggtcgtccgagtttcttctattaaatggtgggtcgaccgagtttttgtttttgtttttggtctgaattgaatagagtgtttgcttcgttaagactggaatgtgttatgtgcctttgttaagactggatcactggaatgtgggaatctttatgagtgattcggcatgtaactaactggaggccacgagacagtttggcgcaaggcctatgaccccctaggaggagtgtcgatcaactagattctcacatttttt

SEQ ID NO: 21993 - DNA, 953 bp, Zea mays
  Clone ID: LIB3356-013-C3_FLI
ggcgaggagggcaggaagaccgaagaccgagccgtgcgggggctcgggacgggaacgggacaggaccccaaaatctcagatccttcctgcccgcccgcccgtgcccgtcgacgcgtcgttcttgccggccgcgccccacctccgccctctcctcctccagggggatcggatacgccacaggctgcgcgatggtgctgtgggtcttcggctacggctccctcatctggaaccccggcttcgacttcgacgacaaaatcctcggcttcatcaagggctacaagcgcacctttaatctcgcttgcattgaccacagaggcacaccggagcatccggcgaggacctgcacgcttgaaaccgacgacgaggccatatgctggggaattgcatattgtgtcaagggtggtccagaaaaagagctaaaagcaatacagtacttggagagaagagagtgtgagtacgaccagaaaatatccattgatttctacaaggaaggagatcccttgaaaccagctgtgacgggcgtcttagtgttcgtttccactccagatccaattggcaacaagtactatcttggccctgctcctctgcaggatatggcaaggcaaattgctacagccaatggccctactggctataatagggattacctgttctcaatggagaaggcattagccagcattagccacgaagatgattcgatcatagagcttgcaaacgaggtgaggaaggtgctcaacagaacaaaggagaccaagatcactggtgccaatgcttccatgaaatcacatgcccctcttgtgcacctgtccgcgcttccagaaggcaccgttgtggactcgagatagcgacctctactcggaatttactttcagctcttgcatgtttgtggttgtggccatcatgtactgattttcccttttcaacagttgtcgtgaggctgtatcgtctggagt

SEQ ID NO: 21994 - DNA, 1218 bp, Zea mays
  Clone ID: LIB3356-013-D9_FLI
gctctcgcgtcttgccggatctgagtgggctcgcttgcattgtgctgtgctgtgtgtgcagcgggagagaagcgagggaaagatggaccggtaccagagagtggagaagcagagggaggaggcacccatcaaggaaaacgagatccgcattaccacgcaggggaggatgcgcaactacatcacctacgccaccggcttgcttcaggacaaaggttctgatgaggttgtattcaaggccatggggagggctatcaataagactgtcatggttgtggaattgatcaagaggaggattgttggcctccatcagaataccaccactggatctactgatattactgatatgtgggagccattggaggaaggcctacttccgcttgagacaacaagacatgtctctatgataactataactctttcaaagaaggagctggacacatcatctatcggatatcaatctcctttgcctgctgatgaagtgaagcctttggttaaatatgataatgacgaagatgcacactcacctggtggccgtggaaggggtcgtggtggtcgaggccgtgggcggggcagggacaggggaagaggtggacgtggaaatgggttcaatgactatgctgatgccggttgggaagacgatcacgcccctgcatatatgggcaatggatatgcccgtggaagaggtcgtagtttcaggggccgtggcaggagaggcggctacaataaccagcctgaataccaacaagacggaggttattacgaggaggcacctgtccatgctccagctttaggtcgaggtcgtggtcgtgggagaggtccattcagaggcagaggacgtggtggcaacgcaaacggcgtgatgcacgctgctgcggacagtgcataagctgttcgttaccagtccaggctggttgtttgttggatgcctgctccaagtatgaagatgtatcatctgttgttatcagttaacgtcattacttggcataagattgacattctgtgtcggagtgcagccaggttttgatacttgactagatctgtagggtagcgtctttacagtgctttctcctttcacagtagatgtcttaaactaattgtagtttcgtaaaggtttagagcagggcattctttctatttttaaatataaaaacgaagtcttggtgtatgttcaaatgtgcacgtttttatatgtgctgtttttgaaatgcgagttagatt

SEQ ID NO: 21995 - DNA, 577 bp, Zea mays
  Clone ID: LIB3356-013-F7_FLI
gtgttagctgaggggaggcatcgatggctggagccaagagaggaatcctgctcgtcctgtgcctggccgtcgtcttggtggcgctcgggagtggcggcgtggaggcgaggaagcgagggaagcagtccctggggttctacgagctgcgtcggggcgagttctccatggtcgtcaccaactggggcgccaccatcctctccgtcaggctccccgataagaacgggcacatcgacgacgtcgttcttggctacaagaacatcggatcgtacgtgaacgacacgacctacttcggcgcgctggtggggcgcgtggcgaaccgcatcgccggcgggcggttcaccatcagggaccacgcctaccacacgtatcggaacgacggcaacaacacgctccacggcggccaccgcgggttcaaccaggtgttctggtccgtccgggagcgcgtcacgggggagttcccgcacatcaccttcgcctaccgcagctacgacggcgagcaagggttcccgggcaacctggacgtgctggtcacctacaagatcgacggcgactgctcgtacagcgtcaccatgtacgc

SEQ ID NO: 21996 - DNA, 680 bp, Zea mays
  Clone ID: LIB3356-013-F8_FLI
ctcacagcaaacaccgcgaagccgcccccgctcccaaacccgaccgagcaaagcgcaaagccccccaaccgcggatcaatccgcagcatcgatggcgcccaaggcggagaaaaagccggcggcgaagaagcccgcggaggaggagcccgcgaccgagaaggcggagaaggctccggcagggaagaagccgaaggcggagaaacgcctccccgcgggcaagtccggtgccggcgagggcaagaagggcaagaagaaagccaagaagagcgtggagacctacaagatctacatcttcaaggtgctcaagcaggtgcaccccgacatcggcatctcgtccaaggccatgtccatcatgaattccttcatcaacgacatcttcgagaagctcgccgcggaggccgccaagctcgcccgctacaacaagaagcccaccatcacctcccgcgagatccagacctccgtccgcctcgtcctacccggcgagctcgccaagcacgccgtctctgaaggcacaaaggcggtcaccaagttcacttcgtcttagattggttgccttccctctcgtttgtactggtgtctggtagtagatctcatctagttgggggtgctgttgctagtcggtcgtgggtccctttggtatgataggccctgttcaatgggtatgcaagtgattagtttgt

SEQ ID NO: 21997 - DNA, 979 bp, Zea mays
  Clone ID: LIB3356-013-H1_FLI
cgcttcgcccctgaatccctaattccgctaccgcgcatagggttttaggcttttagcacacaccggcggcgctgcataccaagggcttcccctccccgcgccgatgccgcgcaagcacgcgccggcgtttacgccggaggcagcctccgtctcctcgtcaggcggggctggccagccgcataacctccccgtgcttcaggcgaagatgaagcgtgacccggagggctacgaggaggagctccgccagctccaccgccacttcgagtcctcggtgttcctcttccagcagcaggcggcgctggctacaacctcgtcctcgggaggcggcggggaggtggccaaggagctcggggacctcgccctgttccttgctcacgtcgcgcctttctacccggatgacctcgccgatttgcccgaccagattggtggcttgctcgacaccaacgcgcgtgggctgccgccggggctcaggtctcacctcgtgcaggcgcttgtattgctggtgaatcggaagattgtcgatcttgaggacacaatggagttattcatggagcttcaagttattggagatcgagctgtaaaaaagctagcattttcgcatattgtacacagtatcaggaggatgaaccagaagcacaagaatgaatcgacaaatcgtaaactgcaaaacgtcctttttaaattcttacaggctgaagaagagtcacgagcaaagagagcatttactatcctttgtgatcttcaccgtcgaagggtctggtttgatgaacgcacaacaaatgcaatatgcgatgcttgtttccacccttcctctaggattatgatagctgctatttcatttcttcttggatatgaaaatgctccacaagaggatgatagcgacgcatcaagcagtgaagatgaagcagatcaaaacccacaaattctactcagtaaacaggacgtttataaggcaaatcacaagggtacgtctgctagt

SEQ ID NO: 21998 - DNA, 1014 bp, Zea mays
  Clone ID: LIB3356-014-C1_FLI
ctcgtgttcggtgagggagtcgtgaacgatgccacgtctgttgtgctcttcaacgcactccagaacttcgatcttaaccacatcgatgtagccgttgtgctgaatttcttgggaaacttctgttacttattcgtgtcaagcaccttacttggagtgtttactggattgctcagtgcctacataattaagaagctatatataggaaggcattccactgaccgtgaggttgcgcttatgatgctcatggcttacctctcctacatgctggccgagctgctagatctgagtggcattcttaccgtattcttctgcggcatcgtgatgtcacattacacctggcataatgtgacagagagctcaagagtcacaaccaagcatgcctttgctactttgtccttcatcgccgagacttttctcttcctgtatgtcgggatggatgccctagacatcgagaagtgggagtttgccagtgacagccccggtaaatccatcggcataagctcgattttgctagggttggttctggtggggagagctgcatttgttttcccattgtcgtttttgtccaacctgacaaagaagtctccattggagaaaataacatttagacagcaaattgtaatatggtgggctggactgatgagaggtgccgtgtccattgctctcgcttacaacaagttcacgagatctggacacactgagctgcacggcaacgcgataatgatcaccagcacgatcactgtggtcctgtttagcactatggtgtttgggatgatgacgaagccattgatccggctgctgctccctgcctgcagcaacacggccacctccgagccgtcctcacccaagtccctgcactcgcctctcctgacgagcatgcagggctcggacatcgagacggggtcggcacagattgtgaggccgtccagcctccggatgctcctaagcaagccaacccacacggtgcactactactggcgcaagttcgacgacgcgctcatgcggcccatgttt

SEQ ID NO: 21999 - DNA, 922 bp, Zea mays
  Clone ID: LIB3356-014-C6_FLI
cgaaacctcagacactctgcatatatcctctgcgcgtgtatctcgtcgaacagagccgaaagctggagcttccaatggcgggaggcaacgacctgaaggtgctcggcgtgtggacgagcccgttcgtgatccgggtccgcatcgtgctcaacctgaagggcctggcgtacgagtacgtggaggaggacctcggcaacaagagcgcgctcctcctgggatccaacccggtgcacaagagcgtgccggtgctcctccacgccggccgcgccataaacgagtcccaggtcatcctgcagtacatcgacgaggtgtgggcggggacggggccggccgtgcttccggccgacccctacgagcgcgcggtggcgcggttctggggcgcgtacatcgacgacaaggtggagtcggcgtggctggggatgctgttcaggtgcgcgaacgaggaggagagggcggcggcggtggcgcgcgcccgcgaggcgctcgacgcgctggagggcgcgttccgggactgctccagggggaggccgttcttcggcggcgacgacatcgggttcgtggacgccgttctcggcgggtacctcggctggttcggggccgtcggcaggatcatcgggagcaggctcatcgacccggcccggacgccgctgctggccgcgtgggaggaccggttccgcgccgccgacgtggccaagggcgtcgtgcccgacgacctcgacaagatgctcgcgttcctgcagaccctgcgcgctatgaactacgccaagtgagagtgtttcgtcgcatgaacgtgtgccgtgccgtgcacgacctatgatcagttcatgtcgatacgtctatcactcagttttgcttcttccgtcaataatcggtgtgctgaatacatgtacaacagctgcctataattttgcttctttcttct

SEQ ID NO: 22000 - DNA, 1918 bp, Zea mays
  Clone ID: LIB3356-014-G4_FLI
ggtcgccccggctgggattcctcctccacgtagctctcctcttcacgtcacacaacgccggaggcctgtcgtgcagccgccgctagagacctgtcgcgcagccaccaccgaaggcctgtcgcgcagccgccgccgccggagacctgtcgcgcagcagctgccgccgggcttgggcgctgctagggggacgaggactccataggtgatctgcgggggatgggtcgtgggcgctgccaggggacgaggactccgtaggcgatctgcgggggacaacaagaattgctctgctttgcacgtgctgccagtctgcctgtgctaccagatttcaacctcgacatcgacgcgcatcaccaatttgttgcgcctgttgttgtattctgggtactccgtagatagaaaagacagattatttgatagtgatggacaaatcttggatcaatgcaacactatttagcaagccacacctagaaggagttagtgagttcatgaagcttgtaatagagcgatttaatgcgaatgaagagatactttgtccatgccgcaagtgtttgaatcggcttagtggacatagaggacaggtggaggaccacttatatcttcatgggatggctagtacatacactaggtggatgtatcatggagaagccatggatgacataattaatgaaatggtgaccacgaggatgaacatgtgagtttcaatgatgatgttggtatgaatcaagatgaagaagatcctgatgataggattaatggtatggtagaggagttatacacagccgaagatcaagataaaaggaaatctatgtttggagatatactagaggagatgaaacaagaactttatcctggtgcaacttatacaagattttcttttgtggtgaagttgcttcatattaagtcattttatcgtatcagcaatgttggcttcactgcaatactgaagttgttgaaatcaggatttcctaattgctcccttcctccatcttttggagaagcaaagaaacttattcgtgcactaggacttgggtatgtttcaatccatgtgtgcgtgaataactgtgttttgtttcggaagaactatgcaaagcacgatcaatgtccaatttgcggtgaatcaagatggaaagatacaaataaacggatccctcaaaaggtattgcgccattttccattgatccctaggctaaagagaatgtttgcttccaaagaaatagcaaaacaggcacaatggcataagttcaagaggaaacatgtggagaatgagcttagtcatccagctgatggagaggcatggaaagattttgatagaaaatatggtcagtttgcagaagatgcaaggaacattagacttgggctcgctactgatggtttcaatccttttggcaaaatgagctcatcatacaacatgtggccaatatttcttataccatacaactttcctccatgggaatgtacggaacaatccaacttcattatgggcctactcattcctggcccaaaatgcccaggaaaggattttgatgtctttatggaaccactcattgaagagttgttggagctttggaaaggtgtcactacttgggatgcattgagtggaaacaattttgaactacatgctgcagttatatggtgcattcacgactatccagctttgagcacattgtcaggtcgggtcacaaaaggctattacgcttgtgtgcattgtgacaaaaatccttgctccaaaagaataaggaacaagatatgctatgtttatcatcgacgtttccttccaaaagatctcatatggaggagaaataaaagttttgatggtcatagtgaacaacgtgagaaaccagaggaatttagcatagatgagttgatgcaacaattggagagggtaaaagatgtaagaccaggaaaacatactaaaagc

SEQ ID NO: 22001 - DNA, 1009 bp, Zea mays
  Clone ID: LIB3356-014-G9_FLI
ctcagacactctgcatatatcctctgcgcgtgtatctcgtcgaacagagccgaaagctggagcttccaatggcgggaggcaacgacctgaaggtgctcggcgtgtggacgagcccgttcgtgatccgggtccgcatcgtgctcaacctgaagggcctggcgtacgagtacgtggaggaggacctcggcaacaagagcgcgctcctcctgggatccaacccggtgcacaagagcgtgccggtgctcctccacgccggccgcgccataaacgagtcccaggtcatcctgcagtacatcgacgaggtgtgggcggggacggggccggccgtgcttccggccgacccctacgagcgcgcggtggcgcggttctggggcgcgtacatcgacgacaaggtggagtcggcgtggctggggatgctgttcaggtgcgcgaacgaggaggagagggcggcggcggtggcgcgcgcccgcgaggcgctcgacgcgctggagggcgcgttccgggactgctccagggggaggccgttcttcggcggcgacgacatcgggttcgtggacgccgttctcggcgggtacctcggctggttcggggccgtcggcaggatcatcgggagcaggctcatcgacccggcccggacgccgctgctggccgcgtgggaggaccggttccgcgccgccgacgtggccaagggcgtcgtgcccgacgacctcgacaagatgctcgcgttcctgcagaccctgcgcgctatgaactacgccaagtgagagtgtttcgtcgcatgaacgtgtgccgtgccgtgcacgacctatgatcagttcatgtcgatacgtctatcactcagttttgcttcttccgtcaataatcggtgtgctgaatacatgtacaacagctgcctataattttgcttctttcttctaatacctccgtttttaatttgatagttcaactttataataacaaatgtcaaatttaaaaaaaaaatcggaaggagtatttttttaatacatcc

SEQ ID NO: 22002 - DNA, 894 bp, Zea mays
  Clone ID: LIB3356-016-B8_FLI
ctcctccgcccgttgccttcgtcccctccatctccggctgcgtcgccggcgagcccgacaccgcgaatcggatccgccgacaaggcgagagggaagagatggggctcacgttcaccaagctgttcagccggctgttcgccaagaaggagatgcggatcctgatggtgggactcgacgccgccggaaagaccaccatcctctacaagctgaagctcggcgagatcgtcaccaccatccccaccatcggattcaatgttgaaactgtggagtacaagaacatcagcttcactgtctgggatgtcgggggccaggacaagatcaggccactgtggaggcattacttccagaacacccagggtctcatctttgttgtggacagcaatgatagggaccgtgttgttgaagcaagggatgagcttcaccgaatgctgaatgaggatgagttacgtgatgctgtgttgcttgtgtttgctaacaagcaagatcttccaaatgctatgaatgccgctgagatcactgataagcttggactgcattcacttcgccagcgtcattggtacattcaaagcacttgtgctacaacgggtgagggattgtatgaaggcctggactggctgtccagcaacattgcaaccaagtcctaaattgtcaagcaaggtttggatcatctaggagcttttggatgatgatgatggtgctggatatttagggttgggttggtatttccgtatgtaagatgtatgcccctgagctcggcagtttttgagctctgcttaagattctcacagttaaattgttttatgtaatttgggccttgagatgtttctgaaccaaacagctaaaagagttcagttgagttaactggttgccattattacattatgagattctttg

SEQ ID NO: 22003 - DNA, 706 bp, Zea mays
  Clone ID: LIB3356-016-E9_FLI
gccccagacaacactcaccgatagcaagtagcgccgccgacgtttcgagagcagagtatccaagctagccaagcgcgcacctcggtgacctagctagttcaggcgacgatatggcgtcaggtcaggaaagcaggaaggagctggaccgcaaggcccgcgagggcgagaccgtcgtccccggcgggaccggcggcaagagcgtcgaggcccaggagcacctcgccgaagggcgcagccgcggaggccagactcgcagggagcagctggggcagcaggggtacagcgagatggggaagaagggcggtctgagcaccacggacgagtccggcggcgagcgcgccgccagggagggcgtcagcatcgacgagtccaagttcaccaagtagtcctatcgcgtgcgtgcgtacgcagcgttcgtagctgtctgcgtagtgtaccttggccgtagctagtgctactctctactttggagtagctgaatgataataatgtagctagcagcatgcatgtaggcgatcatacatacgtacgtacacaggtacgtgtgtgtgatcatgtatgcttccagaagggtatcctagcttaatcagtcacgtcgtcaagtcgtcaatatggcaggttcgcgtcagggctttgtagtttgatagcctgtttcacgactcctcaataatcaagtagtgtaatgaaagtttggcggttccttgtt

SEQ ID NO: 22004 - DNA, 1727 bp, Zea mays
  Clone ID: LIB3356-016-F4_FLI
gcccccgcccactcctcgctgccaccactcctgtcacctcttcccgcgccgacgcagccgccatggaccccgtcgccacatgggggctaaccccgctcgcgggcgccgacccggagatctacgacctcctggagcgcgagaagcggcgccagcgtcgcggcatcgagctcatcgcctccgagaacttcacctccttcgccgtcatggaagcgctcggctccgcgctcactaacaagtactccgagggcatgcccggcgcccgctactacggcggcaacgacgtcatcgacgagatcgagaacctctgccggtcacgcgcgctcgctgccttccgccttgacgccgcgtcctggggcgtcaacgtgcagccctactcgggctcccccgccaacttcgccgcctacaccgcgctgctcaacccgcacgaccggatcatggggctcgaccttccctccggcggacacctcactcacgggtactacacggccggcggtaagaagatctccgccacctcgatctactttgagagcctgccgtacaaggtgagcgccgcaacggggtacatcgactacgagaagctcgaggagaaggcacttgacttccgccccaagctcatcatctgcggtggcagtgcgtacccgagggactgggattacgccaagctcagggccgtcgccgacaaggtcggggccctgctgctctgcgacatggcgcacatcagcgggctcgtcgccgcgcaggaagctgcaaatccttttgaatattgtgatgtggttaccacaaccacgcacaagtccctcagagggccaagggctggcatgatcttctacaggaaaggccctaagccccccaagaagggccagcctgagggtgctgtttatgattacgaagacaagatcaactttgcagtgttcccatctctccaaggtggccctcacaaccaccagattgctgcacttgctgttgctctacagcaaactatgtcgcctggcttcaaggcctatgcaaagcaagtgaaggccaatgctgttgcaattggaaactatctcatgagcaagggctacaagatggtgactgatggaactgagaaccaccttgttctctgggatctccgcccccttggcttgactggaaacaaggtcgaaaagctatgtgatctttgccacatcacattgaacaagaatgctgtcttcggtgacagcagtgcattgtctccgggtggtgtccgcattggcgcgccagcaatgacctcgaggggtctactggagaaggatttcgagcagattggggagttcctccaccaggcagtgaccatctgcctgaacatccagaaggagtacggcaagctcctcaaggacttcaacaagggcctggtgaacaacaaggacatcgagaacctcaaggtccaggtggagaagtttgccgactccttcgacatgcctgggttcacgcttgagagcatgaaatacaaggagtagacatgcctcccatgcgcggcaaggtcctcctgtaccgatgtctttccttgtggtggcgcagggtgccatggcactgcactgccgccacacttacgatgatgatggtgggttatggattttgtctacaatgtcagcaggataggctcacaattgccccctgccctccggtttggtcgcctctcaggttttcatttggtagttgttcgcagggaaccatatgagaattgcaatgtcaatcaggtgtttgcc

SEQ ID NO: 22005 - DNA, 850 bp, Zea mays
  Clone ID: LIB3356-018-B1_FLI
gtccctcgacgttgccgacgccgacgccggcgccggcgcctctccgaaccgacgccatgccccccgtcaaatggttgatgcactggcatccgagtcccggggcgacgctcaacagccagatcctggcggaggcgtgtggctgcgccgagtccctaggcggctccaaggacgggcggtggaagacctccatcttcttctaccgcgccatgacccgggacggcgcgggaggccccgcggtgcagcagcaccccgacttgcctagggagctcctcggcgtcgcgctccacgagcgcccgggtctctacttctccatcgtccgcgcccagcgcctcgttctccaggccgatgcggcgttcccccaggtcatggagaagctccagtcatacagaatccgcgtcgccctcaacttcgaggggtttcagtatcaactgggtgatttctgcctgaggataggaaaatgtgttcccaataattctgaagcactgagaggaatcatgatggaggtagagtattatcccctaacttccattgaaaaatccaaggcagtcatggaggacttctttgacatatggcaggaaacagttgcgaagaagtcattacctggtcaattcattcatgtagactcaaacttttcagaatatggtctttcagatcaatattcttttcaacatactgcagttcaatatgcaacttgcttgcagcagctcatggctgcagtaacagtaaggggttagctctagagagattctcaaaaccactctataacgtcgtaggttgattgtggcagcattcacaatgcctggatatatgttgtgtaattgacatacaatttacaaatgggttcccttcc

SEQ ID NO: 22006 - DNA, 621 bp, Zea mays
  Clone ID: LIB3356-018-C11_FLI
agccactccgaggccaagtctagggtttgggaatctgtaggaggggagaggggagcgcgctcagggtcagggaggcgaagatgatcgaggtggtgctgaacgaccgcctggggaagaaggtgcgggtgaagtgcaacgaggacgacaccatcggcgacctcaagaagctggtggcggcgcagacggggacgcgccccgagaagatccgcatccagaagtggtacaacatctacaaggaccacatcacgctcaaggactacgagatccacgacgggatggggctcgagctctactacaactaggcgccctgaccccaaccgtgccctgatgtaaggttaatccgaattctgaagtcatgggtgcgcttccagtcacagcgtctttagctaacaagctcgcatacatataggcaacttgagtgagctatgtagtacggatatggttgtgtggcaaactgccaatgactattgacatccttgcatatattgacatgtgacaaggatcaacctgcaaaactggtgccctgctactcgcagaccttattatcttaaataacacaggtggtgtgtttttcaattatgtgaaaaccttggccttgtttggataatttatggtgtgatt

SEQ ID NO: 22007 - DNA, 780 bp, Zea mays
  Clone ID: LIB3356-018-E1_FLI
cccacccctcagcgcgacgaaggtaagatgttcctgcggaggatcctgaccggcgggggcggcctggcggccctgagggcggcgcgcgccgtgaaggagacgacggggatcgtgggccttgaggtggtgcctaacgcgcgagaggttctggtagggctctacgagcgcacgctcaaagagatcaaggccgtccccgaagacgagggttaccgcaaggccgttgaatccttcaccggtcaccgcctccagatctgccaggaggaggaggactggaagcgcatcgaggaccgaatcggatgcgggcaggtcgaggagctcatcgaggaggccgaggacgagctcaagctcatcgctaaaatgattgaatgggatccatggggtgttcccgatgactacgaatgtgaggtgattgaagacgacaccccaattcctaagcatgttcctcagcaccggcctgttgctcttcctgaggagttcttcaaggcactagatgctgtcaaatctgatcctgctcttcaaggcgatgctcctcctcaagtgaaggcgtaaggatggctgttcctggctaacgtcatttcacattttgccgcggtgggtagggactggtttcttgtgtcatttgccagcaatgcgcttgctctgagcagaataaatttctggtgagtaccatcaaagtgtgaatttgaacttagtgattcggcacagtaaacttgttgcccatgaaatactcgatgccctgaacatcgtttgttttgacgttataatcgatgttgacgaaat

SEQ ID NO: 22008 - DNA, 787 bp, Zea mays
  Clone ID: LIB3356-018-G11_FLI
gacaaggagggcatcccacccgaccagcagcgcctcatcttcgccggcaagcagctggaggatggccgcaccctggcggattacaacatccagaaggagagcactctccacctggtgctccgcctcaggggtggcatgcagatttttgtgaagacattgactggcaagaccatcaccttggaggtggagagctctgacaccattgacaatgtgaaggccaagatccaggacaaggagggcattcccccagaccagcagcgtctgatctttgcgggcaagcagctggaggatggccgcactctcgcggactacaacatccagaaggagagcacccttcaccttgttctccgcctcagaggtggtatgcagatctttgtaaagaccctgactggaaaaaccataaccctggaggttgagagctcggacaccatcgacaatgtgaaggcgaagatccaggacaaggagggcatccccccggaccagcagcgtctgatcttcgccggcaaacagctggaggatggccgcaccctagcagactacaacatccaaaaggagagcaccctccaccttgtgctccgtctccgtggtggtcagtaagtcatgggtcgtttaagctgccgatgtgcctgcgtcgtctggtgccctctctccatatggaggttgtcaaagtatctgctgttcgtgtcatgagtcgtgtcagtgttggtttaataatggaccggttgtgttgtgtgtgcgtactacccagaactatgacaaatcatgaataagtttgatgtttgaaatt

SEQ ID NO: 22009 - DNA, 612 bp, Zea mays
  Clone ID: LIB3356-018-G7_FLI
ccgcctctcttctcagtgccagccgccgtgcgctcgctctctctgtccctcaaggccttcgccggcgaagagcgcctagtcacccaccaggatgaagtttgttgctgcttacctgcttgctgtccttgctgggaactccagcccctctgctgaggacttgacggccattctggagtcagttggctgtgaagttgacaatgaaaagatggagctcctgctgtcccaactgagcggtaaggacattaccgagctcattgctgcgggcagggagaagtttgcttcagtcccatgcggcggcggcggcggtatggctgtggcagcagctggccctgctgctggcggagctgctcctgcagctgaggcgaagaaagaagagaaggtggaggagaaggaagagagcgacgatgacatgggcttcagcctcttcgactgagctgtgtgggcagtcatcacatcagagtagtttgttttgttttgacttttgagtcgtggaaccagaggaaaatcgtagtcgttgcttggactttaacctcgttttatgttggaaactagtttgaaaggctcctactgtctttatatttggtaattcagccgtaggtcgacattgcctcc

SEQ ID NO: 22010 - DNA, 821 bp, Zea mays
  Clone ID: LIB3356-018-H5_FLI
gagagaaggaaaaatatccccaaaccctagctcccgatctcgatggcgaaccctcgcgtcttcttcgacatgaccgtcgtcggcgccccggcgggccggatcgtgatggagctgtacgccaacgaggtgcccaagaccgcggagaacttccgcgcgctgtgcacgggcgagaagggcgtgggcaagtccgggaagccgctccactacaagggctccaccttccaccgcgtcatccccgagttcatgtgccagggcggcgacttcacccgcggcaacggcaccggcggcgagtccatctacggcgagaagttccccgacgagaagttcgtgcgcaagcacaccgcccccggtgtgctctccatggccaacgccgggcccaacaccaacggctcccagttcttcatctgcaccgtcgcgaccccttggctcgacggcaagcacgtcgtcttcggccaggtcgtcgagggcatggacgtcgtcaaggccatcgagaaggtgggcacccgcaacggctccacctccaaggtggtcaaggtcgctgactgcggacagctctcctagatctctctgatctggtctgttcggccgccctccctccgtcatcgtcgactccccctgcgtccgttcctttggatctgaataagatggtggtgatctgagtggtggtcttagtttatcatgtatcgctcgcagtttaatttagcggtttaggtgtggatctgtgaaccccatggcgcctctgcttgattcgtgtttcacctgttatgttctgagattcatgataatgctatgagaactgaaattcccgtttcatgcttctt

SEQ ID NO: 22011 - DNA, 1456 bp, Zea mays
  Clone ID: LIB3356-022-C1_FLI
cagcagacacctccgccacctccaccctcgaatcgttccccaccatggcgtcgcagggatcctccgtcttcgccgcactcgagcaggccccggaggaccccatcctcggagtgaccgttgcctacaacaaggatcccagccccatgaaggtcaacctcggggttggcgcctaccggaccgaggaagggaagcccctagtgctgaacgtggtcaggcgcgccgagcaaatgttgatcaataatccgtcacgtgtcaaggagtacctaccaatcaccggtctggctgaattcaataagctgagcgctaagcttatctttggcgctgacagccctgctattcaggagaatagggttgctaccgtgcagtgcctatcgggtactggttctttaagagtcggaggtgaatttcttgcaaggcactatcacgagcgcactatctacatcccacaaccaacctggggaaatcacccaaaagtcttcaccctatctggcttgaacgttaggagctaccgctattatgatcctgcaacatgcagccttcacttcgaaggactcatggaagacctcggttctgctccttcaggttcaattgtactgctgcatgcctgtgcccacaaccctactggagtagatcctaccatcgaacagtgggaacagattaggcagctgatgagatcaaaatcactgcttccgttctttgacagtgcctatcaaggctttgcaagtggaagtcttgacaaagatgctcagtcagtgcgtatgtttgttgctgatggtggtgaactgctcatggctcagagctacgctaagaacatgggattgtatggagagcgtgttggcgctttgagcattgtatgtagaagtgccgatgtagctgttagggttgaaagtcaactcaaacttgtcatcaggcctatgtattcaaaccctcctcttcatggtgcctctattgttgctaccatactcagggacagcgagatgttcaacgaatggactctggaactgaaggccatggctgataggatcattaacatgaggcaacaactatttaatgcgctgaaatccagaggaacccctggtgattggagccatatcattaagcaaattgggatgtttactttcactgggctgaatagcgaacaagtggcattcatgaggcaggaataccacatttatatgacatctgatgggaggatcagcatggccggtttgagcatgaggactgtgccccatcttgcagatgccatacacgctgcagttactcaactgaaatgaggatagtatcgcagctttcgtgaataaaacctgaatcacccacaacaatgttctaagtactcagccagtggtatttactggttgacctactgtagtttgcgtcggaatagatttgtttttttactctgttcgtggggcagttttgtattggtggattcataatgactctgattatggtgcgt

SEQ ID NO: 22012 - DNA, 772 bp, Zea mays
  Clone ID: LIB3356-022-D1_FLI
tttacgtatatgcccttgtcccggttcctttccccatccccaactccattatttgcttgatccttgagaagagagaggaagacgagagctagaagcgaaggagaaaagcagttcttcagctaggcaggagggcacaggaaggaggagatggcgtcaaagaggattcagaaggagctcaaggatctgcagaaggaccctcccacctcgtgcagtgcaggtcctgttggtgaagacatgttccactggcaggcaacaataatgggtccatctgatagcccatattctggtggagttttcctagtcacaatccattttcctcctgattatcctttcaaaccaccaaaggtggcatttcgtactaaggtgttccatccaaacatcaacagcaacgggagcatttgcctcgacatcttgaaggaccagtggagtccggcactaacaatctccaaggtgctgctgtccatctgttccctgctgactgatccgaaccccgacgaccctttggtccccgagatagctcacatgtacaagacggaccggcacaagtacgagaacaccgcgaggacctggacccagaggtatgccatgtagtattttctctacctggcctttggggtcgctgctgccgggacctggacgtgcctccatgtattcgttctatccttcctgtataatgatgaaccgaattgggtttgcagtacagtgccgcgtgtggtgctgaatgcagaatgctgctgtattgtgtcacttggaagctgtaattctcagtgtc

SEQ ID NO: 22013 - DNA, 717 bp, Zea mays
  Clone ID: LIB3356-037-F4_FLI
gcttctcctccccctcttaccaagtcctcctcgggttagggttccttagggttttgtggaggggcgatggcggcggctgatgtggagtaccgttgcttcgtcggcgggcttgcctgggccaccagcaacgagtcgctggagaatgccttcgcctcctacggcgagatcctcgactccaaggtcatcaccgaccgggagacggggaggtcccgcggcttcggcttcgttaccttctcctccgagaactccatgctcgacgctatcgagaacatgaacggcaaggagctcgacggccgtaacatcaccgttaaccaggcccagtcccgtggcggtggcggtggcggcggtggctacggcggcggtcgcggcggcggcggcggttatggtggcgggcgccgtgacggcggttatggcggcggtggcggctacggcggtcggcgcgaaggtggcggcggcggctacggaggcggtggcggctacggcggtcggcgcgagggtggcggtggcggctacggcggcggtggcggcggcggctggagggactgatgtgtgggcccatcctggcttcggccgagttatcttatctatctatagtatcgtgttaccgttcgcttctgtcaccgtgttagtgtccgttctacctttggattaggtgttggtaccctgttgttcgctttggttgctcccgctatgaaacgagacgagagaagaatgagc

SEQ ID NO: 22014 - DNA, 378 bp, Zea mays
  Clone ID: LIB3356-037-G2_FLI
cgaactacctgccgccggaaaaccctagagcgctcgaccatggatccgcagcagccggagcctgtcagttacctctgcggagattgcggagctgagaacaccctgaagcccggagatgtcatccagtgccgtgaatgtggctaccgcatcctctacaagaagcggacccgccggattgtccaatatgaagcgcgctgaagagtgaagacaagggaaaacactgaagatggttgatctattactcgccacattacctatgtaaacagtcttctgggggaaatgaaaatgtcagacttaacgtttgtatgtcgtgtgcctcctttgaacctggctgtataatttgtaacgcttgaactggggactgatttgagaactgag

SEQ ID NO: 22015 - DNA, 401 bp, Zea mays
  Clone ID: LIB3356-037-G7_FLI
cgactgcttcgttcaaggctgcgacggatcgatccttctcgacgccggaggggagaagaccgccgggccgaacctgaactcggtgcgcggctttgaggtcatcgacaccatcaagcggaacgtcgaggccgcgtgccccggcgtcgtgtcgtgcgccgacatcctcgcgcttgccgcgcgcgacggaaccaaccttctcggcgggccgacctggagcgtgccgctcgggcggcgggactcgacgacggccagcgcctcgctcgccaacagcaacctcccgcccccgacggccagcctcggcacgctcatctcactgttcggcaggcagggcctgtcgccgcgcgacatgacggcgctgtcgggcgcgcacaccatcgggcaggcccggtgcaccaccttcc

SEQ ID NO: 22016 - DNA, 669 bp, Zea mays
  Clone ID: LIB3356-038-A12_FLI
gatccggagcagccgcagtcccaccgaccccgccgccggtcgccctccatctcctcgccgctgcctctcgtttctcttttcaataatcaagatgagccgtggtggtagtgccggtggtggtcaaagttctctgggttatctctttggaagcggtgagccccccaaaccagcagtggcaccagctgcaagtgctccacctgttgagaaaccatctgctgcaaagactgatgcggccaagcaggttgctgctggggttaccagccaaaccaataactaccacagggctgatggtcagaacactggcaacttccttacggaccgtccttcaaccaaggtccacgctgctcctggcggtggctcttccctgggctacctgttcggtggcaactgatgcccgtgctggtgcgctcaccaaagttatcctcccctgcctgctgcgtgctatgtctgaatcgtgaacaaccgttgtcatttcatgtgtgtaccccgtgcaatgctttgtgcgcatggttgatttctctgtggcaaacttcccgtcctgcatggggttgtaagctgtctctaaatttcacggcaagtcgtgtgcctgaaccttcatcttaagttgttgtcgtatcccttcgtcttgtttcggttgcaccccgtgatggtatggattggttgctgacc

SEQ ID NO: 22017 - DNA, 711 bp, Zea mays
  Clone ID: LIB3356-040-D6_FLI
ctcccccaccggttcgtgttcaggttctggttcgtgggcgagagggaagagatggcggcgtcggacgttgagtaccgttgcttcgttggcggcctcgcctgggccaccgacgaccactccctcaacaacgccttcagcacctacggcgaggtcctcgagtcgaagatcatcctggatcgggagacgcagaggtcccgcggcttcggcttcgtcaccttctccacggaggacgcgatgcgcagcgccatcgagggcatgaacggcaaggagctcgacggccgcaacatcaccgttaacgaggcccagtcccgcggcggccgtggaggcggcggtggcggatacggtggcgggcgccgtgatggaggcggctacggcggtggcggtggaggctacggcggtggtcgtggaggctacggcggcggtgggggatacggtggtgcaaaccgcggcggcggctacggcaacaacgacgggaactggaggaactgagcggtggggtccgctgaggcctagttatcttgttcgcttctgctaccgtgttcaccctagtctagagggggtttatcttcgtctgtggtcgtctcgtgtccgtatgtttcgtttcgtgttcgttgttgttgttgcccatctgtgtttttgaccgcaagctcgctcctctgatgttgttagtgatgtctacaatcgtccaatcccgagcctgcattgagctcc

SEQ ID NO: 22018 - DNA, 1146 bp, Zea mays
  Clone ID: LIB3356-040-G7_FLI
gcgcccccggccgaggcagctgcaggcagcggcccggccggcggagaagggcggaagggcaaggcgcccaagggcgggcccgagaacggcaagttccggtaccgcggcgtgcggcagcggagctggggcaagtgggtggcggagatccgcgagccgcggaagcgctcccgcaagtggctcggcaccttcgccaccgccgaggacgccgcgcgcgcctacgaccgcgccgcgctcctcctctacggcccccgcgcgcacctcaacctcacctccccaccgccgcctacgctcgccgcgccgcgctcgcacccgcactcctcctccgccacgtcgtctgccccgccagcgctccgcccgctcctgccgcgcccgccactgcaccagctctccagcgacggtgctcctgcaccggatttccactaccacaaccagttccagcgccgtctcttgccgcagccgacacccacactatactacgccaacacggctacggcgtccacagtgaccaccagtgtgccgacacgggtggcggttccgcaggagccggccatcgcgcccgcagtaggctccttgacgtcactacaggagccgcaggtaggtacgccggaggaggcgcgcggggaggcagggtgggactacaacggcggcgaggaggaggattatgcggcggcgctgctgtgggacgagccggagcctttcttctggtttgatgtcttcctcaagtgatgaccagcacggcgctgcatgccagcaattcgaatcctgcatggttggtttggagtttcggagtgacggcagctcatgctcctgcatctgcatgcatgtgttgggcagtaagcaagcaagaaaggtagataggcttgctagctagggtttctgactcctttgtactaaattatctttatattttttatcttatccttcttttttccctgagggtgtgattgaggtatagtaatgtgaggtggtattactggtgggaggatttagggttctctgtcttgatttaaagattcaattttgaatcacatcgagtcgatttcttgcatggggatgcaatctatttaactgtggcatgtataaaaattagcgatgcaacaatttttaattctgtgttttcttctatcgaatgttgaactttagtcc

SEQ ID NO: 22019 - DNA, 1710 bp, Zea mays
  Clone ID: LIB3356-042-B10_FLI
tcggaatccctgaaaaatcccccgtaccatgaagctccggttgcgatctatgcaggcgcgcggcggctccgccgccgtggagacccaccgcgtggacctgccgcccacggccactctggccgacgtgaagaccctcctcgcgtcgaagctctctgcggcgcaacccgtccccgccgagtccgtccgcctctccctcaaccgtagcgaggagctcgtctcgccggaccctgccgctacgctcccgtccctcggcctcgcgtccggtgatctcgtattcttcaccctatcccccctcacggccctagcgccgccggctcaggccctgccacggaaccctagcccgagctctggcgctgcagcgtcgttcgccgaggctgccgaccgcgggaagggttcgaagcaatctggtactggagatttctcttcctcgtcactggcgcaggctgtggttgtgagccctagctttccggtcgcttccggtacgcgggatgtggtgatggaggaggaggccgtcgatgccacaaagggctggtcgagttttgtgcttagggatctcaagagggagatggacaacgtcgggcccgcggagggaaccgccgcaggtcgcctggttgcggccttgcatgcagctctgcttgatgccggttttctcaccgctaaactgacgggctctcacctctcgctgcctcagggctggccgtcaggtgctttgaagccattgaccatcaagtatactataccagagctttcatcaatggtatctgtgactgaggaagggaaggtggtgatgctgaactactccttgatggccaatttcgtgatggtttatgggtatgtgcctggggcacagtctgaggtttgccggttgtgcttggagttgccggggctggagcctttactttatctggatggcgatcagctgaatggagtgcatgagaaggaagttcatgatctgtggagagtgctgaaggatgagatttgcctgccactgatgatatcattgtgccaactgaacggtctgcgcttgcctccttgcttgatgggtttgcctgctgatctcaagactaaggtattggggtttttacctggggttgatcttgcaaaggttgagtgcacatgcaaggaaatgatgaatcttgcatcagatgatagtatctggaagaagcttgtatccaagtttgaaaattatggtgagggctctaggctggcaggcaagaatgcgaaggccatatttgtagaagcttggcaggccaataagagacggcagaagaggcccaatccaaccttttggaactatggctggggaaacagtccttatagccgcccacttaggctgccattgattggtggggactcggacagacttccttttattgggaatcatggttctgttgggcgccactttggaaatcaacgaaggaatatctcaccgaactgcattcttgatggtcatcgtcataacttcctttgaagccatgtcaatgagttttacttgtatgttaagagtgttttataaggactgcaatggtgcatatacggttagaccgccttgttcatatcgtcaagtcgcacacttatgcatgtgcacagcactcttatgatcttatcctaatatatccccttagtatcttagatcttatctttactatctttttttggtaccaaatgtaatccagtgtcctagtaataaagtacccttgttctattctc

SEQ ID NO: 22020 - DNA, 758 bp, Zea mays
  Clone ID: LIB3356-043-A10_FLI
tcagatccaagaagagggaagagcaccaaggaccttcggcgcccgttcaggatccacatcttcccgagcgagttcttggttggcctcttcctcttcggaccacctccaaggctcttggtgtagcttgccactctcaccaatcaagttttcatgtctgatctcgacattcagatcccaactgccttcgatcccttcgctgaggccaatgctggggactctggtgcagcagcagggtcaaaggactacgttcacgtgcgcatccagcagcgtaatggtcgcaagagcctgaccaccgtccagggattgaagaaggagttcagctacagcaagatcctcaaagatctcaagaaagagttctgctgcaatggtacagtggtccaggacccagaacttggacaggtcattcagctccagggtgatcagaggaagaacgtctcgaatttcctcgtccaggccggcattgtgaagaaggagcacatcaagattcatggtttctgagcaaccgccgggtccatatcaaaccaaccctgcatgcagggcatcttattatatataatatctgaggtggagcatatctatctggctgtgtactgcaagcaggcctagtacgccgcctgcgcgttcctcctattacacatataggcccctccctgcgtgtatgcttgttaccgtcgtgtcgaaccttgtactacgaggctccatcgaacatcgatggcttgcttctttatcagaacatgtttgaataaacgctatttggt

SEQ ID NO: 22021 - DNA, 810 bp, Zea mays
  Clone ID: LIB3356-043-B7_FLI
agctccacaggccaggtccccatcgccgcggcgcttgccccacctctcccccgcccggtagtagcctcgccgccgttgccgagatggggttcgtgtccttcgtcgggagggtgctcttcgtcgccgctttcctcctctccgcctaccaggagtttaatgaattcggtgctgatggtggaccagcagctaaggcccttcggcccaaattcaacgtgtttgtcaaaaatgtatctgctcatctgggagtagctgtgccacacattgagttgaagcatgtgattgctgctacaattggtcttaagggtcttggaagcctcctttttattttgagcagctctctcggtgcttatctcctgctgctgtaccttgctttgatcactcctatcatccatgacttctacaactacgatatggagaaggcagaatttgcaggcctctttgcgaagttcacccaggatttggcgctgatcggagctctgctcttctttctgggcatgaagaactccatcccgaagcggcagggcggcaagaagaaggcccccaaggcgaagacgaactagggctgcttagatagctgcacgcctcaggcggggtgtatcaggccacaggtctatttcgaagcaggcccagcgcgatgcagcgaatgccatcgagctgcgcttttacatgtttatcatcagattccattttgcggggcacggcccggacaaaggtgtgaccggggtgggttaggcgactagattgcacgattatgtacttgcgatttgtttgttgaactgggttgccgacagttaatcttcatttgatttt

SEQ ID NO: 22022 - DNA, 1279 bp, Zea mays
  Clone ID: LIB3356-043-C7_FLI
gggagaggctccaaaccctagccacacacgacgcaacgcaacgccgatggggtgcgcgcagggcaagtgctgcctacggcggcacccgaggaggggctccgccgctgccgccgttggcggcggcgccacgctcggccgcgccgcggtgcccggggccgggctggtactggagtacgccgcgctggctgtggcggggctgtacccggactccacagcccgggagtcccaggacgcgcaccttgtcgccacgcgcttcgcgggcgacccggacctccacctcttcgctgtcttcgacggtcatggcactgccggcaccgcctgcgctgggttcgcgcgggacgcgctcccgcgcctcctcgcgtcgctctctctcgccagcgccgccgaccccaccgcggcgttccgcgaggccatgctgggcgccaacgccgagatgcacgcggctcccgaggtcgacgactccatgagcgggaccaccgccgtggccgccctcgtctccggcggcgctctccacgtcgccaacgtcggcgactcgcgcgccgtcgccggggtctggcgcgccggccgcgtcgtcgccgaggacctctcctgggaccagactccgttccgcgccgacgagcgcgagcgcgtcagggcctgcggtgcccgggtcatgtccgtcgaacaggtggagggcatgcgcgatccggaggccgagcgttgggcgcccgacgagggggacccgccccgcgtctgggcgcgcgacggcctctaccccggcacagccttcacgcgcagcctcggtgacctcgccgccgaggccatcggggtcatcgccgagccggaggtcaagagcgtcgagatcactccatcgcacctcttcttcgttgtcgccagcgatggcgtgttcgagttcctctccagccaggaagttgttgacagggttgccacgtatcaagatcctcgagatgcctgctcagcaatcgctgcagagtcatacaaactatggctggagcacgaaaataggacagatgatataacgataatcattgtgcatatccgagacatggaaagtgtaggtgcaccaaaattttaaattctgcaagcataaacagaagtaacttattcagtgactggctgaaaatttgttgttcttcccaaaatttactgtcaggccctgcagggagtgacaaagcggactacggtagcgtgggagcgtcaatagctgtgcacgcaatacagtcagaggtacctgtatttgtagaatcagaagcaagtcacatgaacagatctttctcct

SEQ ID NO: 22023 - DNA, 1770 bp, Zea mays
  Clone ID: LIB3357-006-G9_FLI
gggcgagaacctgaccaagcgggtgcgcgagaagatgttcgccgccgtgctccgcaacgagatcgcctggttcgacgcggacgagaacgccagcgcgcgcgtggccgccaggctagcgctggacgcccagaacgtgcgctccgccatcggggaccgcatctccgtcatcgtccagaactcggcgctgatgctggtggcgtgcaccgcggggttcgtcctccagtggcgcctcgcgctcgtgctcctcgccgtgttcccgctcgtcgtgggcgccaccgtgctgcagaagatgttcatgaagggcttctcgggggacctggaggccgcgcacgccagggcgacgcagatcgcgggcgaggccgtggccaacctgcgcaccgtggccgcgttcaacgcggagcgcaagatcacggggctgttcgaggccaacctgcgcggcccgctccggcgctgcttctggaaggggcagatcgccggcagcggctacggcgtggcgcagttcctgctgtacgcgtcctacgcgctggggctgtggtacgcggcgtggctggtgaagcacggcgtgtccgacttctcgcgcaccatccgcgtgttcatggtgctgatggtgtccgcgaacggcgccgccgagacgctgacgctggcgccggacttcatcaagggcgggcgcgcgatgcggtcggtgttcgagacgatcgaccgcaagacggaggtggagcccgacgacgtggacgcggcgccggtgccggagcggccgaggggcgaggtggagctgaagcacgtggacttctcgtacccgtcgcggccggacatccaggtgttccgcgacctgagcctccgtgcgcgcgccgggaagacgctggcgctggtggggccgagcgggtgcggcaagagctcggtgctggctctggtgcagcggttctacgagcccacgtccgggcgcgtgctcctggacggcaaggacgtgcgcaagtacaacctgcgggcgctgcggcgcgtggtggctgtggtaccgcaggagccgttcctgttcgcggcgagcatccacgagaacatcgcgtacgggcgcgagggcgcgacggaggcggaggtggtggaggcggcggcgcaggcgaacgcgcaccggttcatcgcggcgctgccggaggggtaccggacgcaggtgggcgagcgcggggtgcagctgtcgggggggcagcggcagcggatcgcgatcgcgcgcgcgctggtgaagcaggcggccatcgtgctgctggacgaggcgaccagcgcgctggacgccgagtcggagcggtgcgtgcaggaggcgctggagcgcgcggggtccgggcgcaccaccatcgtggtggcgcaccggctggccacggtgcgcggcgcgcacaccatcgcggtcatcgacgacggcaaggtggcggagcaggggtcgcactcgcacctgctcaagcaccatcccgacgggtgctacgcgcggatgctgcagctgcagcggctgacgggcgcggcggccgggcccgggccgtcgacctcgtgcaacggggccgcgtaggacggaatggatggatggatgggtttggttcctcgagagattgatgggtgaggaagctgaagctccggatcaaatggtggtactccatgatcgcaacaatgaggggaaaaaaagaaaggagaaaatacggtggttcatatgattgtacaatttgacgatctgtttgagtcggggttttaggatgatgtaaaccttcactcgccttttttttactcttgtttctc

SEQ ID NO: 22024 - DNA, 1049 bp, Zea mays
  Clone ID: LIB3357-007-A5_FLI
ctcctgtgctttgagattcgcgcgtcgcgcctgccgacctcgtgcctcccgcggactcgccggcgaacgcctcttggagatgccgcccgccgcggcggcgctcctccggtgcgctccggcggtcccattcgcggcccgcagtagcgctgtttcccgctcaggcatggcgcggcgtctggtggcagcgagcgctgcggccggcaggctggcaccggcgtaccgcgggctgctgctcgacgccggtggcacgctgctgcaggttgcgcggccggtagccgagacgtatgcctccatcggccgacgttacggtgtgacgaagactaagaagagaatcatggaggggttcaagcgggcattctccgcgccatggccgaagacactcaggtaccagggagatgggcggccattctggagaattgtcgtggcagaagcgaccgactgcactgatggtgattatttcgaagaagtgtatcagtattatgcgcatggagatgcttggcgattgcctactggagcagacgcagcactgcgtgagctgaaggatgctggagttaagctcgctgttgtatctaacttcgataccaggctacggaaattgcttaaagaccttaatgtctccgagatgtttgatgccattgtggtgtcatccgaggtcggatatgagaaaccttccccagagatcttcaatatagcattggatcaaattggcgtggaagccagcaaggcaatccatgttggagacgatgaaactgcagacatggcaggtgccaatgctacaggacttgagtgctggctgtggggtaaggatgtgacgacgttttcggaaatacaggagcggattctgacaacagatgatcctcaatgagtgaatttggaatgttgcaaaaaatgatagttgtttcttttttccctcagttccttctttttggtttccttccaactcgtgtgttggcattttcattgtgctttcgtgaaataagctcatgccatggctaggtactgatgttccttcacattcttctcacatatgagcatttaataagaagcac

SEQ ID NO: 22025 - DNA, 2105 bp, Zea mays
  Clone ID: LIB3357-007-E11_FLI
ccctttctctgctctggcctccatataacttgctcagcaggcctagttctcgcagtcggatcctctcatactgcaagaaccccccctctctctctttttctctcaacacatacacacacaaaagaaagaagggagcctccaagcacacccctgttgcttcctcagcatgcgcgaatccttaactgaggactaggccaacaatacatcgcaatgaagtacatgaagctcggttcaaaacctgatacgttctataccgaagaagcagtcaggtcagtcgtatcagacatacccgccgatctcattatccatgtaaataacaccaagtatcagctacacaagttccccctgctcctcaagtgcggcctcctgcagcgcctctgctccgacaccgacgacggcgatgaggagccggtgcccgtggcgctgcacgacatccctggcggcgagcaggcctttgagctgtgcgccaagttctgctacggcatctccatcagcatcagcgccgggaacctggtgcccgcgatgctggcggcgcgcttcctccggatgacggaggccgtcgccaagggcaacctggtggccaagctcgagaccttcttcgactcctgcgtcctgcagggctggaaggactcggtcgccgcgctgcaggccgcgtggcggatctccggctggaacgagagccgcatcgtacagccctgcatcgactccatcgtcgagaagatcctcctgccaccgtccaaggtcacgtggtcctacacgtacacgaggccagggtacaacagcacgaggaaaccccaccagtccgtccccaaggactggtggacggaggacatctccgacctggacatcgaggtcttccgctccgtcatctccaccgtgcgcgcgtcgcggctgctcccaccgccgctcatcggcgaggcgctgcacgtctacgcgtgcaagcacctcgtcgacccgctccacgttgccagcgacgcaggactgaccgccaacggcgtcctccaccagccgccgcagagctcagacgacggcgaggagaagctggtggccatgcagcgccgcgtgctcgagtccatcgtcaccatggtcccgggcgagccggggtcggtcaccggccgcttcctactaaggctgctgcgggtggccaactacgtcagcgcgtcgtcgtccacgcgcgcgcagctgatccggcaggccggctcccagctcgacgaggccagggcggcggacctgctcatcccgctgccatcggacccgcacgcgtacgacgtcggcacggcggaggccgtgctcgagcacttcctggcccagttccagcggcccgcgccgaccgacgagcggcgtcggatgagcgccgccatggagaaggtcgccaggatcttcgacgagtacctgcggaccatcgcgctggaccgcagcttccctgtcggcaagttcgttgacctcgtcgaatgcttgccggacatcgcccgcagtgaccacgacggcctctactacgccatcgacatctatctcaaggagcacccggagctgagcaaggcggataagaagcggttgtgccggctgatagactgcaggaagctgtcgccagacgtgcgggcgcaggcgatagccaacgaccggatgccactgcgcaccattgtacagcttctcttcgtcgagcaggagcggaccatcggtgcagccgccggcagccatgctgcttccggtggcgccgcagatcgggcctccgtcggtgttatctcccagctcgcggcgggaaccaaagatgaagaaccagcctcgtctgctggccacaagtcagacgtgcacagaccacgccgggaccatgcccgggtagccgatggagcctctgccatggcgaggtcgctgtcggcgtcaaccaagactccaccggcagcgaggaaggagaggacgccggaggagacggggagcaggatgaggaacaagcagtgaagcccagtgcacaatttgttcatacttgtgattcttgattatattttttttatttcagtgcatcccatttttggtgggagatgtaagaggtagatttttgtaattaaaatggataaggagttaataagtggctacgtgcagtcatgctc

SEQ ID NO: 22026 - DNA, 1448 bp, Zea mays
  Clone ID: LIB3357-024-E2_FLI
tggcagtcgcaagtcgccgagccgtcctaacacagcgagagggtttcgaattggcgccaagccgccaaccatttcccccaatcccgcctgccagccctagggtttctgctacgccatggcgggaaccgccgccgccgctcccatggacatcgacgcagccgcgccgcctcccccgccgcctggtgcggcggccaagggcaaggcgccgctctccgctggcggcagggcagcgccctgggtcgagaagtaccggccccagtccctcgccgacgtcgccgcccaccgcgatatcgtcgacacaattgacaggcttacaaacgagaatagacttccacacttgttgctatatgggccacctggcactgggaaaacatcaacgattctggctgttgcgaggaagctatatgggtctcagtatagcaacatgatcctggagctcaatgcgtcagatgaacgtggcattgatgttgtcaggcagcagatccaggattttgctggggcacgcagcctctcttttggagcaaggccttctgttaagctggttctcttggatgaagcagacgcaatgacaaaggatgcacaatttgcattgagaagagttatcgagaagtatacaaggagcacaaggtttgcactcatatgcaaccatgtcaacaaaattatccctgcgctacaatcaaggtgcaccaggtttagatttgccccactagatggcagtcatgttagagagcgtcttcaacatataataaaatctgaggggctcagtgtagatgacggtggcttgacagccctagtgcggttaagcaatggtgatatgaggaaggctttgaatatattgcagtcaacgcacatggcatcccaccaaatcacagaagaagctgtctatctttgcacaggaaaccccatgccaaaagatattgagcagatagctttttggctattaaatgaaccattttcaaccagcttcaaatatatatctgacatgaagatgagaaaagggctggccttggttgatatcatacgggaggttactatgtttgtgttcaaaatacaaatgccatctgatgttcgtgtaaagctaatcaatgacttggctgatattgagtacagactaagctttgcatgcaacgataaactgcagctgggcgcactgatctcaactttcacggacactcgcacggctatggttgctgctgccagctaattccagtaatttgaaggatctttctgctgctccctctggaatctgaagatgaagcgcagctacattatagggtcaacgtcttgcctgtagttagcaagctgaaaggtttggtgagggttgtcttagatcatctgtatgtctgctggacgtgatgtggtaactgcctggaacttgggagtactcgtatgactgaacgctgccaggcgttctcatgttatgcgtgtaagattctatccagtagtat

SEQ ID NO: 22027 - DNA, 644 bp, Zea mays
  Clone ID: LIB3357-052-D5_FLI
cctcaaatctgcccttgccgccgccactgcccgatccaggtgtgcagactgctccctcctcctctccgctccgaatggcccgcacgaagcagacggcgcgcaagtcgaccggcggcaaggcgccgcggaagcagctggccaccaaggcggcgcgcaagtcggccccggccacgggcggcgtgaagaagccgcaccgcttccgccccggcaccgtcgcgctccgcgagatccgcaagtaccagaagagcacggagctgctcatccgcaagctcccctcccagcgcctcgtccgcgagatcgcgcaggacttcaagacggacctgcggttccagtcctcggccgtggcggcgctgcaggaggccgcggaggcgtacctggtggggctcttcgaggacaccaacctctgcgccatccacgccaagagggtcaccatcatgcccaaggacatccagctcgcccgccgcatcaggggcgagagggcttgagctgtcgcgctgctgctgttcgtcgttgtaatgtctgaagtagatggtggtgggtgctttctatgccgtgcctatttggctatttcggacgtgttggttcactgaatggaaaatggaatgccatttctcgtcagaaattaacgatgactttttacctgc

SEQ ID NO: 22028 - DNA, 3112 bp, Zea mays
  Clone ID: LIB3357-052-E10_FLI
cttcgttctctccctgctgctctgctcctgccgcctggctgccgtgccgccgctgatccctctctcccccctcaaagccccaattgccgggtgctcctcttccacccccattgccgactgcttcccgccagagagtggggaagggaaggggggggaagggagatggcttcttggatagggagtgggtaagaatcacacgatgcagttacctccacctttctctcttctccttttgcgggcatattcttcacctccgcctgcctagatccttctttcttcggcccggcttagcttccagtctcaccaacagttctgacctcggagcatctatcaatcgggccactctctggtaaggcaaccagccacgccacggcacccctttttgttcgagaatctgcttgcccgcgtcgccgtcgtggctttgttcctcctcgcgactgattcgtcggcctgagtcatctctttttgtctaattggtctcagcgcccgttccatcgggttttgatgcaagagtggaggagttggtaggttgttgtgactggttgttggagagctggagccagattgaggagaatttcagccaattttagcggaaccgtaaaacccatctggagaatttttcctgcgcctcctacggttaggagctgtggctggacagtgcctgcctacgctctggagttttagtgcagttttacaagttttcagtcaattttgatcaagctcaggggaagtaccaatttgggagtgctagctgctgctgcagcagcagctgcgggttccttggtggcagatgggttgctccaactctaaagtggacaatgaggagcctgtgaggcgctccaaggacaggaggcagctcatgaagcagctggtgcgccgccgccctgagcttgcagctgtgcacattgcgtacctgcacgccctccgtaacacaggagccactctccggcaatttgtggagctggagtctgcattgtcacagcagcctcccgtagaccttgtggtgccgccctcgcctactccacagcctcctcctcctcctcctcctgaactctcggtgacatcctcattgccaccctcgccatgccccccgccgcctgtcccttttagtccagtaacaaccataagaaagatggagaagagggatggtgagctcccaccaccaccaccacctctggttttgagtccgataagattaaggaagatggaggatgagttccatgggggtgattttactgatgatgacgacactgacagctgctcgactcctctaccaccacccctgccacccggcatagattgggaggacttggatccctacaatgtgtgccccttgagtttcccatctccatttgctgataggaatgataaagaagtggcctcgcatgtgaccatggacaatgatcctgaagtagacacagaattttatggagaggaggatgaaagcatgcttggcaataatgatgtcattgtggatagggtccatgtgaatccagccaagggtagggctctgggtgatggcaactcttcaacggtgagctgggtgacaaaggattcagactctatggcggtgccttggaggagtaagaagtcgcttgtagagattgttaaggagattgatgagtacttcttgaaagcagcagcaagtgggaatgacgttgtgatttttttggactctgctggtggacggcctgatgccttagaggtagaggcaaagaaaggtgcaggaaaaaattctaaacctgcgaaggttttctccacgctttcttggagctggtcttttaaatctcagcaggctagcagagaagcctcagttctgaattctagtgcttctggatatggttaccatggcaagacactggagaagctttatgacgaggaacaaaaactctacaagttaatcaaggatgaagaatttgcaaggctccagtataagaaacatgtctcagtgctacaaaagctggaatcaggagggcatgatagactgcatgccgaaagacttcgggattctattgaagaactgcaaactcggataatctcattggaagaagctgtgagtttggcatgtttttccatatcaaatctcagagacgaggaattatatcctcagatcattgaattatctgcagggcttgtgcatatgtggaaaaacatgcacgagtgccatcaggtccagaaccatattgcccagcaagttagtctccttggcaacagacctgggagtgaaccaacaagtgacactcatcgccaggcaacatctcagctggaaattgaggtgtctggatggcacactgccttctgcaatcttatcacatcgcagcgtgaatacgttagcatccttagccaatggattggtctcacagactgccttccggatgatggtggcttaatgagaagttcatctggaatccttagcctctctgaggaactccagcgtgctcttgacaggctaccagagaaggtagcagctgaagcgataaagacctttatgtcagtcatacactctatagttgtacagcaaagtgaagaacgccaactaaagaagaagtcagataacatggatagcaagttccagacccagttagagaaacacggtgaaaatacaatgcaaaactcggcccagcctccaaataagaataactattcagcatcaaagaatggaacgaaactggatgcatttagaaagcaggtcgaggaggagaaagccagatacctaacctctgtaagggtaagccgagccatgacactgaacagtctgcagacaagccttcgaaatgtgttccatgctctggagggattctcaggagtgtgcgtacaggcatttgaaggtatcagcagatgcagtgaagttgctgttattcactcgggagcagcttcacctgctatttcctcgtgaccttgcttcaattgctgtgattattcattgtaagtaggcaaaggataaactggttccacgtgaatacccttcgcttctaattttcagaactttgaatagctttcgggggattatgtgaagtcaatataggcataatagtcttgaatacatcacaatgtctcaacttacattttggttcttattgcatgggatgtactgctctgtacataatcattt

SEQ ID NO: 22029 - DNA, 2726 bp, Zea mays
  Clone ID: LIB3357-052-E5_FLI
ctccactccacttgctctggagtatcccgcccggagtcctctccttgctttgccattgttctggtgaaccacaccaccttcccaacaaatccgagctattagctaaagcaatacccgcaccaccatcgccattgccgacccctcctcttcttaacctccatgcatgctgcatgccacggcttcacctcacctccaccgccatggccggcaccaatggcgcccctcgccttctccgcctccctaccactgccactaccagtaccagctcgacgccactgctgcgactactagcgctactacagctactatgcctcgcctcggcgcttaaccaagacggcatactgctgctgtccttcaagcaatccctcgcctccgaccccctcggctccctctccggctgggggtacgccgacgccacgccctgcgcgtggaacggcgtcgtctgctcgccggactcgcgagtcgtcagcgtcgtcctgcccaacgcgcagctcgtcggccccgtcgacagggagctcgccctcatcgagaacctccgccacctcgacctctccggcaacgcgctcagcgggaccatcccgcccgatctgctccgcgcgccggagctccgcgtgctctcgctcgctggcaacggcattaccggcggcctgccggagcaggtcggccagctgcgcagcctccgcgcgctcaacctagccggcaacgctctctccggggccgtcccgcagaacctcaccctgctgcccaacctcaccgctgtctcgctcgccaacaacttcttctccggcacgctcccccgcgggggcttcccggcgctgcaggtgctcgacgtcagcgccaacctgctgaacggcaccctgccgtcggacttcggcggcgccgcgcttcggtacgtcaacctgtcctccaacggcatcgccggcgccataccgtcggagatggcctcgcgtctgccggccaatgtcaccatcgacctgtcctacaacaacctcaccggcgccatcccgtcggtgccgccgttctcggcgcagaggcccacggcgttcgagggcaacgccgagctctgtggaaggcccctcgacagcctctgcggcttcacgtcctcctcctctgctgccgcggagcccccgaacgctaccgcgaagtcgccgccggccatcgcggcgatacccagggaccctaccgaggcgcttcctggcgatggttccagcagtgccgcaggcgcgtcggcgtccggggagcagcgcggcaggatgcggcttgctaccatcgtcgccatcgccgccggtgacgttgctggcatcgccgtcctgttcgttgtggtcatgtacgtttatcaggtgaggaggaagaggcagcgtcaggaggtggcggcaaagcagaggacgggcgtcgtgttcaagaagccggatcccgacgactctccggacgctgtcagccggagcctttcctgctgcctgcgcaagaaggccggcgacgacagcgactactcggaggaagtcacggacacgtcgccggcctccttcgcagatcacaagaacggcaaggcggccggagctgaagcggcgagcaataagaagatgggcggggacggcgcggtgctagtgacggtggacggcggcgcggagctggagctggagacgctgctgaaggcctcggcttacatccttggcgccgccggcagcagcatcgtgtacaaggccgttctggccgacggcgcggcgctggcggtgcgccggatcggcagcgagtgttcgggggtccggcgcttcggcgaactggacgcgcacatgcgcgccgtggcgaagctgcggcacgacaacatcctccgcctgcgcggcttctactggggccctgacgagatgctcatcatccacggcttcgccatcaacggcaatctcgccaaccactccgttaaaaggaagcaggggtcgtcgccgatcaacctcgggtggagcgcgcggctccgcatcgcgcgcggcgtggcgagaggcctggcgtacctccacgacaagaagtgggtgcacggcaacgtgaagccaagcaacatcctgctggacgcggacatggagccgctgctggcggacctcggcgtggaccggctggtccgcagcgcggacggcggcgggctgacgaagccgtcgtcggcggcgctggcgggtcggttcggcgggagcaaacgttcggccaagagcctccccgacctgtcgccgccgcccagccacgtaggcggcacggccgcgcaaccggcgagcccggccgtcgacacggcggcgcactaccgggcgccggaggccgtgaggagccccagggcgagcggcaagtgggacgtgtactcgttcggcgtgctcctgctggagctggtggccgggcgcgcgctgacgagcctggagctgtgccagtgcgctgcggcggaggggaaggcgcaggcgcaggcgcaggcgctcggggtggtggaccccctgctgcgccgcgaggtgcaagggcgggaggaggaggaggaggcggtggcaagctgcctccggctgggcgccgcgtgctgcgccatggtgccgagcaagaggccgtccatcagggacgcgctgcaggccgtggagaggatgatacctgctgcggttgcttcgtcgtcaacatccacggcagcagcacaccgtcagtgaaaaacaaggacacgtcttgcgtcgaaaaaattgtttgccacggaacatggatgcttgcatgcttgt

SEQ ID NO: 22030 - DNA, 898 bp, Zea mays
  Clone ID: LIB3357-059-F12_FLI
cggagttcttcagcgtcgcgcaggacgccgacccgctggccacgctcttcatgaacgagtacaacgtcatcgagacctgcgacgaccccttctccaccgtcgacacgtacgtgtccaagctcaaggacctccgctccgccggcgccatcctcgaagggatcggcctggagggacacttctccaagcccaacatcccgctcatgagggccatactcgacaagctcgccaccctgggcctgcccatctggttcaccgagatcgacatcagcaacaagttcgacgcgcagacgcaggccgcctacctggaacaggtgctgcgggaggcatactcgcacccggccgtcagcggcgtcatgctgtggacggcgctgcaccccagcggctgctaccagatgtgcctcaccgactggaacctcagcaacctgcccacgggggacgtggtcgaccgcctgctcaacgagtggcggacgctgcaggcggccggccagaccgacgcgcacggcgcctacagcttcaccgggtacttgaaaagatctccatccttgtcgtctcaagcacacgacatccccatcttacttgagatctgtatcctccttctgcaacagtgtccaaaaccttgtccaatgtgttcctctaaaggtgaccatgacgatctcgccaagcttgagcttgtagaggatggtggttttaccagtggtatcgatgccgaccataaggatctgcatatccttatcgacgaagagccggctgaagagcttcctaaacacgagccccattcctctatgtctgctttctttaccacttgagttgcattgaatgtgaaatccgaaggaggaattggggatcgttgggcgaggtgaagagttgatggggagcagaggggaggagagggattaac

SEQ ID NO: 22031 - DNA, 702 bp, Zea mays
  Clone ID: LIB3356-019-C2_FLI
ctccagtctctgggcaccaaatttccggcggcgatggcggcggctgtggcgaggtcagggttccggcgcatgttctccgtctctgccttcgcgccgccgaaggcgcccgccgcgcgccccaaggccgacccatcccccaacctcttcgtctccggcttaagcaagcgtaccacaagtgaaggacttagagatgcctttgcggagtttggtgaagttttgcatgctcgagttgtgaccgatcgtgtcagtgggttttctaagggatttggctttgtaaggtatgctacgaccgaagaggcagccaagggaatagaaggaaaggatggaaagttccttgatggatgggttatttttgcggaatacgctaaacccagaccaccgccggaggaaacagggatgaattcgcagccccagcagtcatggggagctccatcaggttcctggggtgcacagtagatgaagtgatattgtgagagcccctccctgtccccagccctggggctcgtagcggatcgtgagggatgaatttgtgtgtggtgtgtcacaggtgtgaatgcctttgttgtcccaatattcctaccgtgttgggagtggtcgtttgctcgcgtccacgtctttcacatgaattggttactgtggtagttgtagttctggatacgggaccaaaactaaagtattgctgtcaacaatctgcaacagtcg

SEQ ID NO: 22032 - DNA, 733 bp, Zea mays; identical to SEQ ID NO: 18936
  Clone ID: LIB3356-019-D10_FLI

SEQ ID NO: 22033 - DNA, 577 bp, Zea mays
  Clone ID: LIB3356-019-E1_FLI
cgccgccgccgccgtttcgcgcaccgtaccctagccctcgtcagcggcggcttcgagctcatccagccatgacgttcaagcggaggaatggcggacgcaacaagcacgggcgcggccacgtcaagtacatccgctgctccaactgcgccaagtgctgccccaaggataaggctatcaagcggttcttggtgaggaacattgttgagcaggctgccgtgagagatgtgcaggaggcctgtgtacatgatggatatgttctacccaaattgtatgcaaaggttcatcactgtgtctcatgtgcaatccatgcgcacattgtccgggtccgctctcgtgagaacaggaggaaccgtgagcccccgcagcgcttcagacgccgggatgatggcccaaggcctggtcagggcccgccgcgcccaggcggtgcagctcctgcagctgcagctgctgctgctcctcgtacctaagttctggaattagtttcggggcttagttttgtgaaacattacctgttttgagaaaccattgttactgtatccccttgatgtcaaactttttagcacaatttgtggttctg

SEQ ID NO: 22034 - DNA, 558 bp, Zea mays
  Clone ID: LIB3356-021-B12_FLI
ggccaatgctggggactctggtgcagcagcagggtcaaaggactacgttcacgtgcgcatccagcagcgtaatggtcgcaagagcctgaccaccgtccagggattgaagaaggagttcagctacagcaagatcctcaaagatctcaagaaagagttctgctgcaatggtacagtggtccaggacccagaacttggacaggtcattcagctccagggtgatcagaggaagaacgtctcgaatttcctcgtccaggccggcattgtgaagaaggagcacatcaagattcatggtttctgagcaaccgccgggtccatatcaaaccaaccctgcatgcagggcatcttattatatataatatctgaggtggagcatatctatctggctgtgtactgcaagcaggcctagtacgccgcctgcgcgttcctcctattacacatataggcccctccctgcgtgtatgcttgttaccgtcgtgtcgaaccttgtactacgaggctccatcgaacatcgatggcttgcttctttatcagaacatgtttgaataaacgctatttggt

SEQ ID NO: 22035 - DNA, 1074 bp, Zea mays
  Clone ID: LIB3356-021-D9_FLI
ggccgccacccgccgccgccagcgaggagcgagtagtagcgaccctggtccctgccgcccttgcgttcgtggctccctgcccagtgcccctgcgtcagcgtcactgcactctccgaggtggaggtggttctcaaatctcaagtccatccacggcgctactaccctcgctgcaatggagttgaggaggcctgcatcctctcctcttgtcgacaactacgtggtacctggtgacgtcgtcctggacctctctgagatgaacaaccagaccattaaactcggcgcgggtctgcgtcaggagtgtgacaccatccaggcgactagtctgggaagctgcggcagttgaaacccaacaagtattggattgaaaactcacagaaaagatatataccttctgtagaagataccgttcttggtattgtggtcgacaccaaaccagacaactttttggtagacataaagggtcctaatttggcctttctaccagtactttcatttgaaggcggtacaaggagaaacatacccaagttcgagattggtacattaatatatgctcgagtggtgaaagcaaatagtatcatgaatcccgagctctcatgcatggatgctactgggaaagctgccgaatttggacagctcaaagatggttatatgttcgacacatcaactggcatgtcacgaatgttgttaagttccccaacgtgtccagttctggaggtccttgggaaaaaactgtcgtttgagattgctgttggactcaatggtcgagtctgggtgaatgctcctgcagcaagtactgtcattcttgtatcaaatgcaataatgaggtcagaatctttgagcggcataaaacaaagagctatggtagaaaatctattggagagattgtcatgatgataagtcagcaagcattagtctaaagtaaaatggaggagtttccattgtgtcagttcaaagtaaaagtaggaaagtttgagatcaaagtgactatccccatcaaaagattattatgtatcacgtgtcgtagtatacagtacactatactcttttttatattaaattatcaatgtatttatc

SEQ ID NO: 22036 - DNA, 846 bp, Zea mays
  Clone ID: LIB3356-021-F6_FLI
gagaggagggaaaatgctgcgccacgccgcccgccgcctcgtttcccgcgccgtcgctccgcccaccgcgcgccgggcgctcgccacggcggaggtgcccgcggaggccgtcgaggactccacgttcgtcgaggcctggaaaaaggtcgcccccaacatcgagcccccagcgacgcccctctccctcatgcagccgcgcccgcccacgccagctaccatccctaccaagctcaccgtcaacttcgtcctcccctacaagtccgagatcgccaacaaggaggttgacatggtaattgtaccagctacaactggtcagatgggtgttttgccaggccatgttgccacaattgcagagctcaagcctggtgttctctcagtacatgaaggaaacgatgtgagcaagtactttgtgagcagtgggtttgctttcgtccatgcaaactccattgctgatattgtggctgttgaggctatccctgtggatcagatcgacccagcattggttcagaagggtctcgctgaattcactgccaagcttggttcggcctctactgacctggagaaggctgaggcccagatcggagtcgatgttcacagtgccctcaatgctgcattgaccggttaattggtggcattttaaattgtcttgtctttttcatctacagttttagagtgagtttaagtttgcaaactcatgggcatgggatggagggaatgatcctaaataaattatactccatctaaaacatggacatatgtttcttgtttcctgaatcctgcatggatttctttttgtactggtaaacattttaactctgagctcaagacctggagctgctttctgcc

SEQ ID NO: 22037 - DNA, 1582 bp, Zea mays
  Clone ID: LIB3356-022-D3_FLI
gaccaccgcaccatggaatcgctgacgcttcgcgcttcgacggccgcctcgccgctgcagcgacgccggctgctccccggacggcagcgcgcgacgtacgtccgcgccacggcctccgccggcgagccggacctctccgtgcgcgtgaacgggctgcagatgcccaacccgttcgtgatcgggtcggggccaccgggcaccaactacaccgtcatgaagcgcgccttcgacgagggctggggcgccgtcatcgccaagactgtgtcattggatgctgaaaaagttatcaacgttactcctcgttatgcaaagcttcgggcagaaccaaatggggctgccatggggcgcatcattggctggcagaacattgaactcatcagtgacaggcctctggagaccatgctgaatgagttcaagcagttgaagaaagagtatcctgacaggatacttatcggttcaattatggaggagtacaacaaagctgcatggcatgagcttattgaacgtgttgaagagtctggagtggatgctcttgaaattaatttctcatgtccacatggcatgccagagagaaaaatgggtgccgctgtggggcaagattgtgatttgctagaggaagtttgtggttggattaatgagaaggccactgttcctgtttgggcaaagatgactcctaacattacagacattacacagcctgcaagaatatctcttaagtctggatgtgaaggagtttctgcaattaacacaattatgagtgtaatggggattaatctcaaaacactgcgtccggaaccttgtgttgaagggtattctacacctgggggttattctgcaagagctgtgcaccctatagcacttgctaaagtcatgcagatagcaaggatgatgaaagaagagtttgctgatggacagtctctctctgccattggtggtgtggagactggcaatgatgctgctgagtttattcttcttggtgctgatacagtacaggtatgtaccggtgtgatgattcatggttatccccttgtgaagaagctttgcgcagagttacaggatttcatgagagagcacaacttttcatcaattgaagagtttcgaggggcctcgcttccgtatttcacgacgcacacagatctggttcaccggcaacaagaggcggtcaggcagaggaaggccatcaagaagggccttcaatcagacaaggaatggacgggtgatgggttcgtcaaggagaccgaaagcatggtatccaactgatgcatctctgccaccccccaccgggccattccttacaccatgctccaacttcatctttttaataaacgcgcaccagaaatgccacacaccaagcatctagtcctcatctgtacatggttctgaaccttgggccttcagtctatagaacaggccatgaatccacacaaagtcgtgacaacgggtgacattgagcgatatatttgtcatgtgaacattaatttgtagcactgagctgagggcttgaccttgtaaaatcttggagacttcaatctcgcacaggttttctcaggagtttataattatacgtgagtgatgtgtgagg

SEQ ID NO: 22038 - DNA, 1709 bp, Zea mays
  Clone ID: LIB3356-022-F10_FLI
ctggctcaataatctctccatcaggggatcctaaggctgatcactgatcaggtcggaggactcggcgggcgcagccatgaacgagaaggcgtccgtctccaaggagctcaacgccaagcacaagaagatattggaaggtcttcttcggcttcctgagaatagagaatgtgcagactgcaagtcaaagggtcctcgatgggcaagtgttaatcttgggatctttatatgtatgacatgttctggaattcatagaagcctgggggtgcacatatctaaggtaagatctgctaccctggatacatggctgccagagcaagttgcatttatccaatcaatgggaaacgaaaaagcaaatagccattgggaagcagagctgcctcctaactatgatagggttgggatagagaattttatccgtgcaaaatatgaggacaagagatgggtaccgaggaatggaacattgcgaccttcctccggtgttcgagatgataagagccaagagtctccagctagtgctaataggagtggacatcatagatcttcatttgagcaaaaccgagcttcaccagctcttccgagcaaagttgcacctgtagcttcaaggataccctctcaggcatcacctcagcccccaaaggtagaaccaccagttcctaaggtggtttcacctcctcagccacaaaaatctcctgccaaagttgaggcaacaccccctaaagttgagaagccatcagttgcgccgcctcctaaagttgattatgctactgatctctttaacatgttatcaatggatggaacaacagagaaagagtcagagtcatctccaaacgatgataatgcctgggatggcttccagtctgcacaaccagtacctagctcggaggaaaaagattctgccaaaccagcagaaagcatgacccagtctacacctggaatagaagacttatttaaagattcgccagttgtgtcattatcctcagctccagctgtttcccaagtaaatgcaaagaatgatatcatgagtttgtttgagaagtccaatatggcatcaccattcgctgtccaacagcagcagctggcgtttatgtctcagcagcaagctcttctaatggctgctcttaaagctggaaattcaccacaaatagttccagggaatgccaatcaactaaacactaacgtttctaatccccctcttggaaccttgcctttccaaaactggacaaatcttggctatcaaaatcctgggttgactctagcagcagcacagaatggtgccaccaaggtttcgaacaacaatcaagacctctcttctggtacctttggttttggcacacctgggatgcacaacattactccagctgtcccagcaaatggtgccacggcagcaggtgctagcaacaacggcactgcatcaactgcctcttccactctcccctcacaatctggcaaagattacgatttttcctcgttaactcaaggatttttcaccaagcgatgagtgcctagtgggcttgaaagccaaacggatcaccgggggagcttgcacatgctttatttcgaggcagattttattctggtggatatatatatagttgtcacatgaccttgtagctgtcagacaataagagtggaaatatgcggctaaatagctcatgttgtttgtacaagtgaagaattccttgccgttttatgtcaacggttttgactcg

SEQ ID NO: 22039 - DNA, 1120 bp, Zea mays
  Clone ID: LIB3356-022-F9_FLI
gcccgacgccctcgccgctgccaccaaaatcgcacgcgagccccaaagatccccaaaccctacacccgcccgccggcgcactcggggaccgtcgaatcgagcaggttgacggaggagaggaagcctcgaagatgttccggaaccagtacgacaccgacgtgacgacatggagcccccaggggcggctgttccaggtggagtacgccatggaggccgtcaagcagggctcagcctgcgtcgggctccggtccagcacccacgccgtcctcgccgccgtcaacaagcccgcctccgagctctcctcctaccagcggaaggtgttccgcgtcgctgaccacgccggggtcgcgctcgccggcctcaccgccgacggccgcgttctctcgcgcttcctccgcaacgagtgcatcaaccactccttcgtctacgaggcgccgctccccgtctccaggctcgcgctcaagctcgccgacaaggcgcaggtttgcacacagcggtcatggaagaggccctatggtgttggcctcctagttgctggactggacgagtcaggggctcatctgtactacaactgccccagcgggaactactttgagtaccaggcattcgccatcggttctcgttcccaagccgccaagactttcctggagcgcaggttccagggctacaatgactacaccccggagcagctcatcaaggacgccctctccgccataaaggagacactgcagggtgagaagctgtccagctccaactgcacggtggccatcgtaggcaggaaggaggacggcaccatcgagccgttcgagatgattggcgccgcaaggatccaggaacttatcgactccatggaggtcgccgaggaggcgcccgcggaggaggccagctccatgcaggaggaggagaggggcccagaagatgctgctgctgctgcacctgcacccatggacatctagaagccccatatgaacccaccaacctcacgctgcattctgagttcccaaaatactagactgcttctttagaaaattgttgtgagttgtgactcttgtgtactctttgcttccgaagaacttctctatggtctctccgacgaacagttgcagttgcttgggtttgg

SEQ ID NO: 22040 - DNA, 791 bp, Zea mays
  Clone ID: LIB3356-022-G1_FLI
gaaaaatatccccaaaccctagctcccgatctcgatggcgaaccctcgcgtcttcttcgacatgaccgtcggcggcgccccggcgggccggatcgtgatggagctgtacgccaacgaggtgcccaagaccgcggagaacttccgcgcgctgtgcacgggcgagaagggcgtgggcaagtccgggaagccgctccactacaagggctccaccttccaccgcgtcatccccgagttcatgtgccagggcggcgacttcacccgcggcaacggcaccggcggcgagtccatctacggcgagaagttccccgacgagaagttcgtgcgcaagcacaccgcccccggtgtgctctccatggccaacgccgggcccaacaccaacggctcccagttcttcatctgcaccgtcgcgaccccttggctcgacggcaagcacgtcgtcttcggccaggtcgtcgagggcatggacgtcgtcaaggccatcgagaaggtgggcacccgcaacggctccacctccaaggtggtcaaggtcgctgactgcggacagctctcctagatctctctgatctggtctgttcggccgccctccctccgtcatcgtcgactccccctgcgtccgttcctttggatctgaataagatggtggtgatctgagtggtggtcttagtttatcatgtatcgctcgcagtttaatttagcggtttaggtgtggatctgtgaaccccatggcgcctctgcttgattcgtgtttcacctgttatgttctgagattcatgataatgctatgagaactg

SEQ ID NO: 22041 - DNA, 847 bp, Zea mays
  Clone ID: LIB3356-022-H10_FLI
acaatcacccttgaggtggagtcttcggataccattgacaatgtcaaggccaagatccaggacaaggagggcatcccacccgaccagcagcgcctcatcttcgccggcaagcagctggaggatggccgcaccctggcggattacaacatccagaaggagagcactctccacctggtgctccgcctcaggggtggcatgcagatttttgtgaagacattgactggcaagaccatcaccttggaggtggagagctctgacaccattgacaatgtgaaggccaagatccaggacaaggagggcattcccccagaccagcagcgtctgatctttgcgggcaagcagctggaggatggccgcactctcgcggactacaacatccagaaggagagcacccttcaccttgttctccgcctcagaggtggtatgcagatctttgtaaagaccctgactggaaaaaccataaccctggaggttgagagctcggacaccatcgacaatgtgaaggcgaagatccaggacaaggagggcatccccccggaccagcagcgtctgatcttcgccggcaaacagctggaggatggccgcaccctagcagactacaacatccaaaaggagagcaccctccaccttgtgctccgtctccgtggtggtcagtaagtcatgggtcgtttaagctgccgatgtgcctgcgtcgtctggtgccctctctccatatggaggttgtcaaagtatctgctgttcgtgtcatgagtcgtgtcagtgttggtttaataatggaccggttgtgttgtgtgtgcgtactacccagaactatgacaaatcatgaataagtttgatgtttgaaatt

SEQ ID NO: 22042 - DNA, 631 bp, Zea mays
  Clone ID: LIB3356-023-A5_FLI
gtgttgccgtgctggtgggtgtgccgcataaggacgctgagttcaagacccacccgatgaacttcctgaacgaaaggaccctgaaggggaccttctttggcaactataagccacgcactgatctgccaaatgtggtggagctgtacatgaaaaaggagctggaggtggagaagttcatcacgcacagcgtcccgttcgccgagatcaacaaggcgttcgacctgatggccaagggggagggcatccgctgcatcatccgcatggagaactagatttcgctgtctagtttgtgatctggcctgggcttggggttaataaaagaggcaatgctagcctgccctttcgatgaggaggtacatacacgctggcgatggaccgcgcttgtgtgtcgcgttcagtttggcttttgccaagcagtagggtagcttcccgtgtcggtaattatatggtatgaaccatcaccttttggctctacatggtatgaacgtaagatacaaattccaactacctctagctcgcttgtgtggtatctgtatcagtattcatgtgtttgtttgcttatgtgtttgtttgcttgtatttgctggtgcttgtatcgcgggatgcaatgagttgttgtttggttgttgtc

SEQ ID NO: 22043 - DNA, 429 bp, Zea mays
  Clone ID: LIB3356-023-B7_FLI
ctcgcgagccatcgcttctgtaattctcaggcaccccgctcgatctcatcctaatcggcatccggaagaaatggccaagtcgaagaaccacacggcgcacaaccagtcgttcaaggcgcacaagaacggcattaagaaacccaagcgccaccgccagacctccaccaaggggatggaccccaagttcctgaggaacctgaggtattctaggaagggcaacaaaaagagtggtgaggctgaagctgaggagtaggaaggaaagcatggctttgtttcctctgtttttagctcagttccacctttaggacctggggttttgctaaagatggaacttaagtggtgttactgtatgatggcaaggaccttttgctgccgaaggttatgttttgaagttcatgctaccttttaaagtacggattaccttgtgcc

SEQ ID NO: 22044 - DNA, 847 bp, Zea mays
  Clone ID: LIB3356-023-C12_FLI
ctcccgcccccttctctcccctcctcgcctccccgcgcgcgcgtttttataagggtttcggcggaggcgcccggtcgctggcgatggccgacgacggcgggagccacgagggcagcggcggcggcggaggcgtccgggagcaggaccggttcctgcccatcgccaacatcagccggatcatgaagaaggccgtcccggccaacggcaagatcgccaaggacgctaaggagaccctgcaggagtgcgtctccgagttcatatcattcgtgaccagcgaaaggagaaacgaaagacaatcaacggggacgatttgctctgggcgatggccactttaggattcgaggagtacgtcgagcctctcaagatttacctacaaaagtacaaagagatggagggtgatagcaagctgtctacaaaggctggcgagggctctgtaaagaaggatgcaattagtccccatggtggcaccagtagctcaagtaatcagttggttcagcatggagtctacaaccaagggatgggctatatgcagccacagtaccacaatggggaaacctaataaagggctaatacagcagcaatttatgctagggaagtctctgcattgcttaccatgtgtattggcagaaaacaggaggcacttacaaagggtgttaatctctgcgatggctgcctctcaggtgtaaattggcttcggtttagcgctgcttttgtccgtatatttaggatgatttgactgttgctacttttggcaaccttttacatttacagatatgtattattcagcataaatataatatagtagtcctaggcctaaataatggtgattaacataccaagtctttac

SEQ ID NO: 22045 - DNA, 407 bp, Zea mays
  Clone ID: LIB3356-023-D2_FLI
gcaaagctaagcaaagcaaggcaacccattcccgttcttgtcccgttgtctttgtctctcttgtcccttgctgctcgctcgccgccgtttctcggagcgctagctgctgctgctgctgctgggagtgtgagagtgaggcgaagggccgacctgagccggggagaagaagggggcctgccggccggggctggaagacatgagcgtgaccaagttcatcaagtgcgtcacggtgggcgacggcgcggtgggcaagacctgcatgctcatctgctacaccagcaacaagttccccacggactacatccccacggtgttcgacaacttcagcgccaacgtctccgtggacggcagcatcgtcaacctgggcctctgggacaccgcggggcaagaggactacagcaggctgc

SEQ ID NO: 22046 - DNA, 710 bp, Zea mays
  Clone ID: LIB3356-023-D9_FLI
gccgacgccaaatctctcctgaccgcaacggggaactcgacccccgcctccgccaccgccaccgcgccggtcgccgacccactcagatgaacacgtctccgtccagatacaggcagcggcggcggagttggctggcgcggaggtcacttggtcgagttaagcgcgtgttgtaatggaggggctcaacgccactgatgctgtgatcaagaagccaaggagtgttgcattcaggaagccaaggtccatgaagcagctcacggttgagtgcaatggcatttgcctgccatctcggagtgctcgtcatgacgatgacactggcgtcgaagctggtgggcagcggaggaaagagctacacctaaatagccctgaaatgaagggctccatgactcataggagtgacgtgcccagtaagataagaagggatgataaatctggaggtgactatgatggtcatggtcggagcagaaaaacgaaggatgccgccaagcatggaagtgaaagtgttcttgccctggagtgcacagcaagaaacattgaatcccttgacaatccacagttggtccccagagatgactctttgcctggtgaaaataggccgagaaaagtaaagttcaaatttaatcggacccaacgtaccaaaaatggccaggatgatggtggcagtggcattcctgccacgtcggcctgctttattaatcagtacaagcaat

SEQ ID NO: 22047 - DNA, 736 bp, Zea mays
  Clone ID: LIB3356-023-F11_FLI
ccgaattccctgcgattcctctcccctcgcctcctcgtctccccctaggggatcgtcggagaggaatcgcaaagagggccgtctcatccgagttaaggaagccatggagcacaaggaggctgggtgccaggcccccgagggacccatcctctgcatcaataactgtggcttcttcggcagcgcggcgaccatgaacatgtgctccaagtgccacaaggagatgataacgaagcaggatcaggccaagctggctgcctcctctatcgacagcatcgtgaacggcagcgacgccgtcatggagccggttgttgctggcagcaacacggtagtagctgttgcccaagttgagttgcaaacaatgaacgtgcagcagcccgctgatgttgccggacccagcgagggggtggcggcgatctccaaaggggggaaggtagggccgaaccggtgcagcgcctgcaggaagagggttggacttacgggattcaactgccggtgtgggaacttgtactgcgcactccaccgctactccgacaagcacgactgcaagttcgactaccggactgctgccagggacgccattgccaaggctaatccggtggtgaaggcagacaagctcgacaagatctagggggggttccctacggttgggtatcaggaagattgtaaaccgcggtaactcgtcatgcggaactgctgccttgccccccgcgcctttctcttccatgtttgctgctac

SEQ ID NO: 22048 - DNA, 1219 bp, Zea mays
  Clone ID: LIB3356-023-F6_FLI
cccacacccctgttcgtggcggcctccgcccctccctctcaggctctcaccaccgtctgctggtggttgccgcggcgccgctcctccctcgtggtggcggtggaggactacggtcggggatcgacggcttcttcgtccgttggttgggaggcgaggcgatacatcgaccaaccaaaagaaatgtcagctggcaggcaagcatactggtgttaccagtgccgacagagggtgaggccacggggccgggagatggtttgtccctactgtgattctgggtttgtggctgaaatggatgatgtagatgctctcatgagccacttcgtcgggacggatcctgatttccatcgcgacccacggttcgggatcatggaggcgatctccgccgtgatgcggcatggtatggcagggatgaacagggaggttgatgtcagagggaggccgaacttcttctcagacctggagatggagttcggttcagggccatggctgctcttccgtggccagctccccggccacctcaccgaggacaacggtttcgatgttttcgtcaatggacgacgtggcggcggcggcggcggcgtcggcatgaggagggccaacatcgcggactacttcgttggccctggactggtgatcttatcgagcagttgacccagaatgatcgccgaggaccaccacctgctgcacagtcctcgatcgacgctatgcccacagtgaagatcacccagaggcatctcagtggggactcgcactgccctatctgcaaggagaagttcgagatgggatccgaagcaagagagatgccatgcaagcacctgtaccactccgactgcatagttccttggttagagcagcacaattcctgccccgtttgccgttacgagctcccgccacagggctctgccaccggtgctagctgctcgcgcgcgagatcaaccgaccagagccagagctcaagtagttcaagcagcagcgggagaaccagtgggcgtcaaaggagaaggaacccgttctcgttcctgtggcctttccgctcatcaagtagttctcgctagattagcctctggtaatctttgctcaggttcgaaatactgtttgtttttttgggtcaaatacgctggtctaatgggctttaatgtggtgggatctcaatctgtactgtatggtttgttaatgatcgccacacgatgtttctccttgcaagtatattattattacc

SEQ ID NO: 22049 - DNA, 890 bp, Zea mays
  Clone ID: LIB3356-023-H2_FLI
cacactcccctgccgctgtgccgcacccgcacccctccagcgcgcgcgggcacgagcacgagtacgaggctccatcgccggacgaccaggtagttgcactgccgccaccgtcgacgacgaccgaaggcgacgatggccaggccgcagcaacggtaccgcggcgtgcggcagcgccactggggctcctgggtctccgagatccgccaccctctcctgaaggcgcggatatggctgggcaccttcgagacggcggaggacgcggcgcgcgcctacgacgaggcggcgcggatcatgtgcgggccccgcgcgcgcaccaacttccccgccgacgccaacggcccgccgccgtcgttcctctccgcggcgctcgtcgacaagctgcaccggttcaacctggcgtccgtgcaggccgcgcagcggcagagagaggcggcggcggcggcggcggcagcagcagcaacctccgcgcccgcgacgcctccgacgccgccggccacgcagtggggcggcggcggtaggtccctggaggagcagcacgtggagcagatgatcgaggaactgctggactccgacttctccatggagatttgctgctagtgctaggctagccgcgacgcgacctgcctagcgactggctagcgcccccggccggcccgtcaccgccgcgctccgctccacctctcctctgttcttgttcttgcacttgcaccatgcgtcgcgctcgcgctcttctttgtactcgtgccgacgtgcgtagtatcgctcagccgctgcagcgtgcgtaggagcctgatttgtgtacgccacgtgtatagctgtagctgtacgtataagtatatatatgtaatcgagcattctcattcttgcaaatttaaaggccgcgtgcgtgc

SEQ ID NO: 22050 - DNA, 698 bp, Zea mays
  Clone ID: LIB3356-025-A2_FLI
ctgtgtgctctctcgctctctcggtggaagttggcgacgactgggcgaccgccgccgccgtacgccaggtgctcaggtctccgtcagacccttcgccaggtcttcttcggcggcgagcaccgccagggtgtgcacccaatcttcttcactgggtcctccgctgcttctagtcacgcatctaaatccggagttgccagcattcgcttgaggtgccggaccacagcacaccatcatgcaggctagcgataggttcaacataaactctcagcttgagcatcttcaagccaaatatgttggtacagggcatgctgatttgtctagatttgaatgggctgtaaacatccagagagacagttatgcctcttatattgggcactatccaatgctagcatattttgccattgctgagaacgaatcgatcggaagagaacgttacaatttcatgcagaaaatgctgcttccttgtggccttcctcccgagagagatgaagattgaagagctagctggtgctgcatagtttctgtgtttccagtggttcctgtagtgtttgcttttagctaccatcgtactatgtgcgagcatgcctttcacgtttcttcctttagtctcttttgtgatacatagaacccgtatgtattgttaaccaaatgctggcctgccccattgttgtgtttttgtggtgtgttcagccaatgtg

SEQ ID NO: 22051 - DNA, 1059 bp, Zea mays
  Clone ID: LIB3356-025-E10_FLI
gttccgtctcattctcatccccgacccccgcaccgcagcgtaaaccctagtccccggcggcgaccttgcggcctccgctgcgctctgactggtgcgcgtttagacgaggagctgcggcggccaagaccaatcgaccatggctacccgtatccagtttgagaacaactgtgaaattggtgttttctccaagctgacaaatgcttactgtctggtagcgattggagggtcagagaacttctacagtgcctttgaggctgagcttgcagatgccatccctgtggtcaagacctctattggtggcactagaataataggccgactttgtgttggaaacaagaatggacttctattgccacatactacaaccgaccaagagcttcagcatctgaggaattgcttgcctgatcaagtggtggttcagcgcattgatgagaggttatctgcccttggcaattgcatagcctgcaatgaccatgttgcacttacgcaccctgaccttgacaaggagactgaggagttcattgcagatgtgcttggggtcgaggtgtttaggcagactattgctggaaatatccttgtggggagttactgcgccttctctaacaggggtggtttggttcatccccatacatccgttgaagaccttgacgagctctccacgctcctccaagttcctcttgtcgcaggaactgtgaacagaggaagcgaggtcattgctgcaggcatgacagtgaacgactggactgccttttgtggctcggacacgacagccaccgagctctcagtcatcgaaagcgtcttcaagctgagagaagggcagcccactgcgattgtggaggacatgaggaagtctctgatagacagttacgtgtaactggggggccagcagatgtgggtcagagtttgcctttgctaaaagatgtattgcaagctatagtcgaattatcagtagcacaacataaccctctgatatgttcgtggtttatccgtggtttctgaattgtagacttctgcgttgaagctcgtgctactgtttgttttccattgtttgttcacacc

SEQ ID NO: 22052 - DNA, 1241 bp, Zea mays
  Clone ID: LIB3356-026-B10_FLI
gagagacagcatataggcaggcaggcaggcgcggtgagaggaatcggcatcagaggtacggtacgatgttccgggaggagcagctggacctggtgctggtgccgctggccctggcggcggtggccggctaccacctgtggctcctctgggcgatcctgcgccatcccacccggaccatcatcggcctcaacgccatcgcacgcaagcgctgggtcgccgccatgatggccgtcggtaccatgcaccttcccatctcatcgatcggcctagctagctcctcccactcactctctccctcatcaccgtatcccattccattactctcttgctgcgtgcatacataccatggatggcgcaccggccggccggccagcagaacacggagaagaacggcgtgctcgcggtgcagacgctgcggaacaacatcatggcgtcgacggtgctggcgaccacggccatcacgctggtctccgtcatcagcgtcttcatcggcgtcacgtctccggcctcctcctcttcctcgccgtcctccaaggcgccgcggctggtgtacgggagcaaggccggggaggtgttcgcggccaagtacctggccgtgtcgctctgcttcatgctcgccttcgtctgcaacgtgcaggccatccgcctgtacgcgcacgccagcttcctcctgggcggcctgccgcccgggcccggcgacgaggcgcgcgaggagttcgcgtcgtacgtggcgcggacggtgaaccgcggcagctacgcctggtcgctcggcctgcgcgccttctacgtctccctcgcgctcttcctctggacgttcggccccataccgatgctggcctgcagcgtgctcatgtgcggcctgctctacttcctcgacaccaccagcagcgccgaccacggccacgcgcacggccagcaacgggccggcgccgcccgaaaggatagcacagtctgatctcaatctacttctttacaagaatgccagctttgagaaactcgtatctcaaaacatataatatataatatcagctttgagaaaatgctatctctgtttctgtctcttctcttcactacatcttctttatttctgtagcctctacaacagatgtagtccctacagggatcaagtatgtaagggagaaaataccttgtcgttagaccgtgtgctcggcagagcgtgtatatagttgtgtataacaccgttttatactgtagactgtattgtttataaagtaaagttt

SEQ ID NO: 22053 - DNA, 656 bp, Zea mays
  Clone ID: LIB3356-027-A5_FLI
acaagggcgagaactgcagcatcacgctaaccggccacagcctgggcgcggcgctctccacgctcaccgccatcgacatcgtcgccaacggcctcaacgtccggggccccaacaacgacacggtccccgtcgccgccatcgtcttcggcagcccccgcgtgggcgacgaccagttcaagaaggcgttcgactcgacgcccggcgcccggctgctccgggtccggaacgcgcccgacgtcgtgcccaccgtcctgcccaacgccttctacaaggatgtcggcgtggagctgctgctggacacgcgcaagtcgccgcacctcaagaggcccggcccgggccccgccgcctggcacaacctcgagtgctacctgcacggcgtcgccggcacgcagggcgccggcgacgccgccgggttcagcctggaggtggaccgcgacgtcgcgctggtgaacaaggaggtggacgcgctcagcgacgactaccccgtgccggcggcctggtgggtggaggggaacaagggcatgaccagggacgccagcggacgctgggttttgcaggatcatgaggagggtaacctcgctatgtgatgattttgataacttcattaaaggtggttattaacgaattaataatacgaaagcaagagttttctcgac

SEQ ID NO: 22054 - DNA, 640 bp, Zea mays
  Clone ID: LIB3356-027-A6_FLI
gccggcgctgagatgttggtttatcaagacctcctatctggcgacgagctcctgtcggattcattcacctacaaggagctcgagaacggcgtcctgtgggaggtcgagggaaagtgggtcacccaaggtcctgttgatgtagacattggtgccaatccatccgccgagggtggtgaggatgaaagcgttgatgacacagccgtgaaggtggttgatattgttgacacattccgtctacaggagcaacctccttttgacaagaaatcatttgtctcttacataaaaaaatacatcaagaatctcactgctgtgttggagccagagaaagcggatgagttcaaaaagggtgtcgagggtgcaaccaagtttctccttagcaagctgaaggaccttcaattttttgttggtgagagcatgaaggacgaagcgtccgtggtattcgcctattacaaggatggtgccactaatccgacattcctctatttctctcatggtcttaaggagatcaagtgctagattagttacccatgttgggtactatatatgttctattgttatagccacaactatagctgccctgcctgaactgaactcaaaggttttttttaagaaaaaactgtccaagattggattgcttgtt

SEQ ID NO: 22055 - DNA, 561 bp, Zea mays
  Clone ID: LIB3356-027-H6_FLI
cgcgcggagagcgagagcccgggagaaacagcggccggcggcaaaatggtgcagcggctcacctaccggaagcgccacagctacgccacaaaatccaatcagacccgcgtggtcaagacccctggtgggaggcttgtgtaccagtacaccaagaagcgcgcgagcggaccgaaatgcccggtcaccgggaagaagatccaaggaattccacacctgagacctgctgagtacaagaggtctaggttgccaaggaaccgcaggactgtgaaccgtccatatggtggtgttctgtctggtaccgcagtcagagagaggatcatccgtgcctttttggtcgaggagcagaagatcgtgaagaaggttttgaagatccaaaagaccaaggataaggcctccaagaactaggcgatataggcatcttccacaatgttcaagtcccttagatgatatggtttaaattttgagcggaagttgcggatccttttatttttttaaaatctcggtggaatgtttttcactcgtctatgtggatgtcagatattttgctaatgttgcctgccc

SEQ ID NO: 22056 - DNA, 733 bp, Zea mays
  Clone ID: LIB3356-028-B3_FLI
gccgaagtcgggcctcttcgtgggcatcaacaagggccatgtcgtcaccaagcgcgagctgcctctgcgcccgtcccaccgcaaggggaaagcaacgaagagggtgtccatggtcaggggccttatcagagaggttgctggctttgctccttatgagaagcgtatcaccgagcttctgaaggttggcaaggacaagcgcgctctgaagcttgccaagagaaagcttggaactcacaagagggcaaagaagaagagagaggagatgatgggcgtcctcaggaagatgagatcggctggtacgcacactgacaagaagaaataaagcatttcaagttcatgaatgtggcagccagagattatcaactgtgttttttccctacctctagaaactagacatggcaaagtatttttgaccgaaacattgtttgttagtaatgtattgaaccacctcgtggtattttgccccaacttccaatgcatcaatggtttgttaatcttttgctatgctatttcattaccgtgaattttatgttccattagatatcataggttgacctgttggttgtacaattactttaaaaactatagtcataaaagacttagtgagtgcatctaaggaactcttcatacaatccaatagacgctggtcgtttatatgggttgtataggtggaatgttatattgttggatctagagaatttccttaatcaagatttacctcttagtatgtttt

SEQ ID NO: 22057 - DNA, 1656 bp, Zea mays
  Clone ID: LIB3356-028-C11_FLI
ggcgtcttcacaaacgccggcgcaaactctcgcccgagcccgacagatcttcaattccccattccgcccaccgatcgaccttcacgccagtctcggtctcttccgaaggcgtcgcgcgcggttgtttgagaggagaggaggaagatgagggagtgcatctccgtccacatcgggcaggccggcatccaagtcggcaacgcgtgctgggaactttactgcctcgagcacggcatccagcctgatggccaagtgcctggagataagaccgcgggacatcacgatgatgccttcagcaccttcttcagccagactggtgctgggaagcacgttccccgtgcaatcttcgttgatctagaacccactgtgatcgatgaggtgcgcactggcacgtaccgccagctcttccaccctgagcagctcatcagtggcaaggaggatgccgctaacaatttcgcccgtggccactacacaattggcaaggagattgttgatctgtgccttgaccgtatccgcaagcttgctgacaactgcaccggcctccagggcttcctggtcttcaatgccgttggtggtggcactggctctggccttggttctctcctccttgagcgcctgtctgtggagtacggcaagaaatccaagctgggcttcactgtgtacccatctccccaggtgtcaacctctgttgtggagccttacaacagcgtgctctccactcactcactcctggagcacactgatgtctccatcctgctcgacaacgaggccatctatgacatctgcaggcgctccctcgacattgagaggcccaactactccaacttgaatcgccttgtgtctcaggtgatctcatcgctgactgcttctctgaggttcgatggtgccctcaatgtggatgtgaacgagttccagaccaacctggttccttacccgaggatccacttcatgctctcctcctacgcaccggtgatctcttctgcgaaggccttccacgagcagctgtctgtggcggagatcaccagcagcgcgttcgagccggcttccatgatggtcaagtgcgacccacggcacggcaagtacatggcttgctgcctgatgtaccgcggcgacgtggtgcccaaggacgtgaacgccgcggtggccaccatcaagacgaagcgcaccatccagttcgtggactggtgcccgacggggttcaagtgcggcatcaactaccaggcgccgacagtggtgccgggtgccgacctcgccaaggtgcagcgcgcggtgtgcatgatctccaactccaccagcgtcgtcgaggtgttctcccgcatcaacagcaagttcgacctcatgtacgccaagcgcgcgttcgtgcactggtacgtcggcgagggcatggaggagggggagttctccgaggcacgcgaggacctggccgccctggagaaggactacgaggaggtcgccgcagagggcggcagtgatgacggtgacgaggaggaggaatactgatctgcttgcatgaatctgtttggctgtcgagccaggttgtggtgttgaaaaacctttgtttgtgtcctggcccccctgggtaatgtttgggtgtttccttccatcatcacttgctgaactgctctagtatttgcatttgtaattgaagtctgtcgcttt

SEQ ID NO: 22058 - DNA, 869 bp, Zea mays
  Clone ID: LIB3356-028-C8_FLI
gcggcggcagctatataaaagccttcacctgacccgggcgctagggtttattcgctcctcccgaccgccgccgtcgccgcctcctctccccagcacccggagctcgaccgaacgccgctcaccatgatcatccccaagaagaaccgcaatgagatctgcaagtacctcttcaaggagggcgtgctgtatgccaagaaggactacaacctggcgaagcacccgcagatcgatgtgcccaacctccaggtgatcaagctcatgcagagctttaagtccaaggagtatgttagggagaccttctcctggcagtactactactggtatctcaccaacgatggcattgagcacctacgcaactacctgaacctcccgtctgagatcgtgcctgccacctcaagaagtctgccaagccacctggccgcccatttggctctggccctcctggtgaccgcccaaggggcccaggccgttttgacggcgacaggccaaggtttggtgacagggatgggtaccgtggtggtcctcgtggtgctcctggtgactttggtggcgataagagtggagctcctgctgagttccagccatcattcaggaggcctggctttgggcgtggtggcggcagcggcttcggcgcgggcccaacctcttcttccatggagtgaagttgcccttggtttggacatggtgtttcccttcgcatgtggcctttagttttgaaggacagttattatgtactagtaatattactcggatcggccagtgctgacatatgcaaaaaaatgttctgtcgttatacattggttccagtattattgtcttcgcaaaactcttgggttttcaagttgctactttttcactgatatacgagt

SEQ ID NO: 22059 - DNA, 720 bp, Zea mays
  Clone ID: LIB3356-028-E2_FLI
ctggcttctcctccccctcttaccaagtcctcctcgggttagggttccttagggttttgtggaggggcgatggcggcggctgatgtggagtaccgttgcttcgtcggcgggcttgcctgggccaccagcaacgagtcgctggagaatgccttcgcctcctacggcgagatcctcgactccaaggtcatcaccgaccgggagacggggaggtcccgcggcttcggcttcgttaccttctcctccgagaactccatgctcgacgctatcgagaacatgaacggcaaggagctcgacggccgtaacatcaccgttaaccaggcccagtcccgtggcggtggcggtggcggcggtggctacggcggcggtcgcggcggcggcggcggttatggtggcgggcgccgtgacggcggttatggcggcggtggcggctacggcggtcggcgcgaaggtggcggcggcggctacggaggcggtggcggctacggcggtcggcgcgagggtggcggtggcggctacggcggcggtggcggcggcggctggagggactgatgtgtgggcccatcctggcttcggccgagttatcttatctatctatagtatcgtgttaccgttcgcttctgtcaccgtgttagtgtccgttctacctttggattaggtgttggtaccctgttgttcgctttggttgctcccgctatgaaacgagacgagagaagaatgagc

SEQ ID NO: 22060 - DNA, 889 bp, Zea mays
  Clone ID: LIB3356-029-A11_FLI
gctgcctggcgcagctgtccaccttctcggtcgagcaagcggccaccatggacacgcgcgtgggcagcctcaccgtgccgccggcgtcgctccccgtcttccctgtcacgttcatcatcatcctcgcgcccgtctacgatcacgtcatcgtcccgttcgcgcgccgcgtcacggggaccgagatgggcatcacacacctccagcgtatcggcaccgggctggtgctgtccatcgtcgcgatggccgtggccgccgtcgtcgaggtcaagcgcaagaacgtggcgtcccacaacgggatgctggactccaccaagccgctgcccatcaccttcttctggatcgcgttccagtacctgttcctgggttccgcggacctgttcacgctggcggggctgctcgagttcttcttcagcgaggcgccgccgcggatgagatccctggcgacgtcgctgtcgtgggcgtcgctggcgctgggatattacctcagctcggtgctggtgtccatcgtcaacagcgcgacagggcgcggcgaccaccggccgtggctgcagggtgccagcctgaaccactaccacctcgagaggttctactgggtcatgtgcgtgctcagcaccatcaactacctcttcttcctgttcttggccgtcaggtacaagtacagaaacgcgggggtcatcaaaggctaatgccatcttcatatggccagtcggcgttgccattaatccccgtggtcttgagcaatgctgggtgtaactaactgtttatataggtggaaagcagagggttgaagaaaatgtaggttaattttctgcaggatgtgaggaatgatggtggtttatgaagctgtaatggatttggttgattggttcaacaagtaaatcaacaagag

SEQ ID NO: 22061 - DNA, 669 bp, Zea mays
  Clone ID: LIB3356-029-H6_FLI
ctgtgtagacaagaaaagcgggcagcttcgttcaaccccgagaaagcttggagccagagcagggggggcgaagagacgatggtcgggatcttctccaggttctccgccggcgcccaccgccgctccaagagcgtggccgaggctgtcgagacgctggcccccaacataagtacaggagaatctgacccagcggcagctgttcctgcggagagcccccatggcatcgaggttggtgttgagttcaagccagtggagcgccccgtggaacctatcaatcttgatgagccagtgaaatgcccgcttcctgagccgtctatactgcacgacgggaggatatggaaggagaaaatgtcttcagtcagcacgagggtgagaacagacttgccggtcgtgaaggaagggtcgcagctggagcctgacggtagcagcgctaggtcacgatctgcagttccaaggcgcgccatactgccctccgtaagcgcgcccgagcacaacatcctagcgctgcttgacgagtgcgacgtctccgggagccgtggctctgctgaatgagctcgagttgggcgtcgccagcacattgtaactaaactgcgtttgccacgagctgatctgagcacagcaaaccttacagtatgtctgaaaagaattggaactacgcaacaaaaaaac

SEQ ID NO: 22062 - DNA, 271 bp, Zea mays
  Clone ID: LIB3356-032-C10_FLI
ggtcgacgggctatcaagaaggcccgtggcctaggtcaatggcccacattgcacttggtgggtgcgttggcttaccatctccccaagtgggagagtggacgtcataatttgtggtagagggggtacgcgttcgcgcggcccctgccaattctaagtaattttgaagttttttcttgatctagatcagggtttctgatccataaattcgaaactttggtacaaatttcatgtaattctgaaatttttttttacatatctgggttccttatct

SEQ ID NO: 22063 - DNA, 797 bp, Zea mays
  Clone ID: LIB3356-032-F11_FLI
tatccccaaaccctagctcccgatctcgatggcgaaccctcgcgtcttcttcgacatgaccgtcggcggcgccccggcgggccggatcgtgatggagctgtacgccaacgaggtgcccaagaccgcggagaacttccgcgcgctgtgcacgggcgagaagggcgtgggcaagtccgggaagccgctccactacaagggctccaccttccaccgcgtcatccccgagttcatgtgccagggcggcgacttcacccgcggcaacggcaccggcggcgagtccatctacggcgagaagttccccgacgagaagttcgtgcgcaagcacaccgcccccggtgtgctctccatggccaacgccgggcccaacaccaacggctcccagttcttcatctgcaccgtcgcgaccccttggctcgacggcaagcacgtcgtcttcggccaggtcgtcgagggcatggacgtcgtcaaggccatcgagaaggtgggcacccgcaacggctccacctccaaggtggtcaaggtcgctgactgcggacagctctcctagatctctctgatctggtctgttcggccgccctccctccgtcatcgtcgactccccctgcgtccgttcctttggatctgaataagatggtggtgatctgagtggtggtcttagtttatcatgtatcgctcgcagtttaatttagcggtttaggtgtggatctgtgaaccccatggcgcctctgcttgattcgtgtttcacctgttatgttctgagattcatgataatgctatgagaactgaaattcccgttt

SEQ ID NO: 22064 - DNA, 764 bp, Zea mays
  Clone ID: LIB3356-033-F7_FLI
cccgcgttctacagccaccgctgtcgtcgccgtcctagactcctagatccgtcagcttaacgagctccattccttcgaggccagccatcccggtgtctcagcagcggcggcggcggcgtcgagctcttgctttctgtgggaggacgcatggcgatgtctgcggggcgtgggctcttggtcctcttcttctctgccgccgtagtggctgagctcgcctctgccgcgaacggtcctttcctgtccgatagcgtcttccagtcgagcgccggatctacagggaggagcttgctgcaggccaagaatagttgccctgtgaactttgagttccaaaactacacaatcatcacaagcaagtgcaaaggaccgaagtttccagccagccaatgctgtgccgcactcaaggaattcgcgtgcccttttaacaattacctcaatgacgagagcaatgaatgtgcatcgacaatgttcagctacatcaacctctatggcaagtatccaccaggtctgttttccagcgagtgcaaagaaggcaagatggggctttcttgcgcagatgtcccccggaaggacagttccactgcaaacagtggttatcgcgcccaaagcagcttgcttgcgttgattactgtcttgagcgtggtagcagcgttgttctactgaactacagctccattcatttcccacaaagatggtgtgttacaactgttgaggcttgagttgcaccttttggtgcttatgggttggcttcctgattctttcttttg

SEQ ID NO: 22065 - DNA, 323 bp, Zea mays
  Clone ID: LIB3356-034-A7_FLI
ccaccaaccaaacagcccctacattcatcagcggtcagcctttggaccaaactctggaagacctagctactctcttttcctgagagttaccagtaagtgtatccagttctgtatgcagtcatcatcgtgttgtttacaccactgggttgtagccagtgatgatatgatcattcgtctgtaccaaatttttattgttgcaactaaggtgtgatctagcgtgtagtgctctgtgtttggtggtttcaagtatagagcgcttctcttgtacttcaaaataaacccgtttacccatgatgatgctatatttagtagatttctcttct

SEQ ID NO: 22066 - DNA, 602 bp, Zea mays
  Clone ID: LIB3356-034-E1_FLI
cgaataacccaatcaaaataggagattacaacaaccggtttagcacaacacatactgattgatccgttgagttctaacttactgttttttctgtttgaattccccgtaaaaaataccaaaaaacgcaataagcagcgagcagagctctgcagctcagcgtcttccgcgctagggcccggcttcgcgctcagaaccatcatcagagtcgtcctcgaattcatcgagatcctcgtcgtcgaagtcgccgtcgaagtcgtcgtcgaagtcgccgtcgaactcgccgtcgctgcccatagcctcgagctcatcctcgtcatcatcctcgtcctcgatcaccgccttccggcccgcaccaccgcctgccgcgtaaccgcgccggaggcgcaaagcagcagcctcggtcgtaggctgcataacaaacctagcattggtagcggtcgccgccaccaccaccggccggagatgggcaagggagacggggcttggagccactgccgccgctgcggcggagaggcggcgcagtgcgagcgcggcggcgcggtgcatagccatcggctttatgaagtgtgaattgagggggcggcggcgcgggcgcgtaaagg

SEQ ID NO: 22067 - DNA, 486 bp, Zea mays
  Clone ID: LIB3356-034-G5_FLI
cgaagccggaggagggaggaaggagatcgcgagcagccggagccggaggccgagaggatgaagacgttcgacccgtggccggtcttcttccgccgggagtggaagcgcaactggccctttctcacggggttcgccatcaccggcttcatcatcaccaagatgacggccaacttcaccgaggaagacctcaagaactccaagttcgtccaggaacacaagaagcgctgaccaaccgggtggagtcgtccgaatcgcctgcggatgaaaaattagccccctatttttcttgtcttttttttatctagatgcgtgcactctattgtaataatgtaataagaggcaattggattgatccaacagcaaccggcttctgattttgatccgcttcgctgacatatgcatgcagcaaacgaatatgtgccttttttttttcttgatgttggattgcatctaatcctgttgaattggtgagctgggtcctctgtg

SEQ ID NO: 22068 - DNA, 350 bp, Zea mays
  Clone ID: LIB3356-036-C11_FLI
cgaggggccaaacaggaaaagtgagcccaaaccctagacccatggaagcgtggccgcctctagcccccgcggcggccgtagccgccaccccggtcgctgcctccgacgatgcggcggtcactcccgctggttccggggcgtggggacccgcggcaacggcgcagcggaaggccgtggagcaggagtcagcggcgcaggcggtgagccgcatcgtggcgagctgcgccaactccagcggcgtggcggtcgccgtggtggacgccaacgccgtcatctccggcgcccccgccctctccacatccgcggggcgccttgtcaccgtgccggaggtgctcgaggaggtccgggac

SEQ ID NO: 22069 - DNA, 725 bp, Zea mays
  Clone ID: LIB3356-036-E7_FLI
ggtttgactatatatcatgtcaaaagccacctgcagaagtaccgcacagcccgctataaaccagacctgtcagaaggtacatcggaaaaaaggacagccactgaagagctggtcctggacctgaaaacgagcatggatcttactgaagcactgcgccttcagatggaagtccagaaacggcttcatgaacagcttgagattcagcgaaaattgcagttgcggattgaagagcaaggaaagtatctgcagatgatgtttgaaaagcagagtcaatcgagcacggagaaagtccaggatccatcctcaagggatacaacagctaaaccgtcatctaatcagagccagtctacaaacaaggattgtggtgcaaccatggacccaaatggaacaggaggcatcgtacggactgcagaactgggagaacgttcgtctgaattaggtgtaaaacagaaactcgtagagatcgaagaatctggtaccgaagtagccacaggcgacagatctaagatctcccaagagaagcggcgcaaactgcaagatagttaacatatcggttgcactattcagacatagctgttcaaaccgtttgcttggtgaaaaattggtaatctgtgtgtcgaattcgactattgatccgtgagtccattggtgagttgtaccgctcttcagttagccatatatatttataaaggatccaaaggaggaccaaaggagaacttcctggc

SEQ ID NO: 22070 - DNA, 851 bp, Zea mays
  Clone ID: LIB3356-036-H1_FLI
cgatccgaagctgtgcctcgtaccatttcgatccaatggcgccgacgtcgaagctgtcgacgggcatcaagcgcgcttcgcggtcgcacacgtaccatcgccgtgggctgtgggccatcaaggccaagaacggcggcgccttccccaaggccgacaaggccgccgccgccgtggaacccaagttctaccctgccgacgacgtcaagccccgcgttcccagcacccgcaagcctaagcctaccaagctcaggtcgagcatcacgcctgggacggtgctgatcctcctcgcagggcgcttcatggggaagagagtggtgtttctcaagcagctcaagtctggcctgctccttatctctgggcctttcaagatcaatggagtaccgatccgccgtgtgaaccagacctatgtcattgctacatcaaccaaagttgacatctctggtgttgatgtcgccaagtttgatgacaagtactttgccagggagaagaagcagaaggtgaagaagaccgagggcgagctttttgagacagaaaaggaggcatccaagtcactgcctgacttcaagaaggatgaccagaaggctgtggattctgctctgatcaaggctatcgaggctgtcctggagctgaaaacctatcttggcgcccggttctctctcagggatggtgacaagccccatgagatggtattctaagtttctagttttggagttcgtaggaagctgttttgtctgtgttcttgtacttctgagttttgtaccagtagcgaacgtttcattgtgattgaagtcttcctgccaaatattataagatctaagaaagttctatccgtgttggtggttcagcagtgc

SEQ ID NO: 22071 - DNA, 629 bp, Zea mays
  Clone ID: LIB3356-037-A12_FLI
gtcacctcccttcagacgacggaaccctagcctgctccccactcccccaccagaccaccacctcgccggaaccccggcgcctcgcccggagcacgtggttatcgccccccgtcggccgcggctgcggtgtagcggagaaagatgatgaacggcggcggcggccagaagaggcggaactcgaaaatcattccctacgagtaccgcgttgagtccgaccccaagttcttcgacaagtcgtggcggaagctccatgatgccatccgtgagatctacaaccacaactccatgagcctctccttcgaggagctctacaggttaacattgcgcgcccgcctccggttccccgacttttcggttgccgccctgttccatgcgcttaggtcgcgctgtatgatcgcggatgattcggatagatagcggccatgaatggactgattgctgtgctgattgctgatatgtaattttccattttttaatttatagtcgatcctcctgtgggcttgtatgcatcttagatgatgacatgcgaatgtttgtgaatagattgatcttgattcatatgtcttattattagtgtagtagggcttatcctgtaaccataatttgtcaacatgatattatgatctttt

SEQ ID NO: 22072 - DNA, 933 bp, Zea mays
  Clone ID: LIB3356-037-D8_FLI
cggcacgggcgatccggtgatcgagcggctctctgacgccgcccacctggctggggtcctcgccgggaagctccctggggaggccaacgcgtgggtggtcgacgccgcgcgctttgctgggccgtttgcggtgtaccgagagctcgttccgaccgtcgacgccgctggagaccccaaggggtatgaccccactggcttccccgccgccgccggtgttgccaacatccttgcacgcagcattggtgagatacagaatcaagtcccggggttgtcggcgaaggattcggctggcaaccagcaccctccatcctaccatccaccggctaggactatcatccttggcttcagcaagggtggagtggtggtgaaccagctcgtgacggaactttctcggtggggggcatcaggatcaacgaaccaggcggcggcggccgacgttccacgaccagcagcagcaggtccaggtccaccaccccatccgacccagaacgaccttcttctcctgggggctcctactcggagcagcgacgacctgctgtcaagtatctccgagctccactacgtggacgccggcctcaaccgcgccggagcgtacgtggccgaccgcgcggtgatcgggaggatacgcgagcacgtcgtacgcgccggcgacaagagcctccgcttcgccctccacggtaccccgaggcagtggtgtgatccgagccgcccgtggatccgggaggagaaggacgcgatggtccaggtactcgcggacgaggcccggaggagcgaggggaggcttgtgctgtctgagaagctgtatttcgagggcagacctcgcagcctgctcatgcattttgaggtcttggaagcgatggatatataatgtaatgtaagctgatactcgataggtctgataagcgatggatatataatttgttgtcccctgct

SEQ ID NO: 22073 - DNA, 371 bp, Zea mays
  Clone ID: LIB3356-037-E2_FLI
cttgccaatcttttcaactgattattatataaaataaacattagtttttttcctgtagtttgatggagatggtaaactggctaaggctctggacgcaagacctcttactaatgttgtcaaggacctcgaagccaagatgaaaggtggacagtcaagttaaaagggctgggtctttcatacagacagacttcacaggatggataatggcattgtttggttcaagatatggtcccacgcgcagcatacatacagagaagaatatgagttttgttttattcttatctcctttacgattttttttaattttttgcttcatttttctccctgtcacaatcaaaccaattatcagtcagtatgcatagtcgtccgct

SEQ ID NO: 22074 - DNA, 1163 bp, Zea mays
  Clone ID: LIB3356-038-C12_FLI
cccacccatcccttgcccgttcgtcctcctccctcccctctacggaacagaacagccctgcccaaccaaagaacctcgagagccttgaggtggtggggtagggtgtgtctggctggcacagagagtagcagtgcagagcaaagcagtcaggcaagcagcagcaatgccgtacacagctccgcggccgtcgccgcagcagcacagccgtgtactgagcggcggcggggcgaaggcggcgtcgcacggggcgtcgtgcgcggcggtgccggcggaggtggcgcggcaccacgagcacgcggcgcgcgcggggcagtgctgctcggcggtggtgcaggcgatcgcggcgcccgtgggggcggtgtggtcggtggtgcggcgcttcgaccgcccgcaggcgtacaagcacttcatccggagctgccgcctcgtgggcggcggcgacgtggccgtggggtcggtgcgcgaggtgcgggtcgtctcgggcctccccgccaccagcagccgcgagcggctcgagatcctggacgacgagcgccgcgtgctcagcttccgcgtcgtcggcggcgagcaccgcctcgccaactaccggtcggtcaccaccgtgcacgaggccggcgccggcgccggcaccggcaccgtcgtggtggagtcgtacgtggtggacgtgccacacggcaacaccgcggacgagacgcgcgtgttcgtcgacaccatcgtgcgctgcaacctccagtcgctggcgcgcaccgccgagcgcctcgcctagagagacgagaccagacgaaagagccctgctggcggctggcgccggcgccttgtttcttgactccgtcgtgttcttttgccctccaaggggaggagatcagatcgatccgtgaactcgattgaggttctaggatagcctgtgtttcgttttctttttcttttctctgtttgcgacacagagtacaaatcattgtatgggtgttgcctgatatcattaacccttattcatcacatcacatacatgtacaacctttaaattagacgtctacctcccttccatcttggcataggtaaaccactacttgaggagaatgatattagatgcaaatttgtgctgtgtgtgttccagcggttttagcaccgtttctgcagagaaatttatggaaacctgaggacag

SEQ ID NO: 22075 - DNA, 765 bp, Zea mays
  Clone ID: LIB3356-038-D6_FLI
cctcagcccaccacaaacgcgcctccgtaccatccgtcgccgccggcgcaccgcgatggctgcctccgccacggccgcgaggcctctcgccgggaccgccgtcccgctcccgctctcgacgcggacgcggcctgccagggtcgccttgctctccctgattcctcctgctccggcccagcgccttgctctcaggcgtggcgcgtggctctcacccccggagcgcagccggtcggtgcggtgcctggcggctatgagcccggagatgcgggcaacgctggacaaggtcgtaggatccagcaaggtggtgctgttcatgaagggcaccaaggacttcccgcagtgcggcttctcccacaccgtcgtgcagatcctgcgctcgctcgacgtgcccttcgagacgctcgacgtgctcgccaacgaggcgctccggcaggggctcaaggagtactccagctggcccaccttcccgcagctctacatcgacggcgagttcttcggtggatgtgacatcaccgttgaggcatacaagagtggagaactgcaggaaactctagagaaagcaatgtgctcatagagaaaagaaattagaaccaggagtgcacgacatacagttaatcaaaatgttatagtatttgctgtacaattcaggcaatgttaagctggagataccaaagttgtaggcaatccatgtccaaatgctcagtgcacttggtttggaacacatttgttttctgcaatttgtgattaatcatccagctttaaccc

SEQ ID NO: 22076 - DNA, 755 bp, Zea mays
  Clone ID: LIB3356-038-G6_FLI
gtccgtggaaggtcgtgtcgccatggcctccgagacggagacgttcgccttccaggcggagatcaaccagctgctatcgctcatcatcaacaccttctactccaacaaggagatcttccttagggagctcatttcaaactcctccgatgccttggataagatcaggttcgagagtttgacggacaagagcaagctggatgcccagccggagctgttcatccacatcgtccctgacaaggccaacaataccctgacaatcattgacagtggcattggtatgaccaagtcggaccttgtgaacaaccttggtaccattgcacgatctggcacaaaagagttcatggaggcactggctgctggtgccgatgtgtccatgattggtcagtttggtgtcggtttctactcggcataccttgttgctgagagggttgtcgtgaccaccaagcacaacgatgatgagcagtatgtatgggagtctcaggccggtggctccttcactgtcacacgtgatacctctggggagcaacttggcaggggtacaaagatgaccctttacctcaaggatgatcagttggagtatcttgaggagcgccgcctgaaggatctgatcaagaagcactcagagttcattagctacccaatctctctctggattgagaagaccactgagaaggaaatttctgatgatgaggatgaggaagataagaaggacgaggagggcaaggttgaggatgttgatgagaaggaagaaaagg

SEQ ID NO: 22077 - DNA, 1011 bp, Zea mays
  Clone ID: LIB3356-039-A12_FLI
ggaggatgtacgtactaaccgaaggacgtattatacaacgtacgtacgtacgtacgaacatgcaggcctacgttcatccgcatctggaagaaggggtcggtggagcagtactcgccgatcccgtacgtggcgacgctgctgaactgcatgatgtgggtgttgtacgggctgccgctggtgcacccgcacagcatgctggtgatcaccatcaacggcaccggcatgctcatccagctgacctacgtggcgctcttcctcgtctactccgcgggggcggcgcgccgcaaggtgtccctcctgctggccgccgaggtcgccttcgtcggcgccgtcgccgcgctggtgctcgccctggcgcacacccacgagcgcaggtccatggtggtcggcatcctctgcgtcctcttcggcaccggcatgtacgccgcgccgctctccgtcatgaaaatggtgatccagacgaagagcgtggagtacatgccgctgttcctgtcactggcttccctggtgaacggcatctgctggaccgcctacgcgctcatccgcttcgacctctacatcaccatccccaacgggctgggcgtgctgttcgcgctggcgcagctggtcctgtacgccatctactacaagaacacccagaagatcgtggaggcacgcaagcgcaaggcgggccaggtcgccatgacggaggtggtcgtcgacggcagcagggcctccaacaacaacaacggtggcagcggcacctactgatgatgatgagtacgacgacgtaatatggtggtgaccacgccaacacaacaccaagcaacacgggggggcaacgccaacgccgtgcgtatctagcactagcaagcgtccttcttcctgacgaagggatgatctatgcatcttaagcagccgtcgtcgtcttcttcttcttctgttaatcactagcttttactttctccatgcttcctagtaacgaagctttgcccactgattagtacttatatgttgaatcataatattacg

SEQ ID NO: 22078 - DNA, 1001 bp, Zea mays
  Clone ID: LIB3356-039-B3_FLI
tcgcatctctgagtctgaaaccctagccgcctgtctccctgtccggtctccactcgtccgggcgacgagacgacgacggagggtttctgcgggggatttgtttgtcgctgactcgccggcgaccaagatgaggccggttttcgtggggaacctagactatgatacccgccactcggagctcgaccacctcttctaccgctatggcagggtcgagcgcatcgacatgaagtcaggctttgcttttgtctactttgaggatgaacgtgatggcagtgatgccatacgtgctcttgatggttatccatttggccctggcagacgcaggctttcagtagagtggtcacggggtgatcgagctgctagacgtgatggcaacaaaccagaagtaaatactaagccaactaaaacattgtttgtcattaactttgatccaatggacacaagagtcagtgatatcgaaagacactttgcaccatttgggaacatatcaagtgttaggataaggaagaactttgcttttgtccggtttgaaacactagaagaagcccgtaaggctcttgaagctactcatgctaccatgcttttggatagggtgatttctgttgagtatgcctttagggatgatgatgaacggagtgataggtacgacagcccaagaagaggtggtggatatggtaggcggggggatagcccagcgtacagatcacgtcctagtccagactatggtcgcccagcaagtcctgtatatggttcgtatggcaggagcagaagtcctgttcgtgaccgctatcggagatctcctgcttaccgatcaagatccccacctgccaaccgaagagcatatgactaatcaagaactatattatgatgctataaatgctagcggcaactcgtgtcgggctttttcagggctgcagccagcgggaagaacttactgtgcctgtaccggagtgtcaccttaattgctttaaactcctgtctttaaaatggcatgttatgtt

SEQ ID NO: 22079 - DNA, 737 bp, Zea mays
  Clone ID: LIB3356-039-C3_FLI
ggcttctcctccccctcttaccaagtcctcctcgggttagggttccttagggttttgtggaggggcgatggcggcggctgatgtggagtaccgttgcttcgtcggcgggcttgcctgggccaccagcaacgagtcgctggagaatgccttcgcctcctacggcgagatcctcgactccaaggtcatcaccgaccgggagacggggaggtcccgcggcttcggcttcgttaccttctcctccgagaactccatgctcgacgctatcgagaacatgaacggcaaggagctcgacggccgtaacatcaccgttaaccaggcccagtcccgtggcggtggcggtggcggcggtggctacggcggcggtcgcggcggcggcggcggttatggtggcgggcgccgtgacggcggttatggcggcggtggcggctacggcggtcggcgcgaaggtggcggcggcggctacggaggcggtggcggctacggcggtcggcgcgagggtggcggtggcggctacggcggcggtggcggcggcggctggagggactgatgtgtgggcccatcctggcttcggccgagttatcttatctatctatagtatcgtgttaccgttcgcttctgtcaccgtgttagtgtccgttctacctttggattaggtgttggtaccctgttgttcgctttggttgctcccgctatgaaacgagacgagagaagaatgagcaaggtttttgttcgcagct

SEQ ID NO: 22080 - DNA, 753 bp, Zea mays
  Clone ID: LIB3356-040-A5_FLI
cgcacctcgcgtgcacacagacacaggcaggcacacagcgcaatcaccgtctcgcctcgcagtcgtactcacggtcttgcacacacccgtccccatcctcttccggtgtcgccatcccctccgtcgaccgccgcgtccggccgcggcaacccgacctgtgtcaatcgccatgttccttggcactgcgctgaccaaacacagtgtttcttatcatttctttggacatgttcttgtcgcatcatgtggaatggttttttaatgattctgaacagactacctcaaggcgtcttgctgataggaagatatcacgatttgagaagaatatcacaaagaggggctctgttcctgagacagccaagaaggcaaacgattatcctgttgggcctattcttcttgggttctttgtcttcgtggttgttggatcatctctctttcagatcatcaagacagcatcaaacgctggtctattctgaggtgaatcggttgacacatgcagtttgtcactagaaactatacaagtgtagggcgtggcttaatgtcgcctttttaatgttgtaccgtggagagttttaagttatatatgtaatggaagtgctaatttaagtcacctgtctgacaggaaagatgttggagtagtccataatacatatcgagtatagttatagttcgtgttaaatatttctatgctcaaattggtcgcatcattgggctattgtactcttcgatttatcgagtaatttggtaatctttcgc

SEQ ID NO: 22081 - DNA, 990 bp, Zea mays
  Clone ID: LIB3356-040-B12_FLI
aaaaaaaaaaaatcggggtcctccgcctcccgcaatgcctcccccttccgcctccgcctcccgcttggcgacccactggatagctgacgccctcgccgacgacgagtccctcgacttctccgtgctgaaggctctgtttggggactcgtcgaagtccctcgcgggagccccggaggccacgcgtgagcgggtcgcgctccggtgcattcaggaggtgtcgtccgtgatagcctctgggggtgatgccgcggccccggcgggggtgcctagggttgatggcgcttggtcatgcgaggatgtgttgtttcggcttatcagagacgttggaagctccggagaattggagaaggatttgcttccacctttaagtcaagacatccaggaatatatatgtaccaagaaatttacactaccagaaacttctttccagttgcttggaagttttggagaattggaggatttgcttccacctttcagtcaagacatccaggaaaatatatgtacaaagaaatttacactaccagaaacttctttccagttggcacccccgaatcccctgcgtccagcacctcatccaaccatcccgttctgtaggttcaaagaagtaaaaaacggacgtcattcgtcagttgtggaaatgaagcactacgacttgtgcacaatgaatttgaatgaagtgttgtcgagagtagaagagatgtcacaagaagaagcatctgtttgcggtcttatggatatggatgagcctagtcctcccagttgtgatgattcagttgaggttgaggacgacagttgctatgaaggtttaactgatgcagagtgggcagctgagaattatgcagattgggaggaactttataaccgtagtatgtgatctaggaaaactataaagtgtcatgagaagtactattgctgtagtacctgatccaagttgtgaggacttctattatgttgtagtatgtgcttgtgcttctagttgtggtgacttct

SEQ ID NO: 22082 - DNA, 821 bp, Zea mays
  Clone ID: LIB3356-040-B2_FLI
ccgaattccctgcgattcctctcccctcgcctcctcgtctccccctaggggatcgtcggagaggaatcgcaaagagggccgtctcatccgagttaaggaagccatggagcacaaggaggctgggtgccaggcccccgagggacccatcctctgcatcaataactgtggcttcttcggcagcgcggcgaccatgaacatgtgctccaagtgccacaaggagatgataacgaagcaggatcaggccaagctggctgcctcctctatcgacagcatcgtgaacggcagcgacgccgtcatggagccggttgttgctggcagcaacacggtagtagctgttgcccaagttgagttgcaaacaatgaacgtgcagcagcccgctgatgttgccggacccagcgagggggtggcggcgatctccaaaggggggaaggtagggccgaaccggtgcagcgcctgcaggaagagggttggacttacgggattcaactgccggtgtgggaacttgtactgcgcactccaccgctactccgacaagcacgactgcaagttcgactaccggactgctgccagggacgccattgccaaggctaatccggtggtgaaggcagacaagctcgacaagatctagggggggttccctacggttgggtatcaggaagattgtaaaccgcggtaactcgtcatgcggaactgctgccttgccccccgcgcctttctcttccatgtttgctgctacaatcttgttgttgggcattgcagtgcacggtgcacacttgtgtagcccgcctcgagaattcctgcctctgcatctggtcagttct

SEQ ID NO: 22083 - DNA, 728 bp, Zea mays
  Clone ID: LIB3356-043-C8_FLI
tgaacatgtcaggtctgaaatacataaaaatttgaagtgtagccgctgtgacaaggatggagatccagctttggatggtactggttttgcagccactggtcataaggcttcaatacctggagtgcaagattatgctgatattggtgggtttggtgagatatctggatgtttgcagaaaatgaatagcacacatcagcagattggaagacctactgaagaagacttaggaagttggggacatcactgtgacccatcaactgtacctgatactatactgcagtgttctgctggcgaagaggtttcttttgttttcaccaatcaggttgatggaaaacttgttccagttgaatctatggtgcgatcagcagctcatcaacaaaacggaatagcagccaccggagaaaaaggagtgcagatacccaattctcctagcaaacctggaaagcaatccttaaatggcaagaatttgaagatgggatttcatttaaagaattcgtctttgaaatgttcaaccaaatccagaccatcaccaaattgcttgcaagggttgatgaaaaccagcccctttttggatcaacctcaaattaaaaagcttcatgttgcttctgatatatctgacgatgattttgtttgagtgtcaattcagaattacttagtctcatatatgttgatgtgctatctgttgcatatataatgccatcagctttgtcggtgcctattgcatcttt

SEQ ID NO: 22084 - DNA, 1503 bp, Zea mays
  Clone ID: LIB3356-043-E6_FLI
gccacatcctcccctccttcctccttgggttcccagcccgtgcgccccgcctgtcgcagtcgcagtcgcgccgcagccgccggccatggcctgcctcaccgacctcgtcaacctcaacctctcggacaccacagagaagatcatcgccgagtacatatggatcggtggatctggcatggatctcaggagcaaagccaggaccctcccgggcccggtaaccgatcccagcaagctgcccaagtggaactacgacggctccagcaccggccaggcccccggcgaggacagcgaggtcatcctgtacccgcaggccatcttcaaggacccattcaggaggggcaacaacatccttgtcatgtgcgattgctacaccccagctggcgagccaattcccaccaacaagaggtacagcgccgccaagatcttcagcagccctgaggtcgctgccgaggagccctggtatggtatcgagcaggagtacaccctccttcagaaggacaccaactggcccctcgggtggcctattggcggcttccctggccctcagggtccttactactgtggaatcggcgcggagaaatcgttcgggcgtgacatagtcgacgcccactacaaggcatgcctgtacgcaggcatcaacatcagtggcatcaacggggaggtcatgccggggcagtgggagttccaggtcggaccgtccgtcggcatctcttcgggcgatcaggtgtgggttgctcgctacattcttgagaggatcaccgagatcgccggcgtggtggtgacgttcgacccgaagccgatcccgggcgactggaacggcgcgggcgcccacaccaactacagcaccgagtccatgaggaaggagggcgggtacgaggtgatcaaggcggccatcgagaagctgaagctgcggcacaaggagcacatcgcggcctacggcgagggcaacgagcgccggctcaccggcaggcacgagaccgccgacatcaacaccttcagctggggagtcgccaaccgtggcgcgtcggtgcgcgtgggtcgcgagacggagcagaacggcaagggctacttcgaggaccgccggccggcgtccaacatggatccctacgtggtcacctccatgatcgccgagaccaccatcgtctggaagccctgaggcatcccgtggccgtgtcgtgtcggtttgctccgcgtacggcgctggccgttgcatcgcagggcccagcggttgcgcaactattttcccttccccgttctgtttgcttgtactactactctaccgctagtcctgcatagcattttagctagaacacaacaacagcccaaaaaaaaacattgttgcttgcttcggcttcgacgcttcccaccacttccattccatgccgtccgtccgcttccttcctgtgtaatcctcctccaataatagacgtgtcatgctgcatcctctgcattgtataaaagtggcgtaattcttttgctacgcctccaatgtctgttgctttt

SEQ ID NO: 22085 - DNA, 1277 bp, Zea mays
  Clone ID: LIB3356-043-G6_FLI
tgaaactgtcgtcttctcgcgcggagcgtctagctattgtgccaatcttcaaatacaatcgccacggctcatccatttgccgccacaaatctgataaccaccacgccatcatcgcgctaccagggtcgacatggatcccgacgcagaggtcacgttcgagttcgtccccgtgatccggcagtacaagagcggccgtgtggagcgcctgctccccgtcaatccggtcccaccctccgtcgacgccgccaccggggtcgcctctaaggacgtcaccgttgacaaggccacgggcctgtgggcgcgcctctacctcccagacccagatctatccgcgcgccccgacggcgacatgcgtctccctatcgtcctctacttccacggcgggggcctcgtggtcggatccgcggccgacgcccccgagcacgccttcgtgaaccgcctcgcagcgcgggccggcgcgctcgccgtgtccgtggagtaccgcctggcgccggagcaccccgtccccgcctgctacgacgacgcctgggccgcgctccggtgggtggtggcgccggcggccgacccgtgggtccgcgaccacggcgacgtggcgcgcgtgttcgtgctcgggttcagcgccggcgggaacctcgcgcacaacctcaccctccgcgccggctcggagccggacctcctcccccgcggcgcccgggtgcaggggatggcgctgctgcacccgttcttcctgtcgccgccggcgccgggaagcgaggccgcggagggcgaggtagcgaagtacgcgtgggtgcgcgccaagctggcggagatgtgggcgttcgcgtgcggcgggtggacggcggggcccgacgacccgcgcgtgaacccactcgtggacggcgcggccagccttaggcgccttgggtgcgcccgggtcctcgtgtgcctcgcggatgacgcgctggctgctgagggcaaggcctactacgatggcctgctggcgagcgggtgggcggcggcggacgccaagctgctggactccgcgcccgcggaccacgagttccacctccgcgagcccgagagcgccaaggcggtgctcctcatggaccggctggctgcgctcatctccgggaactagcagtagcagtagagtcacacgcacgtcaacggagctgacgcaagagcgtacgtgcacttgctgccattgatgtactggaattggtcaaacaattccaagttctaatcggaacgatataaaatgctgacctataataaagaacttattctcagttcaggcc

SEQ ID NO: 22086 - DNA, 475 bp, Zea mays
  Clone ID: LIB3356-044-C3_FLI
atcgtcgccgccatcatgtctttctcttactccagcatcgccgtcggcctctcgttggcgcggaccatttcaggccgtagtggtacgaccactctgaccggcactgagatcggagtcgacgttgattcagcccagaaggtctggctcgcgcttcaagctcttggcaacatcgcgttcgcttactcctactccatgattctcatcgaaatccaagacacggtgaagtctcctccagccgagaacaagacgatgaagaaggcgacgctgatgggcgtgacgaccaccacggcgttctacatgcttgctggctgcctcgggtactcggcgttcgggaacgcggcgccagggaacatcctgaccgggttcggcttctacgagccctactggctgatcgacttcgccaacgtctgcatcgtggtgcacctggtgggcgcgtaccaggtcttctcccagcccatcttcgcggccttggaga

SEQ ID NO: 22087 - DNA, 395 bp, Zea mays
  Clone ID: LIB3356-044-H6_FLI
tttcacgcatcgcacggggaacagaacaccgatcgatcgatccctcgagaagcagagacaagtagcccgcccgtccgcccgcacacatagagacagagagaatcaagccgccgccgaccagtgacatggcgccctgggccattgccatccacggcggcgcgggcgtggacccgaacctcccggagcaccggcaggaggaggcgaagcgcgtgctggcgcggtgcctgcaggtgggcgtggacctgctgcgcgcgggcgcgcaggcgctggacgtcgtggaggccgtggtgcgcgagctggagacggaccccttcttcaactcggggcgcgggtccgcgctcacccgcgccggcaccgtggagatggaggccagcatcatggacggccgcggccgc

SEQ ID NO: 22088 - DNA, 1186 bp, Zea mays
  Clone ID: LIB3356-045-C9_FLI
cgcgttcgcccccggctgggatcaccgcgcgtgccgccggcgccatggccgtcgcagtcgccgtcgccagccaaaatccactagcagcgcttaacctcctgccgatctaggagacgggggatttcttctcgcccttttcctcgccctgcggctgcggaataccggggccggcctggatttgctcgagagtgagaggaaggcgtaacagtgtgaaggaggcgcgggggacaatatggctgcggaaatggtgaaagcggcgacgagcgacaagctcaaggagatggattgggcaaagaacatcgaaatctgcgagctcgtggcgcaggatcctgggaaagcgaaggatgtgatcaagtctgtaaagaagtgtatagggagcaggagcaagaccactcaactctttgctgttatgctattggagatgcttctgaataattgcggagagcctgtccataggcaggtcattgataatggccttcttccaatacttgtgaagatagtgaagaaaaagacggatttaccagttcgagaaaaaatatttcttctgttagatgcaacacaaacatcgcttggtggagctaaagcaaggttccctcagtactatgaggcatactatgagttggtgtctgctggtgtgcaattttcaaatcggccaaatgttcttgtcacacgagcagaagtgccagtcccagaaacgagaacagaaccaaataatgaaagtttatcgacccgattgactgaagctcaacaggaagtgcatactcagcctgttcctgatgcaagtatagtccagaaagcctctagtgtcatggaagtattgagggatgtgcttaattctatggatcctaggcaccctgagggagcaacggatgaatttgtgttggatcttgtcgagcaatgtacgtttcagaagcaacgaataatgcaccttgttatgacatcaagggatgaaacgctggtatcacaagctatagagctaaatgaagagctacataaggttctcgtccggcatgacgcgttgctttcagttcatccgacaacagcagtagcttctaatataaaggaagaagaggaggaagaggatgctgaaagtctctatcggagactgcggaaggggaaggcactgtcgcaggactacacagatgacctggtgccgtcgttccgatccatgcccgaggacaagctg

SEQ ID NO: 22089 - DNA, 1205 bp, Zea mays
  Clone ID: LIB3356-045-D8_FLI
ggaggaggaggattgtcgaacgatcggcggcgacaaagatggctgtgtagatcgtgccgccaaagatggctgtgtagatcactgatctgatcagcactagggaaaggcggcgatgccttctgtattcagcgacgcggtgagtatatctagaagtccatcggtcataagccgaccttcgagacgaacgacggaacgagccgcaaggagaaaagtcttccgattcctgctaggtgggcctgcgcgttgccggtgtgtgaggggctccacggatctcgaggccacatctgtaaaacgaccacccctcacgcggaagcggagactggaaatcgggagggagaccggagacgagaccgccggagatggagccgagatctgcaatctacagatccggcgccctccttctcctcgccgccatccttgcggaggtcgtcatccccgcatccgccatcggagacaagtgcgccgcctgcaaggccgttgctgcggagctagagattggaatttcgagtgagaagccgagaaatcacttggacttgcgcaaccgcttaaattctaaaggccagagggaggggaaggtcattgattatagggtcagtgagcttcgggttgtggaacttctggatggcctatgcgataagatgcaagattataccttaaagaagttggaatcaggcgaaaagggatgggttaaagtaacagactggaatagctttcaaactgaaaataaggcagcagcaagagctcactccaaaaaattgtccaccttctgtggaaggctactggaggaaacggaggatgagctctctgagtggatcaaaacaacctccacagaatcagaatatgtaagcaaggccctttgtgaagatattagcaaacactgccgatctacaagtgctaccatccagattgatgatgagctatgacatgccgggggcaggtcgttgtttcgcaaaaagcaaaacaggcgtcaggttggaaaatgttaaagaacacaactctagtagtccctgacaccatttagagagacatgcagctgccaattctgattgtttgtgttgcactcgtatttcctgtaaacaaaagcttagactgatctgtagagaaagcaactggacatcaatttttgcataccgatgaactacagtttaaaacggccggttgaattatcctgtcaggggctataggaaatttgaatgcttctattc

SEQ ID NO: 22090 - DNA, 1021 bp, Zea mays
  Clone ID: LIB3356-045-H8_FLI
cactgatatgattggctcaatgaaaccagaggagcttcagaaaatgttcgaagttgcttcttcattgaatagcactagctccgctggtccaaatctgggacccaatatgccagaaatgtctcctgatatgcttaagatggcatctgacatgattgctagtatgcctcctgatgacgtacagaaaatgatgagttttgcttctcagatgggtgggcctggtggtgcccccaggagttcagagaatattaactttggaccttcagtgagagctacaacgagtaattctgcccgtggatcatcatctcaacctgttttggagaaccctgatgaactatcagatgaccaaaggatgagccagtcatcctctagtcttccaccttctacagctgatatgcaagaaaccatgaggaattctatgaaagaccctgcaatgcggcagatgcttacatccatgatgaagaacatgagccccgagatgatggcaaatatgagcgagcagtttggaatgaaactgtcaaaggaggatgccgcaaaagctcaacaagccatgtcgtcattatctccagaggatttggatagaatgatgagatggatggagcgagcacagaaaggggtagaagtcgcgaagaagacaaagaactggctcttgggccggcaaggcttgatccttgctattgtcatgctgatcctagctttcatccttcatcagtttgggtttatcggcagatgatgggggtgacttgggtggctgcatcagcatggaaatagattattcgatggcgatgcagagttccctcttgctaacaactgcttaaaagcgctttgggggaaggccggattacgagaattctttgtatccgtatcttatgaaagtgtaactctgtccataaagctatttcatcctatttttaccagcaaaggtagtagaaaggaatcgagccgaaactgttgtgataacaagacgacatgtaatatgataatatccttgtggtgctttcagttttaagtagcagttttgttt

SEQ ID NO: 22091 - DNA, 509 bp, Zea mays
  Clone ID: LIB3356-046-C7_FLI
cgaggccaccatgagcactctcaagttctgccgggaatgcaacaacatgctgtacccgcgggaggacaaggagacgcgcaccctcctgtacgcgtgccaaacgtgcgagcatgaggagattgccactgatacttgtgtgtacaaaagggttatccgtaagcctggtggtgagcccaaagatgtcctgaaggatgcagcaactgatcctagcctgcctcgcaccagaagcgtcagatgttacaactgcaaccatccagaagctgccttttttcaggccccgactaagggagaacaagccatgacgctgtacttcatctgctgcaacccaagctgcgggcacaggtggagggactgagaaggatctggcttggtcttcgctgcaaacctgtcgtattgttagcctaggtacaagttgtgccgtcaactgacgtttgctgcaagcttataagctactataacctcgtaacaaaacgatggtttggctggagacgaaatctgttgttcctcat

SEQ ID NO: 22092 - DNA, 640 bp, Zea mays
  Clone ID: LIB3356-046-D4_FLI
cccaccttgcgtacgtgagccaaacgctcctggtcctggcagtctccatctccacctagggttccggcgatggtgcacggcggctacccgcgccgcgacgccgccgtccgccggcccaagtcctcgtcctccgccgtagttgccgaccgcaagcggaagtggaccgccgccgccaagaacacctcacttaaaaaccagatccgttccactgagcgctttctccacaaggtacttaccgacacctgggggctggggtcttctcgactgagctcggaacctctagtttagcgttgttcctacccagtggatgggctttggctgttgcttgtggagcgctgggtgtttctctaggaacctctccattttctagttgattgggaagcttccccgaacgtagctaggaattttagcacgaaagtctttctacaatgatgaattgttcaaccacaaatatttatttacttgttgcttctgtagggggctaggggcaaattgatgcttcaactgaggcctctgtttgttgcattccgctcagtagcctaattcatggtgtagctggattactgcagcttgcataggtgattaggtgctattaagtatcaagtattgattgaaaaactatcagactgaaatgttaact

SEQ ID NO: 22093 - DNA, 337 bp, Zea mays
  Clone ID: LIB3356-046-E11_FLI
gcgagaagggggaaaaacaatccaaacactctcgccagcacacaaatctcgcgcacgggttcgggggcgccagctcgatccgcggccgaaaccctaggtggtgacgacggtggtgctccgtggtggtgctggaggacgaggaggagggctgggagcgatgacgtcgccgaggaaggacgcggggttcctgacgcaggaccagcgggagaagctgcggatcgcggtgcagaacgcggagacgcagtcgctcgcctccccgcgctcgcccacggggggcaccacctccgcgctgctgcagcagtacgagctgcagatgctggagcagaagcgcgccgcc

SEQ ID NO: 22094 - DNA, 733 bp, Zea mays
  Clone ID: LIB3356-047-G10_FLI
gggagaggcgctgccagatggagaggcgctgccagagggagaggcgctgctccggccatggctgcgtagagggagctgcgcagagggagctgaacagagggagccgcagagggaggcgcagagggagctgcagagggagctgcgcagaaataggcggccatggctgctccggccagatctggccgtcgggacggcgcgcgaaccagcagagagatggccggccgttcgacggccagcagacggacgagcgcgagccaacagagggaaggtggcggccgggcgcgcgagctagcaggaagatgacggctgggcgcgcgagccagcagaggaggaaggtgacggccgggcgcgcgcgagctagcaggaaggtgatggacgggcgcgcgcgcgagccagcagaggagagggcggccagcagagggaggtggcggcggcggccagcagaggtaggggtgccggtggcggccagtagagagagagaggtgtacctgagtcgttcccagcagagagcggtgaggagagcgggctgggaacggagccgctccgtcccctcaattttttggagtgggatggttccagatctggagagaatattctctaattggagcgactccgttctagtttcttgctaaccaaacagcaccaaaactaggacggaacgattccgttctacttggctcctcaaccaaacactaccttaatataaagatgcgcagctctcctgtgtttttcg

SEQ ID NO: 22095 - DNA, 627 bp, Zea mays
  Clone ID: LIB3356-047-G5_FLI
ggttcgtccagccttccggccttcccccccggtggtcatcacatctcccccaattcgccgccccctccgacctcgccgtactcctctcgctccgttgaagtagcctcttcatctgctcgccgcagttcgtccgttgcccatggcggatgaggaggtaactgatccaaaggcgttcctagaggaacgttcaaaggctaagtgtgtgtcgcagtggtatgaatatcagaaatgtgttaagaggattgagaatgacgagactgggcacaaacactgtaccggccagtactttgattactggaaatgtgttgacaagaatgttgcagaaaaactctttgagatgttaaaatgacaagaaaagttttccctacttcagttatccacccaaagttggtaataattgtatcacttgtgtggcctatagactattaaggcgctcaatatttgttagagaagttttgccacttgggtaacacaaattttccactgccagtttgcatttcatttctgctactagtattgaaccagcaggtttcctcctgcattgttggataaaaaatccatcgaatatttacaagattgtggctgattattaaatgctgtaatacaccttaattgcttttacggtgt

SEQ ID NO: 22096 - DNA, 517 bp, Zea mays
  Clone ID: LIB3356-048-C5_FLI
cccaacgctactaccgccgctagctggttcaagtgcggcgagcggagccggagaccggtagaggaaattaagaggcgtcgatcgggcatggggtgcgacgacaagtgcgggtgcgccgtgccgtgccccggcggcaaagactgcaggtgcacgtcggggagcggcgggcagcgggagcacacgacttgcggctgcggggagcactgcgagtgcagcccgtgcacgtgtggccgggccacgatgccgtccggccgcgagaacaggagggctaactgctcctgcggggcgtcctgcaactgcgcatcctgcgcctcggcctgatccatgcgcctcgccctcgtgctaccgcgctgcctagtggagggagttgtctagtgaggctctggagacgaagcaactagcactacttctaataaaggggcttgtgtcatgctcgccagacgcatcacgcgctgcatctgcatcgtggtatcgtgtagtaagtttgtgtatgaataaacactaccactttatgtct

SEQ ID NO: 22097 - DNA, 416 bp, Zea mays
  Clone ID: LIB3356-048-D4_FLI
ctggcaccaatgcggatgctgccagtaagatcgagaggtttctgatccaaccgagagtagaggatgcagtgcttggccgtcggaaggctgaaaaggcaatggcttggcgggcagtttttacatcggctgggtttgctccagtgccactcagcaaccttgcagaggcacaagctgactgcctcttgaagcgggtgcaggtccgaggattccatgtggagaagtgtggaatgggtctagcactgtactggcagcggggcgagctcgtgtctgtctcggcgtggcggtgctgatcatagcaacctcatccgtcaaccatcgtcgtcgtcgcgcctacactattcgcaggcatgtttaactccggtaatatgcgttttatcttgcaaacattgcaaagaaactattgtcatggttgttcc

SEQ ID NO: 22098 - DNA, 373 bp, Zea mays
  Clone ID: LIB3356-048-F4_FLI
ccgaaagccggcgagaagatctttaagaccaagtgcgcgcagtgccacacggtcgacaagggcgccggccacaagcaaggtccaaacttgaacggtctttttgggagacagtcgggtaccactgcaggctactcctactctgcgggaaacaaaaacaaggctgtagtctgggaagaagacactttgtatgagtacctgcttaaccctaaaaagtacattcctggaaccaagatggtcttccctgggctgaagaagccgcaggagcgtgctgatctcatcgcgtacctgaaggaagcaactgcatagttcattgacatgccttttgccatgaagagaaaaattgttttgcagtttaataaaaaacattttagac

SEQ ID NO: 22099 - DNA, 512 bp, Zea mays
  Clone ID: LIB3356-050-D10_FLI
cttattctcaaagaagacgatatcattggtattcttgagacagatgatgtgaaggacatgaagcctctcaatgaccgtgttctcatcaaggttgcagaagccgaagacaaaactcctgggggccttatcctcactgaaacaactaaagagaagccgtccatcggaacggttgtagctgttggcccgggtcctctggacgaggaaggcaagagacagccactgtcagtgtcggcgggcagcacagtgctgtactccaagtatgcagggagtgagttcaagggcgcggatggcacggcctacattgtgttgagagcgtcggatgtgatggctgtcctgtcttgagcatttcgtttccggctcgttaatgtagtttgcagccaatagttgtcatgtggtatgaaacgatcgctttgtggtggtcatcaaaccatgttggtgatcatcacaacatatgctgatactgttccggacagctagaatttgttgtgtggcaggtataaacgtcagcatct

SEQ ID NO: 22100 - DNA, 761 bp, Zea mays
  Clone ID: LIB3356-050-D6_FLI
gtttccctttcttctacgcagatcccggccggagtccagcgcgccacccggcaccaaggcttgccgtgagaagctccggcgagacaggctcaacgaaaggttcaacgagctctgtgccatcttggaacccggcaagccacccaaggccgacaaagtcgctatcctaagcgacgctgcccgtctcctgaaccagctgcagggcgaggcccagaagcttaagcaatcgaacgaatcgctccaggagtccatcaagagtcttaaggctgagaagtccgagctgcgagacgagaagacgaggctcaaggctgagaaggagaggttggagcagatgctcaagggcgtcgtcagccacgccgcggtggctgctccggggcccttcgtcccgcaccctgctgcggtcgctccatctttccaccaccacccggcggcgtttgctcaggctggaaagttcgtcccgtaccccagctacccgccgccggctgcgttctggcagtggataccgccgacgtccctcgacacgaccaaggaccccgcacactggccgccggtcgcctagccgacctaccacctcaccgtggcatcattcatcggtgatgcgttgccgtgtgtactgaatttgatcgaagcatgcctgaaaaaagaaaccttggctgctgctcgtgtcaaggacgtgatgtgctgaagttcaggcgatctaggtcggctggagaagtctatgtaacagccataatgctaaagcaatgaaagtgatatattaattg

SEQ ID NO: 22101 - DNA, 738 bp, Zea mays
  Clone ID: LIB3356-051-A12_FLI
cgctccggttacaaaacacccaaccccatcccaatctccgaacgcctcgcatcaaaccaactctttcccaaatccaccgccggctcggctcgcccatcttcgcgccaagcaccgaatctccgatggcccgcacgaagcagacggcgcgcaagtcgacgggcggcaaggcgccccgcaagcagctggccaccaaggcggcgcgcaagtcggcgccggcaaccggtggcgtgaagaagcctcaccgcttccgccccggcaccgtcgcgctccgggagattcgcaagtaccagaagagcacggagctgctcatccgcaagctgcccttccagcgcctcgtccgtgagatcgcgcaggatttcaagaccgacctccgcttccagtcctccgctgtcgccgcgctgcaggaggccgccgaggcctacctcgtggggctcttcgaggacaccaacctctgcgccatccacgccaagcgcgtcaccatcatgcccaaggacatccagctcgcgcgccgcatcaggggcgagagggcttgatctcccgttgtcgtcgtccacgttgttgggcctttcctctgtgtctctgcttgtagaatccttgcttctgttcggttccttctgttcgcatgatggtgttcgtagtgttaggagttgcattttctaatctgcttgttcttgcaccggtgcctctgaagtggcgtttccctctatcttaatggaaatggaatgtgctttaaaaaag

SEQ ID NO: 22102 - DNA, 613 bp, Zea mays
  Clone ID: LIB3356-051-D9_FLI
cgacgcactagaccgacccgcgaatcccccgcgcgcgcgccgtgcggtcaccgtccgaggccacggcaccgccggcccccgcccccgccccggccgccaagagcaaaggcaaggccgacgcttcctcctcgtcgtcctcctcctccactccaccgaggtcgcgccgcgcgcttgccgtcgtgatggccgcgtcgctgctcgtgctcgccgtggcgttcttggttggctctggctccggggggatcgatgggggcgcagcggctcccgtcgaggtggagggcaccgaggtggcctacggtagtgtgatcaagctgatgcacgagaagacgaagcaccgtctgcactcgcacgatgtgccctacggctcaggcagcggtcagcagtctgtcaccgggtttcctgaaggcgatgactcaaatagctactggatcataaggcccactccagattcatcatcaggttgcaacacatgaggacacggaggtggttgcacagtcacctgcacgcttcaccgttgtctggtaaccttgaggttagctgtttcggcggggatgaattgtcagatagtggtgaccattggaggctagaaattgaaggaagtggaaaagtatgg

SEQ ID NO: 22103 - DNA, 717 bp, Zea mays
  Clone ID: LIB3356-051-G11_FLI
gttctagatcgcccccgccgccgcgctgccgcggccatatacggcgaaagccctattcgtgcccgcggccgtggatagataggtcagtgacgattgagaaacccgtagtcggagcagaggaggggtagaggatggtgttcggtcaggtggtgatcggcccgccgggctccggcaagaccacctactgcaacggcatgtcgcagttcctctccctcctcggcaggtaagtacgccgtttagttcctcaccgttgctttggctgcccctcaagctgctctagttaagtcgaacacgcttgaccttgatttgacccgctgcgtgatgccgtgattcgattagtagttgcttcggttgcccctcacaagctgatctaggactctaggtaagtggaatacgcttgaccttgacttgacccgctgcgtgattcgattagggtaagtggaataccttcctctgctaaggttgatcgagaatgttagctgataccatattgcttgtagcagaagttgtgccgagagtttaaacttcacccttggctttgttttggttggactaaagctgaagttgataatttgctcacacggatggcttctttatgtgttttccttgtggcaggaaagttgcggttgtcaatttggaccctgcaaatgacgcattgccgtatccttgactctttgagcaccacattttttcctctgtactcactctctccctatc

SEQ ID NO: 22104 - DNA, 560 bp, Zea mays
  Clone ID: LIB3356-051-G12_FLI
ccatcgaaaaccctctctcaaattcacaaggccccgccgccgccgcctcgtcccccattcatcttcgccgaaaccctaaccctagtcgccgcggccacccttcccggcgacgccatgtcgaacccgaagggctccaagatgctccagttcatcaactaccgcatgcgggtgacgatccaggacgggcgccaacttgtgggcaagttcatggcgttcgaccgccacatgaacctcgtcctcggcgattgcgaggagtttcgccgcctcccgccctccaagtcctccaagactaccggtgaacgcgaagagcgccgcacgctcggcctcctcctcctccgcggcgaggaggtagtatccatgaccgtcgagggcccaccaccgcccgacgagtcccgcgccaaggccgcggcggcgggcggagccctcgccggccctggcatcggccgcgccgctgggcgcggtgtgcccaccggcccgctgctccaggcagctcctgggctcgctggtcctgtacgtggggttggtggacccgcccccggcatgatgcagccccagatctc

SEQ ID NO: 22105 - DNA, 1100 bp, Zea mays
  Clone ID: LIB3356-051-H9_FLI
cccaccttccctacctatctatcctacagcggctagtctactcaactctgctctgctcgcgcggcgatcgaggcaccgtcgtcgccaccatcagcggctagcaccgatcgagccaccggccgatcagatcggccggcccaacgaccatgctggcctcgctgcggtacctggccggcacggcggggccgagcggcttcggctcgcggacgaccgccgaggaggccgcggccggcgacctgcgccacgtcaccgccatcatcacgggcgccacgtcggggatcggcgcggagacggcgcgggtgctggccgggcgcggcgcgcggctggtgctgccggcgcggagcctcaaggccgccgaggaggcccgcgcgcgggtgcgcgccgagtgcccgggcgccgacgtcgccgtgctgccgctcgacctcagctcgctcgcctccgtgcgccgcttcgtcgcgcggttcctcgacctcgggctccccctcaacctcctcgtgtacgtgtgcctgttcacctttctttcttcatgctgctgctgcatccatcagtaatgagtccacctgccaaggcagcagcagcaacaactgcggctaacttacatggactgacacatggttcacgtgcgtgcgtgcgtacgtacagcaacaacgccggcaagtacgccgaccgcttcgccgtgtcggaggacggcgtggagatgaccttcgccaccaactacctgggccacttcctgctcaccaggctgctgctggacaagatggcggacacggcgcgggccaccggcgtccagggccgcatcgtcaacgtctcctccaccatccacagctggttccccggcgacggcgacgccctcggctacctcgaccgcgtcacacggaggaagataccgtatgatccgacgagggcgtacgcgctgtccaagctcgccaacgtcctgcacaccagagcgctcgccgaccggctcagcgagatgggcgccaacgtcacggccaactgcgtccaccccggcatcgtccggacccgtctcatccgcgaccgcgacggcctcatcaccaacacagtgttcttcctggcgtccaagctcctcaagacgattcctc

SEQ ID NO: 22106 - DNA, 957 bp, Zea mays
  Clone ID: LIB3356-052-A4_FLI
gcgggcgccccaaacccagggcagagtcgcagggtgacggggagagcccatcctggcgccgcagcagccgtgaagcacaagagctttgctgcagcacgacggctttgtcctctctcctttaaaacggactgctctcctcaattgtcagtcagtagcatccaattgattgttctatcctcttctctgttctcacccccttgcaagcaacaatcgttcaccgatcgatccagtgcgtcctgcatggaaactgccgccgtcgccgccgccggtgccgggcgccgcatcatggtggccgtggacgagggcgaggagagcctgcacgcgctcaactggtgcctcgccaacgtcgtctccccggcaggaggcgacacgctggtgctcgtccacgcccgccgcccgcgcccggtctacgccgccatggacagcgcagggtacatgatgacctcggacgtgctggcgagcgtcgagaggcacgccaacgcggtctcggcggcggcggtcgacaaggccaagcgcgtctgcgcggaccacccgcacgtcaaggtggagacgatggtggagagcggggacccgcgggacgtcatctgcgacgccgccaacaagatggccgcggacctgctcgtcatgggcagccatggttacggcttcatccagagggcgttcttgggcagcgtcagcaaccactgcgcgcagaactgcaaatgcccggtcctcattgtcaagaggcccaaggagtagaaaggctcctcgcatgtacgctgcagcttagccaataatgtttcatgggcgaccatataggcatatatgtacacacttcacatcccattgcatggcagtgtcttcccttccctagttcaacaactagctttctgctggaataaggtgttcagacaaagtatgtactgtacatactatcttcttgcatttggtactcttgtttagagagaagcgttccgt

SEQ ID NO: 22107 - DNA, 136 bp, Zea mays
  Clone ID: LIB3356-052-D7_FLI
ggtcagaactgtgagatgctgcgcttagcatatcatcggctgtgttttaatttttggtttgtatggacatttgctgtgggtcggaagtacgatgtattcctccatttccataaatggctaaattggtttgactggc

SEQ ID NO: 22108 - DNA, 1125 bp, Zea mays
  Clone ID: LIB3356-052-F3_FLI
gtctcaataggccgccagccgtggaggacaggaggagacctaggtacccaccgcggcatcgcgccaccgcccaggcacccacggccccacgcctggacagcccgacgcccgcagcatgcagcggcgctggcgcgcagcgctgctcgcctagtcgctggaggccagagccgccaccccgctgagccagaccgccggacgagcggagcccgcaggccgcagcgatgctcgccccgccgacgcccggacccagagcaccgcgcccacgggccaccgccgttgtccagccgagcaaccgtgagccaagcagagcaggggtttaccactctagtttcgctgatgatgatgggatcacaaaagcttgcagctgtcctttgcttccactgaaaactcatatcaagggcccggcaccagcctctgaccctgataaagcggacattgttgatgaagccataactttctttcgagccaatgttttcttcaaaaatttccatgtgaaaagctcagcagacaagttattgatctatctgacgttttatatcaatattgccttaaaaagactagaaggttgccggacactagctgttgggactaaagcaatcattaatctgggattggagaaagttcctgtacctggggaaccagggtttcctttccctggacttttcactcttccccagtcccaggaggaagcagaattgttgaggaattatttgaagcagataagggaggaaacaagtggaagattgctcaactgtgcatacagagctaatggctttccaaacaagtggtggttggcttttgctaagaggaagttcatgaacattgtcatcctttagacttgggctttttgtaccaactggttcaagcttttttttcactcatgatcgtgtgaagtatccacacacaacaaagatagttatcctacatcccaaagtaacacgccaaagacttcgatgataggatagatgaatgacataagataaattatttgttcccaatttgcgatgtataaccgtgggaacagtaattatcatgttgtgttgccttttgtaattctcaccctgctatatcagagagacgaaacctgatacggggtatattctacaatgatgtctaaaatgagac

SEQ ID NO: 22109 - DNA, 708 bp, Zea mays
  Clone ID: LIB3356-053-H7_FLI
cctcattattattctcactggtcgatctgctaacacaaacagcagcagctcctcctcactagctagccttctctatttttgctactgcaagtgtccaagtctgcgacgacgtccgagatgtcgacggtgagccgtgcatcccttgaccagaagcttgccctcgccaagcgctgctcccgagaggcgactcttgccggagctaaggcggcagcagtggcgactatcgcctccgcgattcccaccctcgcgagcgtgcggatgctgccgtgggccaaggccaacatcaaccccaccggccaggcgctcatcgtctccacggtggccgggatggcctacttcatcgccgccgacaagaagatcctgtcgctggcgaggcgccactcgttcgaggaagctccggagcacctcaagaacacctccttccagggcaccggacgcccccacccggctttcttcaggccatgatgagatcagatatatatatgacacatccgtcgacctcatcagtcatagagcccagccagccagtcagtcagtcagcacaagcacaagcaccagagatgatgccatccatgtctgcatgtatgcatttataaaaaataaactgctaggctgatgacgcgctctaatataagctagccgtcgcgcgcgcgtgctaatcgtcctcgatgtactagtgattgtgctatttaaatatatagtttcacg

SEQ ID NO: 22110 - DNA, 729 bp, Zea mays
  Clone ID: LIB3356-053-H8_FLI
ccagcacctgccctcctcgccgtcgccgcctccctccgcgcgaccgatctaccctccgccgccaccatgtcgctgatcgccggggaggacttccagcatatcctgcgtttgctgaacaccaacgtggatgggaagcagaagatcatgttcgccatgacctcaatcaagggtgtcgggcgccgcttctccaacatcgtctgcaagaaggccgacatcgacatgaacaagagggccggcgagctgacgcctgatgagctggagcgcctgatgacggtcgtggccaaccctaggcagttcaaggtgccggactggttcctcaacaggaagaaggattacaaggacggcaggttctcgcaggtcgtctccaacgcccttgatatgaagctcagggacgactttgagaggctcaagaagatcaggaaccaccgtggtctgcgtcactactggggcctccgcgtccgtggccagcacaccaagactactggtaggcgtggaaagaccgttggtgtctccaagaagcgatgagctctatatcaccctgagaaatcttggccgcactaccgtgttggtttgtgtccaaacagtcctgatgaagggtttctgtttaggcagtttcctgaaatggtgttttgctctaggacaatctcgcggttattgaaccttaatatatcgtgtccctgggttgtgtttttttgacactttataagtaatttcatttggatgagactt

SEQ ID NO: 22111 - DNA, 1759 bp, Zea mays
  Clone ID: LIB3356-054-C5_FLI
cgacgtctcgtctcgtctcgtctcgcctgcccgcagccccttggcttcgttccatccggcttctcggcggcggcggagaggagggggatggcgcaccggctgctgcgggacgcgcaggcggacgggtgggagcggtcggacttccccatcatctgcgagtcatgcctcggcgacaacccctacgtccggatgttaagagctgaatatgacaaagaatgcaaaatttgtgcacgtccttttactgtattccggtggcgtcctgggcgagatgcaaggtacaagaagactgagatctgccagacatgttgcaagctaaagaatgtctgccaggtctgcctgctggatcttgaatatggtctgcctgttcaggtccgagatacagcactctctatcaattccaatgatgcaattccaaggagtgatgtcaatcgcgaatattttgcagaagagcatgataggagggccagagctggcatagactatgattcatcctatgggaaggctcgcccaaatgataccattctgaagcttcaaaggacagcaccatattacaagaggaacagagctcatgtttgcagtttctttgtgcgaggtgaatgtacaagaggagctgagtgcccttatcgtcatgagatgcctgaaactggggagttatctcagcagaacattaaagatcgctactatggagttaatgatccagttgcactgaaacttttgagcaaggcaggtgagatgccatccctgacaccaccagatgatgagactataaggaccctctacattggcggactcgatagcagaataaccgagcaggatttgagggatcagttttatgcccatggtgagatcgagtccataaggatggtacttcaacgtgcaatcgcatttgtgacgtatactacaagagaaggcgcagagaaggctgcagaagagcttgctaataagctagtcatcaagggcgtgcgcctgaagctgatgtggggcaagcctcaggccccaaagcctgaggaggatgagtctgggaggctggggcaggtttcccacggagggctgctccctagggctgtcatatctcagcagcagagcggtgaccagcctcagccccccgggatggagggccaacagcaacaggctgcaccagcatcgtactacttcaacattccagcaccaccagcaacggagcggactgtgtatccatccatggatccacagaggatgggtgctatagtaaaaccacatgacagtgaaggcaaaccagggccgcagcaagccgggcaagctcaggcatcaagcaacccagcacaagggggcggctatcctgcaccaccgccatactaccatggtcagtatccaccatactatccacccccaccaccatacggtggctacatgcctccaccgcgcatgccctacccaccgcaatatccgccttaccagccgatgctagctcaaccagcacaggtacaggctagttcatctcggcaaccaccgcatgcaggtggagggcagcagcagccgcctgatggccctccagctcagcagcagccacagcagccaattcagaactgaagtcctgtcaagatgttgggtattggtactgctctaactgctcggcaggagaatgcaacccccgtgggtcaccagctttcgtaatttcttaatttgtggttaacagtaaaaactttgttgtattgcttatcaacgtttgaagaaaaaccgtgagatataccggatgtatccagcttctggattttgtggt

SEQ ID NO: 22112 - DNA, 1044 bp, Zea mays
  Clone ID: LIB3356-054-D4_FLI
gtctgtttctgtttctctctagagatcccataccgccgccagcccgccgctgtgcctcatcgccggcgacggcgcagaacaacccagccgatcagccgtcctcacatcgaagtctccatacaccagtggcatcgcccccatatttcgcccgttgcattgaactactgcagagtggagatccgtctatccatgacccacccagcaggccctggatcgatctgtcattctcttggtaattaacccacgcttgctcggaggaacgctgcagggcacaagaaatgcagagggatgccggctccggcgaccggacgccgggcaccccgagcccgacgcacggtggccggctcaggcaccggaagcgctccaacgaggtccccagcgacgtgaacacgactaatggcgccaacctgctcttaaacgaccagaacaagtacaagtcgatgctagttcgtacctactcctcactgtggatgatggccggggtcgtgttcttgatatatatgggccatctctacatctgggccatggtggtggtcgtccaaatcttcatggcaaaggagctcttcaaccttctccgcaaggccaatgaggaccggcagctcccagggttcaggatgctcaactggcattttttctttactgcgatgctgtttacctacgggcgcttccttagccatcagcttgttaacacgatgacttcagataagttgttgtacaagctggtgagcaggctcatcaagtaccagatgtttatttgctactttctttacatagcaggctggcattggacccagggagttcagtctgacaacgacatttggtccatttcccttttggtagatgtgtttagaaatgtaggccggagaagtagtgccatcaaacctcctcaaacgggactttgcttagtgagttttttagagtgacaaggaacagttcttccttcattctccagttcataatgtttttttagttgattttgtttattgagtaaaggtggttttattgtgtttatatttattgagtgatggtggttgggaaggctgt

SEQ ID NO: 22113 - DNA, 880 bp, Zea mays
  Clone ID: LIB3356-056-B1_FLI
ttttagcccctccaatcccatcctgttttgtggctcccaaactagccgtaagttggggtataggcttaggtacttgtcttaatatgttactccctctgtttttaaatatatgacatttagaaaagctaataggacacgctacttagttataaaaacgaatcattagcttgtcctacacttcgtagtacttttaagatcatatagcattgaacaaactggatctgcactatttgacattgatctaaaacgaggtttcattttctcactaccacatggcctttccacatgagttggagtggtttagtgtggaatgtaaactaagggctactttgtcaactcaactctattttcccaggggtccattttctaagggaaaatgaactaatttctcttgggaaaatgaaaatcccttgtaaaaatggggtttccaaactagccctagatttcatattaaaccactctaactctaacagtacacacaagaataaggccaacacatgggtctccaaacaagccctataatgtaagtcccaactgtcatagctatattgacaatgtatatattctttttgcaggaggatcagcatggccggtttgagcatgaggactgtgccccatcttgcagatgccatacacgctgcagttactcaactgaaatgaggatagtatcgcagctttcgtgaataaaacctgaatcacccacaacaatgttctaagtactcagccagtggtatttactggttgacctactgtagtttgcgtcggaatagatttgtttttttactctgttcgtggggcagttttgtattggtggattcataatgactctgattatggtgcgttgggaacttctaataatatgcacatgaaattttgcttc

SEQ ID NO: 22114 - DNA, 898 bp, Zea mays
  Clone ID: LIB3356-056-B6_FLI
gccacgctctctcgctttccaaggaccgccgggtccgctccgtcccccgtctggcagtggcctcctcgccgccctcggcgccgcctggccacgccttatccagatccaggattcaaagaaaccattacttcaccaccatggttcttgattcattgtcatctccgcacaggaggtcccaaaacatattcttcgtgtcatcatcaaaaaagcctcagtcatctcgtgatgacagttggtctgcactggttgagcggcaccggttcctcctgacaacacttcttgtgcttgccttcctatgcagtatctatctgtactttgcagtgaccttgggggcatcagatgcgtgcagtggtttgacaggaggggcacagaagatcgagtgccaggcaagatcagtgctgcaacatggaaagttgaaattccgctgacttcggagtctcattgatgaagaccaaattattgagtttatttgcactctggtcacaggtcttattcttcataccatgaatctgtatattattggtggtggctggtttgtattcatgctgatgttattgggccacaacatttattgtactggtagagataaatctaatagtgatagcgttgagtttgtggaaagtggaaactggtataagggtaggtctatattgttcttaacaatcatggtgcctataattcgtccaggagaccttggtattgtctcccgtgtgacatgtgacacagtcagattgatactgtgctacctgagcaccctttgatctttaagtactgattaatttcgttagtgttcatcttaatttattaacaatcagctgttcactgagaaatttgtcaattttagtgagtcattgatgtaaatacgacaacctggaacatgattgtttgtagttgtgtt

SEQ ID NO: 22115 - DNA, 1537 bp, Zea mays
  Clone ID: LIB3356-056-H8_FLI
tagctccacacgcgcggaggtagtatagccgggaggggcacagagagaggagcgaacgagaggaaggagcagcggcaactacacgccagagagagggaaggggaggttggccagagagccgagagcagccctgcagtcgagagcatccgactgctagctactagcaatagcataggcagataagctcgggccgggccggggcacgcgcacaatgaggtcgcggcggtggcacagcgtggtcgccgtagcgctggcagcggcggcgtggtggtggtgcgcggcggcgcaggcgcaggcgcaggcgcagctgagccagagctactacgcgtcgacgtgccccgacgtggagacgctggtccgcggcgccgtcacccagaagctgcaggagaccttcaacgcggcgccgggcacgctccgcctcttcttccatgactgcttcgtcaggggctgcgacgcgtccgtgctgctgtcgggccccgacgacgagcacagcgcgggcgccgacaccacgctgtccccggacgcgctcgacctggtcacccgcgccaaggccgccgtggacgccgacccgcgctgcgccaacagggtgtcctgcgccgacatcctcgccctcgccgcccgcgacgtcgtctcccagacgggcgggccgtactaccaggtggagctggggcggctggacggcaaggtaggcacgcgtgccgcggtgaagcacagcctcccgggcgccggcttcgacctggaccagctcaacaagctcttcgccgccaacgggctcacgcagaccgacatgatcgcgctctcaggtgggcacacgatcggggtgacgcactgcgacaagttcgtgcggcggctgtacccgttcaagggcgccgccgccggcccgccgatgaacctctacttcctgcggcagatgcggcggacgtgcccgctgaactacggcccgtcggcgttcgcgatgctggacgccgtgacgccccgcgcgttcgacaacggctactaccggacgctgcagcagatgaagggcctgctggcctccgaccaggtgctcttcgctgaccgccgctcccgcgccaccgtcaaccgcttcgccgccaaccagaccgccttcttcgacgccttcgccaacgccatggccaagctcggccgcgtgggcgtcaagaccgccgccgacggcgaggtccgccgggtatgcaccagggtcaactagccctgcccagctccagatgcaatgcatgcgagccacgtccacgtgcacatgaaatgaagctagctagctgctagcctagctttagctagctcgttattactaggggcgccgggggttgggaaagaatgcttcatgagtcatgtccgtccattcatccatccatccatccatcacacggttcacagtcagtcacagtgtactattgattcgttggtccgccgattcttttctttccttggtgattgttgtgtatgtagcagaagtaataattaaaaaaaccatgtaacaagaagagggatgagctttgagctccacacttgtactgcatcc

SEQ ID NO: 22116 - DNA, 1931 bp, Zea mays
  Clone ID: LIB3356-057-B10_FLI
ctctcctcccggtgccagccgccgtgcgcgctctcttcgccctacggaaggtgcggaggtgccgagatcttgctcgatctcttcggcggcgaagagcgccaaccagatccgccctgtttgttggtgtggcgccggagcaggagtaggtcgcggccacagaaccctaggagcgaccatggcgactttcgcgaagcctgagaacgcgctcaagagagccgaagaattaatccatgttgggcaaaagcaggcagcactgcaggctttacatgatctcattacctcaaaaaggtacaggtcatggcagaagcctctcgaaaagatcatgatgaagtatgtagaactctgtgttgacctgaggaaaggcagatttgcaaaagatggtcttattcagtataggattgtgtgtcagcaagtaaacgtgtcatccttggaggatgtcataaagcactttatcagctttccaatgagaaagctgaacaagctaagagtcaggtagaagccctggaagatgctctggatgttgaagatctggaagcagacaagcgtcccgaggacctcatgctcagttttgttagtggggagaaaggaaaggaccgatcagataaagaggttgtaactccatggtttaagttcctctgggagacatacaggactgttctagagatactgaggaacaattcaaagcttgaagcgttatatgctatggctgctcatagggcttttcaattctgtaaacagtataagaggacaactgaattccgtaggttgtgtgagataatcagaaatcatctcgccaatctgaacaaatatcgcgatcaaagggatcgtcctgatctgactgcacctgaaagtttacaactatatcttgatacacgtgttgagcagcttaaagttgctacagagctttgcctttggcaggaagccttccgatccgtggaagatatccatggtctgatgagcatggtgaagaaaatgccaaaaccttctatcttggtggtgtattatgcaaagctgaccgaaatcttctgggtatctgatagccacctttatcatgcgtatgcgtggctcaagcttttcaacctgcaaaagaactacaataaaaacttgtctcagaaggatctacaattaatagcatcttccgtcttacttgctgcactatctgtggcaccttatgacaaaaaatatggtgcatctcatcttgagacagagaatgagaaggagcgtaacatgaggatggccaaccttgttaacttctcgcttgattccaagcgtgaaaatagggaaatgccttcaagagcatctcttctatctgagttggcctccaaaggagtcctttcatgtgcttcccaagaagtgcgagatttgtacaaccttttggaacatgagtttctacctctggaccttgcatcaaaagtgcagccacttctttcgaagatttcaaagatgggagggaagctttcatcagcttcttctgttccagaggttaagttatctcagtatatttcagcattggagaagctgacagcattgagagtgttacaacaggcctcttgtattttccagtcgatgaagattgatatgctctcaagaatgattccgttctttgacttttttgttgtggagaagatttctgttgttgctgtgagacgcaattttgttgctataaaagttaaccatttatcaggagctgttcattttggtactgtggacatagaatctgatggcttaagtgatcaccttagtgttgttgcggattcattaaataaagcgaagattcatatttgtccaccagttaaaaagccatctaaactcggtgaaagttttattagtttggctggaatagtggagaatgagcatcaagaggcttcttgcaaggaagtccataattgaaaaacgcaaagaagagcttgagcgtcaaatattggagaagg

SEQ ID NO: 22117 - DNA, 1119 bp, Zea mays
  Clone ID: LIB3356-057-C11_FLI
gccctcaacagggcaacggcgcccacgggcgtcaccgtcgtcaagtcttttacccaaaaagcccctagcacaatgtcaggccaagaccctgatcaaagcaagcgacctccgacatcgtcattgtcctgaaaccccacataaacccttgcagaggggcatcgacgcgccgactgcgcagcagccgcacacctccgtcggccaccatcccctctgttaaggcacacagaaaccgagcaccaccgagccgtgagcaacacactgccacgcaccggaaccgttgccggccctggcagacgtggccccgaagcaagcagacgctagacgtgagtgtcacgcaactcgccgccaacgacaaatggcgccgcacccccgtcagtcagatctgacaggagcagctgcgacgcggcggatctaaggtgctggcgagcgcaccacagcaggcgccgcaggggccaccccgctggcccaccgccgctccaagccgacgcatccatggccgcgcgccgagctaacctgcggcccgccaaacacgccgttgtgcctgcccccggcagcgacaccctcgtcatcctcctcggccggatccgccaagatgccggcgccggaacgtgcccacgggaagggaggtcggagcacagatgggcaagccgagcaccaacccactgccccagatctagcccgcgcatctcactggcgccagcagcaacacccgcaccaccagcccgccgctcaccaccagcaccgtcggaccgtccaccacagccatggaagacgaggaaggccacgaaactggtctccaaccgactgtctgccaccggaaagcgccgccgggagctgccgcgccgcaccaccaaagacgcccccaccccagccatggaggcgagatctgcgccagtgccggactaatccagacaagggatctcgaagcaggcccccacgggcaccggcgaaaaggacccagcagcacgcacatcacccgccgccgtccttgccctctgcgtgggcatcccagccacggtctcgggcggcggcgaggacggggaaggccggcgatggagggctggggcggcaggtgcaggtccgcccgtgccgcccctgggcggccgacgcgggggagac

SEQ ID NO: 22118 - DNA, 1981 bp, Zea mays
  Clone ID: LIB3356-058-B11_FLI
gcatgggcagccggttcagtttcacggcaaccgatgggaacgacaaaatcaaggcgatgctccccacttactttgcgtcggaggtccactccggcaatctgaagaatttcggtctcatccgcatcctcgactacacttgcaactccgtcaaaggcaacgctgacaaagtcctgattgtcgtcaaatgcgagactgtgtgcgaagcgctcgatgccgagatcaacggcgaggccaagaaagaggatcctccaattgtgctgaagcctaaagacgaaggctcagtcgtggctgaggaaacaaattctcccccactcgtgatgaagcctaagcaagaggtgaagtccgcgtcccagatcgtgactgagcagcgtggaaatgctgctcctgccacgcgcctttccatgacaaggagggtccatcccttgatcactctgaacccctaccagggtaactgggtcattaaggtgcgggtcacgagcaaaggcaatctcagaacctacaggaatgctcgtggagaaggctgcgtcttcaacgtagaacttactgatgaggatggcacccagatccaggccaccatgtttaacgaggctgcaaagaagttctatccaatttttgagctgggaaaggtctattatgtctcaaaaggatctcttagaattgccaacaagcagttcaagacagtcaaaaatgactatgagttgtcactaaacgagaatgctattgttgaagaagcagagggggagactttccttccaccagtgcaatacaaccttgtcaagattgatcagctaggaccatacgtcggtggcagggagcttgtagatattgttggtgtggttcagagcgtatctcccacactcagtgttaggagaaagattgacaacgagacaataccgaagcgtgatattgttgtagcagatgactctggcaaaactgttactatttctctctggaatgatcttgctactacgactggccaagagcttttggacatggttgacagttcgcctgttgttgcgataaagagcctaaaagtatctgacttccaaggcgtatctctttcaactattggcagaagtactctcgagattaatcctgacctgcctgaggctaagaatctgaagtcctggtatgactctgaaggcaaagatacttcactggcaccaatcagtgcagaagtgggtgccacacgcgctggtggtttcaagtccatgtattctgatagagtttttctgtctcacatcaccagtgatcctgctatgggccaggaaaagcctgttttcttcagtctgtacgccatcataagccacatcaagcctgatcagaatatgtggtaccgtgcttgcacgacctgtaacaagaaggtgactgaagcttttgggtctggatactggtgcgaggggtgccaaaagaattactctgagtgctcgctgagatacatcatggtgatcaagctctccgatcccactggcgaggcttgggtgtctgtgttcaatgagcatgcagagaagatcattggctgcagcgccgacgagcttgatcggatcaggaaagaggagggggacgacagctacgttctcaagctcaaggaagccacctgggttcctcacctgttccgtgtcagcgtcacgcagcatgaatacatgaacgagaagaggcagagaatcaccgtgaggggtgaagcaccggtcgacttcgcagctgagtccaagtacttgcttgaagagatcgcgaagctcaccgcttgctagaagacgcagtctttctggtggttcttgaaggactggcccccgatgtctccctcgcagtttttcttttgagctccagtaacttgattactgttctgtgtgttgctctcactgggttttagcacttctgtaaggtatatgtagatgctagattaccttggtgtcaaggaacagatgctatgataagccttgcaaaattgcagttccaattccgtgtatctgcaactttgagc

SEQ ID NO: 22119 - DNA, 559 bp, Zea mays
  Clone ID: LIB3356-058-E5_FLI
gatccgcccccgccgagccgaggacagcagcgggggctctcggtctcctcctccagatcttgcacccaatccagatctcgcgccctctccgttcctctcctatgtccattccccctcctcggatctaaccactccgtccctctccccgtccccgcgtccggagctgagatccgtggtcatggccggcgctgcaggtgggttcgtcacgcgggcgttcgaggccatgctcaaggagtgcgccgccaaccgcggcaagttcgccgcgctgcagcaatccatccagtcatacctcgatagcatcaagggggctacggcggagggcgcggtcatcacggaggcgctcgcgtcggctgggcgcgtgctcgacggaccgcaggccgagctggtgctgcagccgctccgcctcgccgtcgagaccaagcacgtcaagctcgtcgagcccgcgctcgactgcctccacaaacttattgcttatgaccatttagaaggcgatcctggtttagaaggtggtaaaaactccccaatatttacagacatcaataaatactccatttgtccc

SEQ ID NO: 22120 - DNA, 656 bp, Zea mays
  Clone ID: LIB3356-058-E6_FLI
gctgagcctactgagaacacacaaattaaagccttctcctactcctacatacgttgatcaatggctctcctgcgtgtcgtcagcacggctgtactgcctgccgcctgctgcgtcgtcctcctcctcctgtccaccaccacggctccggtggccatggccggttcgttgcgggatgactgccgcgcgttctgccgcccaaggtgcgagggctacggtgcggatttgtgccatgccctcgtcaacggtttcccgctactgcagaacgtcctcgaggcgacgtgcgcagagcgcttctacgaagtgtgtcaacccatctgcatgaacatctgcacggccaacaccctcactccggcagcggggccgggaactgccccgccgccgccgccaccatgcggcaagcaatactagctggctagctagttgatgcctccgtacgtacgtgttgttttatttgctgttaactcttaagtgtgtatgtttccgtacgttattatttaagttttaatttgtgttctccggtacggttcgtttcgcaatgtatgtgtctgtccatgtatgcaatcaaagcagctatgccgtgtaatttcgttcccctttggttgttccggttgtgttttttctgttcatgtatgcaatcaaagcgctattaatttatt

SEQ ID NO: 22121 - DNA, 484 bp, Zea mays
  Clone ID: LIB3356-061-B11_FLI
cttccttcacggattcccaaatactcgcttccaataccaattctccgatccacgttcgttcccgcaccctcgcgctccgctgatccggcggcatgcggcgccgcggcgtggcggcggctgatgcggacggtgacgtggagttgcggttccgcggggtgcggaagaggccgtggggccggtacgcagcggagatccgggacccggcgaagaaggcgcgcgtctggctcggcacattcgactccgccgaggacgccgcccgcgcctacgacgccgcagcgcggatgctgcgcgggcccaaggccaggaccaacttcccgctccccgccgcagccgccctccaccacccccacatgcccgctgctgccgccgcagcagctccaccatacacaacatatcccaccgccacgggcgtcgtctcgacgccgccggtcgccagaccggcttgcagcagcctcagctccaccgtggagtccttcagcggcgc

SEQ ID NO: 22122 - DNA, 609 bp, Zea mays
  Clone ID: LIB3356-061-D6_FLI
gttcaagacagaagctgagcttgctgtccacaagaagaacatgtgcacggtcagttcatgcagcagacatttcagatcccacagatacctgaggcgccaccagagtgcacacaacgatgatatgccttacaagtgcccatgggatggttgtaatatggctttcaagtggtcatgggatcgggctgagcatttcaaggtccatgctggggccaagccttacaaatgcacgacgcctgggtgcagcaaaatatttaagtttgtttcagatttcacccggcataggaggaggtgcaaacctcagaggtaaaagcttgcttgatactacagaattaggataatagtgaagtttgtgcttgctacagacctacagtagatgttttttatttgctaggagatccatcgtgcaactgttctgacaacttatagtgggactgtctgtttctttgttgaggaaaatgctaaaatcgttagcttagaaactcgagtttctcaaaatgtatgtacatttgcggaaggtagttgtgcactggttctggttatgatcgcgctgtatcggatctgagacttagagctgtaaatgggaaggtattatttattttattttgtttc

SEQ ID NO: 22123 - DNA, 583 bp, Zea mays
  Clone ID: LIB3356-061-H5_FLI
cgtcatccgggtacgatatcggggcagacggccagacgcaaagccggaagccagcgtctatacacggatctcgctcggccatcggactgtacaaggacgagagggaaaacagcggattcgtcaccgccaggcgtcaggtcagagtgtgttaagacaagatggtggcgaatggtgatgcacctgctagagggagtgcggcggcagctgcaagcctgcgcaggcgtaggaccacaagcggtgctgctggtggtggaggcggtgccagctcgatgctccagttctacaccgatgaggctgcgggccgcaaaatgtcaccaaacaccgttctgatcatgagcattgggttcatcgccgttgtcgctatgctccatgtttttgggaagctgtaccgcacctccaactaggttggtattaccataaccaagaaaacataggccaccaagacaggagccttatagagcgatttcaatggatagcaagtgactatcagagaggaaccttgtagagcgatttcaatggatagctgtgaactgttatagaagtttatctacacaacttgcaatgctgagggctatgataaatc

SEQ ID NO: 22124 - DNA, 951 bp, Zea mays
  Clone ID: LIB3356-062-E6_FLI
gttttgcgccttcgatacgtcgtttacgtattcagtttttcacacaacggcggcgatgtcgtcggcctcctcctccgccgccgccgccaacgccggtgaaggaagcgggggtgcggaggagggcgtggagatcacttacgtgagctatggcggggagcagcatctgccgctggtgatgtcgctggtggacgaggagctcagcgagccctattccatcttcacctaccgctacttcgtctacctctggccgcagctcaccttcctggcgttcgatgccagggatggcaagtgcgtggggacagtcgtgtgcaagatgggggagcataggggtgcattcaggggctacatcgccatgctcgtcgtcctcaagccctaccgagggaggggaatagcaactgagctagttactagatcaattcgggcaatgatggaatctggctgtgaggaggtgacacttgaagcagaagttactaataagggtgcccttgctctgtatggtcgccttgggtttatccgagcaaagagattgtacagatactatctaaatggtgtagacgcatttcggctgaaactactgtttccgcgccctgataatgacccacaaatatttggtataattgactagattctccctactcgtgacagcatcctaatcagtaggttgaattgagttggagatctgtaatccgatcatttttcgctctgttcatgcttcctcagctatcatgtggctgtaatattgctgtacttacatataaatgttcgaggtgttttattttcttcctgttctttgataagggtgttgtaagacctttttcttttgtgagaaaaacaaaacgcatgccgcagttgcaagaggactgtgcagttcttttgctcaataaacaaaacgcatgccgcagttgctgtagtgtttagggggtgtttgggaacaaagtttttctgcaaaag

SEQ ID NO: 22125 - DNA, 1423 bp, Zea mays
  Clone ID: LIB3357-001-C12_FLI
gacacacgtacgttgaacaaacacccaaggcctgacgagacgagatccggacctccgtcctcccaactagggcgcgcgcgcgacctcggcaccggcggcctcgatccatcgttctctcggatccccgccagtgcatgccctggaacggacggacggaatggcagcgtcgccggaccacctcttcggcctgcgcaacagcttctacgtcggcgcataccacgccgtcatcaccagcagccagtccctccccgcgcacgcgctctcccccgacgacctcgtcgagcgcgacgccctcatgtaccgctcctacatcgccatcggctcctaccagctggtgatcggcgagatcgggcccagcgcggccacgccgctccaggccgtcaagctgctcgccgtgtacctctccggcgacggcgggaacagggaatcggtggtctcgaggcttcgtgagctcctgtcagacgcggcggtcgggagcaatccgattctccgggtgatggccggcaccgtcttcatgcacgaacgcgattacgccgaggctctcaagcacaccaactccggtggcagcatggagctgcttgcgctgaatgttcagatataccttcaaatgaacaggacggaccacgcagagaagcagctcagggtgatgcagcagctggacgaagaccacacgctgacgcagctcgccaacgcatgggtcgaccttgtgctgggtggttccaagatccaagaagcgcgcctcatcttccaggacctgtccgagaagtacccgacgacctgcacgattcttaacgggaaagccctgtgctcgatgcacatgggcaacttcgaggacgcggaggggttgctgctcgagtcactgaacaaggacgccaaggatactgagactctcgccaacctcacggtgtgcagcctgaacctggggaaacccgcaacgcgctacctcaaccagctgaagctcgcacacccggaccacgcgctggtgaagcgaatgtcctccgctgcagagagcttcgacagagcctgccaagcaatggcgtgaacctcgtttgcgaaaattacatttgttttccctaggatgagtcggaataacatcgtgatctactctgaagcaaagcagctagtgcatggctttctcatgggcagcttggactccaccgtcggcatgcttttccactggtctcggatagtacattcggcctcgctggtgcgctggaaaggcccaggtgtttcctttaccttttgggctatgctctctctctctctgacgccttgttgcgatgggagtgactgaggggaagcaatccttgaaatcctaaacaggagatagcatgaaacagtatttggttcaggtactgcaatgctgggggtcatatctcatatgcctgttccgatctgcatataataatagggtgtttggttc

SEQ ID NO: 22126 - DNA, 387 bp, Zea mays
  Clone ID: LIB3357-001-F9_FLI
gtccaaaccctagctaagctcccccaatcccctctgcaccgagatccgatctcgcccttctggccgcgggacagtcgccgccatggcctccggcggcaaccccaacccgaccggcgcccccagtcagccgcgtccgccgcatacgcagcagcagcctccaccgggcggctcaccggcggcgcccatgacccacctccgccctccctccctctccggctcccccttcaagggcctcttccacacgccgcccacccacaatcccgccttccagatccacatgggcgcctcgtcctcgccccagaatccgctcatgaccgccaccgcaggctcggccaagcggcccccgcaaaagccccctatccgacccccggcacccggctctacctc

SEQ ID NO: 22127 - DNA, 2987 bp, Zea mays
  Clone ID: LIB3357-002-B7_FLI
ggagacccctccccctccccctgcccctcctcgtcctcggaccttcccccctcgtcgacacctaccctcaccgcatccgcggtcgcaatggcgctagcctcccaaggcatcaccctgcgttccccgccagcggggtccgggggccacagcgggaggcggtcctcttccgtgcccgccgccgcggccccgcgcggctgggggcagccccacgcggggcaagccttatccatctcgcccgccaggtacgaaccagccgctcgtccaccatggcgaggctccctcgctgccgccatacgtgccgctgcctcggccggtgcgcaccacggcagcgacccggtccctgccgagcccagaatcgagctccccgcgatatttaccgtcttctccgaggccgctaagaccggcgctgccttcttcatcgcctcgtcgagcgcggccttcctcctcggctcgtttggggggttcggaggcggcgctgggggtctcttcggcggcggtggtggagggggtggatggggcgcggggggtggtggtgccggtggcggagggggtggagacttctggtcctggctgttctccgccggtgcggcgaacgcggacgacaagtcatcgggggattgggacgcgcacgggctccccgtcaacatgacggtgccgctcacgaagctgagcgggctgaagaggtacaagctgtctgagctcaagttctttgaccgggcagctgccggcggtggcgcctacacggggccagaggattccttcttcgaaatggtcacactgcagcctggtggcgtgtacaccaagtcgcagctgttgaaggagcttgaaacactcgtttcctgtggcatgttcgagcgggttgatctggaggtgaagcccaagccagataacacaattgggctcacagtctcctttgtggagagtgtgtggagtgctgcaaagcagttcaagtgcatcaatgtggggcttatgtcacagtcagggcaggttgacttcgaccaggacatgacagagagggagaaaatggattacctccgcaagcaggaacgcgattaccagcagcgtgtaaggggtgccaagccctgcatcttgccagaaaatgtacgtggagaggtgctgggaatgatgaagaagcaggagaaggtgagcgccaggatgctgcagaagatcagggaccatgtccagaaatggtaccacaacgagggtttcgtatgcgcacaggttgttaactttggaaaccttaacaccaatgaggttgtctgtgaggtggttgagggtgacatcaccaaggtggagtaccagttccaggataagcttggaaatattgttgagggaaatacccagcttcagatcatagaccgtgagctgccccaacagcttcgacctggccacatctttaacattggagcagggaaacaggctctgaagaatataaattcacttgctttgttttcaaatatagaagttaatccacgtcctgatgagacaaaggaagggggcatagtagttgaaattaagcttaaggaactggaacccaagtcagctgaagtaagcacagaatggagtattgtacctgggcgtgaaggccggccaactttggcatccatacaacctggaggaactgtgtcatttgagcaccggaacatctatggtctaaatagatctattgttggttctgtcacttccagcaacctgctgaaccctcaggatgatctttcattcaagcttgagtatgttcatccttatttggatggtgtggatgatcgtagtaaaaaccgtacatttaaaactagctgcttcaacaccaggaagttgagtcctgtctttgttgctggtcccaacatggatgaggctccacctgtttggatcgatagagttggatttaaagccaacataactgagagcttcacacggcaaagcaaattcacatatggcctcgtggttgaagagattacaacacgtgatgaaactaatactatctgtacccatggttcacgagcaatgcctagcggcggtttgagcatggacggacctcccacaacactcagtggtactggagttgaccggatggcattccttcaggctaatataacccgtgacaatactgagtttgtgaatggtgcaattgttggagacagatacattttccagctagaccaaggtcttggcatcgggagcaaaaacccattcttcaaccgtcatcaactgactctgaccaagttcatcaatttaaataagcaagagaaaggtgctggcaagccactaccagctgttttggttcttcatagtcattatgctggttgtgtgggtgatttgccaagctatgatgcatttgcacttggagggccttactctgttaggggctttagtaatggtgaactgggcgcttctaggaatattcttgagcttgctactgagttgcgtgtccctataagaaacacccacgtgtatgcatttgctgaacatgggactgaccttggaagttccaaggacgtgaaaggaaaccctacggagtttttcaggcgcgtaggtcatggatcttcatatggcgttggcgtcaagcttgggttggtaaggggagagtacatcgtagatcacaatgctggtactgggaccgtttttttcagatttggtgagagattttgagtatgctgcctcccgttaccgtggaaggcaggcttctgaggtactttgtttagcgatgtttgtggtctgataggactcaaacggcattggagctctgctgaaataatgaagctattttctgaggaagagtgatagctagtgtgagattaaattttcttcatgtaggatgtaagatctgttctttcagagctgggagctcataaatagatgaatgttcagaaacgttgtcccaatttttaccgtcagttgtgtttgtgcttctgacaaattgtccatttcgttttgcccggaaccttttgtcaattgcttatctacagttttgtttcattttcagattgtgt

SEQ ID NO: 22128 - DNA, 697 bp, Zea mays
  Clone ID: LIB3357-003-B3_FLI
gtagaacaacactctgtgttggtgtcaagatctatagagcaggcatttctatgggcagtgcatcaggactcgaaggaagcatagcatcatcggtttttgtgtttcattaattctcatttcaagatggcatctgctggcctaaagccaggggtgcctgttattctacgggagctggagccatcctcagagatgttcaagcaaggagcgtcccttcgagtcacaggaagtctccagtcattcgatgtggagtccgcgactgccaccattcaagacggcagccctgtttgatgctagcgagaagtaacaatgctccaccgatcgttgatggcttgcaggcgattctactcgcgcgcatcggaaggaacgtcgatggcctcgacatgaacctttaccagcaggctctactcatccgacggcagcacgaagcaaagctgctgagctccaggagagcatgatctgcttgctatcttggagcaggaggcgcatggtggttgtagttattaggtttctttgtttctcaacagtgcaattgcatatgtaaacgtgaagagaactggaccaagaactggttaattgagagggtctgctgcatatgatttgcgatctctcttgccctccaaagggctgccatggcatgtgtagatgtgactgccaatttgtgatcatcttacttgcagcagaatgctggttttatttt

SEQ ID NO: 22129 - DNA, 1610 bp, Zea mays
  Clone ID: LIB3357-003-G1_FLI
cttgtgtcctcctaaaaccctaaccctccgccgcccctcggacccccaaccagcagctgccgcggccatccgccggcgagatggcgctgtacctgctgttcgagtcggcgtccggctacggtctattccacgcgtacggcatcgatgagatcgggcagagcgtggaggccgttcgctcctccgtgctggacctcgatcgcttcggcaaggccgtcaagctcaccgccttcaaccctttctcctctgccgtcgatgcactcaatcagtgcaacgctatatccgaagggatcatgaccgatgaactgaggagtttcctggagctgaacctgccgaagcccaaggaggggaagaaggccaaatacagcctcggggtcgtcgagcccaaggtcggttctcacatctccgaggtcaccggcattccctgccagagcaacgaattcgtccaggagctgctccgcggtgtccgcctccacttcgaccgtttcatcaacgagcttaaggattctgacttggagaaggcccagcttggcctggggcatagctacagcagggccaaggtgaagttcaatgtgaatcgtgttgacaacatggtgatccaggcaatctttctattggatacgcttgacaaggacatcaattccttctccatgagagtcagggaatggttctcatggcacttccctgagcttgtcaagattgtgaacgacaattacctatatgccaagcttgctaagtttatcgtgaacaaatctgatttgacggaaaaagatattcctgctttggctgatatagttggcgacgaggacaaggctaaagaaattgttgaagcagcaaaggcttcaatgggccaggatctgtcaccagttgatttgatcaatgtccagcaatttgcccaaagggttatgaatctctctgagtatcgcaaaaacctttatgagtatcttgtgactaagatgaatgatattgcacccaacctgacatcgttgattggtgaagtagttggagctcgcctaatctctcatgctggcagtctttcaaaccttgctaagtgtgcagcctccacccttcaaatacttggtgctgagaaggccctattcagagcactgaaaactcgagggaacacaccaaagtatgggcttatattccactcctcctttattggccgtgcttcaactaagaacaagggcagaatggctcgttacctggcaaacaaatgctcgattgcttcacgcattgactgctactcggaggctagcacctctgtctttgggcaaaagttgcgtgagcaagtcgaggagagactggaattctatgacaagggtgttgcgcctcgtaaaaaccttgatgtgatgaaagccgctattgacagcatggtcaatggcacctcaatggatgatgatgatatcgagaagaccgatgcatctcccaagaaaagcaagaaaaagaagaccaaaaccaaggctgatggtgatgcaatggacgtggataaaccctccaacgttgctggtggagaagctgagcctggaactgagaagaagaagaagaaaaagaagcataagctggaggaggaggcacaggaggagaacggtgcagcagatactacccctaag

SEQ ID NO: 22130 - DNA, 2884 bp, Zea mays
  Clone ID: LIB3357-004-F10_FLI
gcaaaaatcgcccgggtgccaggtgcgcggcgcagggaggtcgcgacggattccgggcaagtgcatgtgagatccgatggtggcggctgcagcggcggccggcggcggcgccgacgcgggatgcggaggcggaggcggaggcggagggaaggacgcgctgttcgtggagctgtggaaggcctgcgcggggccgctgtccagcgtgccgctactcggggagaaggtctactacttcccgcagggccacatcgagcaggtggaggcatcgacgaaccatcttgccgagcatcagggcacgcccctctacaacctgccatggaagataccctgcaagctcatgaacatggagctgaaggctgagccggatactgatgaggtgtacgcccagctcaccctgctccctgataagaagcaagatgagaatacatctgcaagagtggagaatgaggaggcagaggaggaggtggtgcctcatgtgccaccagccacaagtgaggggcttcgcatccattccttctgcaagacattgactgcctcagacacaagcacacatggtggtttctcagtgttgcgccggcatgcagatgagtgcctcccaccactggatatgagtcaacatcccccaaatcaagaattggtggccaaggacctgcatggggttgagtggcggttccgtcacatctttcgaggtcagccacggagacacctccttcagagtggttggagtgtttttgttagtgccaagcgtcttgttgcgggggatgcattcatatttctcagaggtgagaatggggagttacgtgttggagttcggcgtgcactgaggcaccaaaccactatcccatcttcggtcatatcaagccacagtatgcatcttggtgttcttgcaacagcatggcatgcagtgaacacggggagtatgttcactgtctactacaaaccaaggactagtccagctgaatttgtggtctcgcgagctaggtactgtgaatcactgaaacgaaattattcaatagggatgaggtttaggatgagatttgaaggtgaagaagcggcagagcaaagattcactggcacaatagttggaatatgtgtttctgatccatctggctgggctgactcaaaatggcgttcccttaaggtgagatgggatgaagcttcttctgttcctcgtcctgaaagagtttctccttggcaaatagaacctgctgttagcccatctcctgtgaaccctcttccagtcagattcaagaggtctcgttcaagtgttaatgcctcaccatctgatgtgtctactgtaaacagagaagttgcttctaaagtcatggtagagtcgcaacaaaataatctcccaagggccttgcacaatcaaggaaggacacaattgacaggtcgataccgtgatagcactgatgtgaagactgctcaggatcttaccatgtggtcttcaggaactgagcaacagagaaacaatattgctgcccagacaaaacgatgtctggagggttggacgcaatctagaactcccgaaggttacaatcaactgttctcggcatttcaaccactgaaggatgcacataatccacttcgtccttttcctaataaaatatctgggactcgctcaagtacctgggtcacagccgatgcccgttatccagctcaacaagccaatcacaacatgttacatggcacattgtcttttatgcctcatagcagtggttttaggatgattcaacagaataatctagtgatgcctgaagctgcaaattttactgggaaatcagctttcacttcagttcagggccatgtcactgatcagtgctccacaggttggtttggacctattgagtcaaattcccacacagaccatgcatcgtcaagtttgatcaggtcccagcctttggttattggaaatgatgttcagaaaaccaaaggcacttcattcaaactatttgggattcctcttggcagtccagaaaaatctgaacctctggtatccccaccaagtgtcgcatatgacgggaaacttcaaacttctccaacagacaacaatgagccttgttcagaagctacccagaatatccagaacaaagtgccaagtagttcaaccagaagctgcaagaaggtccataagcaaggcagcgcccttggcagatcgatcgatctaacaaagttcgcttgctacgatgagctgatcgctgaactggaccagatgtttgacttcgatggtgagctgaagagtccttgcaggaactggttggtcgtctacactgacaacgaaggcgacatgatgctggtcggcgacgacccctggaatgagttctgtgacatggtccacaagatcttcatctacacaagggaggaagtggagaggatgaacccaggcgccctaaactcgaggctcgaagactgcctgtctgagtcgctgggaagagggctggcttccaaagagccccggagcggcccctcgacttcggctgtcgattccgagaactgctaacttgtccagtcagtgagcccttttgaaagtggtgaagcagacaaaaggccacgtgtcagagtgaccggaagaacgagaaaggggtgtgtttcagtggtgtgtagtaggtaggtaattttgtgtgtatgcctccgggtaaaagccccgcggtacccagtttgtagatggtgcttctcctggtgctagtttcccgtcgtaagctggatttttttggggggtgtgtgccctgctctgtgtgctgacccgcctgggggtaagttgtagcagagcaggagaaagcaggcaagaaaccgctggtgcgcctgcttggccaatccttttccttgcggagcgctgtaaatagccttggatctgaagcgtagtaatgtattgtcatggtactcg

SEQ ID NO: 22131 - DNA, 748 bp, Zea mays
  Clone ID: LIB3357-008-A10_FLI
ccgctgttaggttctaccaggagaccttcggcgtccctccggccacgcgagctcgccgaaatggtcgcccacaggttccatcagtaccaggtggtgggtcgcgcgctgccgaccccaaccgatgagcaccccaagatctaccgcatgaagctctgggccaccaacgaggtacttcctgagaaagctcaagaaggtgaagaagagcaatggccagatgcttgccatcaacgagatctttgagcgcaacccgaccaccatcaagaactatggcatctggctgcgctaccagagcaggactggttaccacaacatgtacaaggagtaccgcgacaccaccctgaacggcgcagtggagcagatgtacaacgagatggcctcccgccaccgcgtgaggtccccctgcatacagatcatcaagacagcgacggtccacttcaagctgtgcaagagggacaacaccaagcagttccacaactccgagatcaagttcccgcttgtgtaccgcaaggtcaggccgcctaccaggaagctccggaccactttcaaggcttccaggcccccccttttcatgtgagaggtatatcgtacccgtgttctgtgtcttgagcgcccgagagataaggattcttcctgtgcaagtttttggtgccctgttcgttgagcactttgtttgattccagttaaggatttgaatgatgctgtgtaaaacaatgacttgtctgcaattagttatcaactactgctattt

SEQ ID NO: 22132 - DNA, 665 bp, Zea mays
  Clone ID: LIB3357-008-D11_FLI
cgatccccacagagccagggcgtgcaggcgggcgggcgggcgagcgagcgagaggaaaagccaaggcggcagcagtaggcagccaccatcaataaagaaggtccaagcatgtcgggggtgtgggtgttccggaacggcgtggtgaggctggtggagaacccgacgtcggggaacgcggcggcggcgccgggcaagcgcaaggcgctgctgcacacgccgtccggggaggtggtcacgtcctacgcctcgctggagcgcaagctggcggcgctcggctgggagcgctactacgccggcggcggagacggcggcggcgccggcctgctgcagtaccacaagcgcacctccgtcgacctcatctcgctgcccaaggacttcgcccacttcggctccgtccacatgtacgacatcgtcatcaagaaccgcgacgccttccgcgtcatcgacgcctaattataagctagcggatgcagcagatgacagatactcacctctcctcgctcgctcctcgctccggccagtgcatcatctacctcgctgtagctacctacctaccctaatataatagcagctatagccttcgtcacccattgctcgatcgatttagttgccgtgtcgatctcagtgccgcgttggtctaaattaatatatatagatcatgtact

SEQ ID NO: 22133 - DNA, 870 bp, Zea mays
  Clone ID: LIB3357-008-E7_FLI
ctcgagcaccgcagaaaaagaaaaagaaaagccaaaggcaaaggaatcccaatcaggcaagcaaaaggaagaaccagctgctgcggagtgcggagatgtcgtcgcagctgatcgaggagcaccggtcgggcgcggaggtgcacgtcgggcacgagctgtgcgagcgcaagtcgcgcgagttcatggtggagctgggcctccccgacgggctcctcccgctgcccaggctcgacgaggtgggctacaaccggtcgacggggttcgtgtggctgcggcaggccgccggcctgacccacaccttcgggtccatcggcaagcaggtgtggtacgacagggaggtgacggcgttcgtggagccggggcggatgcacggcctcgccggggtgaagagcaaggagctcctcatctgggtcaccatctccgagatcgtcctcagcccctccggcaccaagatcgtgttccgcacccccgcggggctcggccgcgccttccctgtcaccgccttccagctcgagcccgcggcggccgagggggaccacaaggaggaggccgaggacgccgccgctgccaagtgatctgctctagcttccggcgccggcggccgtgcgtgggctgctcgatccggtagtggcagtggctttgtgagacagtcgagtcgattgtggtttcccctcctccgccccgcagtgtgcgtgtgcgtgtagtggatgatgatgcaggaataaacggtgtccctggatccagaactcaaggtttgattttggggtgatttggtaactctggtctctctgatctgatccatccagtttatctcatgcttgtgtatctctatgtacgcatgtatcggtaatcagattgcattgcctgttt

SEQ ID NO: 22134 - DNA, 792 bp, Zea mays
  Clone ID: LIB3357-009-F4_FLI
ccggcgggcgaaggcctggccctggcccagttcgccgcgggctgcttctggagcgtggagctggtgtaccagcgcctcccaggcgtggcgcgcacggaggtggggtactcgcagggccaccgccacgcccccacctaccgcgacgtctgcggcaacggcacgggccacgccgaggtggtccgcgtgcactacgaccccaacgcctgcccctacgacgtcctcctcgacgtcttctgggccaagcacaaccccaccactctcaacagacagggcaacgacgtcgggacgcagtaccgatcgggcatctactactacacgacagagcaggagacgctggcgcgcgagtcgctggcggcaaagcaaaaggagtggcaggacgccatcgtcaccgaggtcctgccggcgcggcggttctaccccgccgaggagtaccaccagcagtacctcgagaagggcgggcagtccgccaagaagggctgcagcgatcccatccgctgctacggctgagggctgaccgacccccatccggagcaccggagacgccgtgaatgaactgcgctccatcgttgcgttgtactacctccacctccgttttctccaatagttgttgcccgctagtttattttataactaaacgaccataaataaaaaagaacggagagaagatattgtaactaaagtgtaagatgacttttttgtgttgtgtatcgtactactgcttgttcagagatctacgttgatacaaatgatgctttgtgctggaataaacgcatgcatgggtcgtgcagaggc

SEQ ID NO: 22135 - DNA, 3390 bp, Zea mays
  Clone ID: LIB3357-009-H5_FLI
cccaaatttcgaattctccctctcccccacccgcaccgcaccccgctcctccccctctggacgctgacatttcgaattctccctctcccttccccaccgccgccagccgctcttcgccgtcgcgtgcgccatgtcgtcgcggctggacaaggagaaggcggtgaacgtgcaggtcctcctccgctgcaggccgttcagcgacgatgaggtccgaagcaacgcgccgcaggtcatcacctgcaacgactaccagcgggaggtcgccgtcacgcagagcatcgccgggaagcagttcgaccgggtcttcaccttcgacaaggtttttggaccgacagcaaagcagaaggacttgtatgaccaagccattattcctatcgtcaatgaggtcttggagggtttcaattgcaccatatttgcgtacggccagacaggcactggaaaaacatacaccatggaaggcgagtgcaggagggccaagagtgggccaaaaggtcaattacctgctgacgctggagttatacctcgggcagtgaagcaaatctttgatactttggagaggcagaacaccgagtacagtgttaaggtcacgtttcttgagctgtacaatgaggaaattacagatcttcttgcacctgaagagatatctaaggccacatttgaggatagacagaagaaaaccttacctcttatggaggatgggaagggcggagttcttgttcgaggtctagaggaagaaattgtcacgaatgcaagtgaaatattctctctattagaaagggggtctgcaaagcgccgcactgcagagacattactgaacaagcaatccagtcgatcgcactccctgttctcaatcactattcacataaaagaggcaacccctgaaggagaagaactgataaaatgtggaaaactgaatctagttgacttggctgggtctgagaacatctcccgttctggagctaaggagggccgcgcaagggaggctggcgaaatcaataaaagcttgcttactctgggccgtgtgattacggcactggtagaacaccttggtcatgttccttacagggacagcaaactcacaagattgctgcgtgattcattaggaggaagaacaaagacttgcattattgctactgtttcaccctccgtgcattgcctcgaagaaaccttgagtactttggattatgcacaccgggcaaagagcattaagaacagacctgaggtaaatcagaaaatgatgaaatcaacattaattaaagatctttatggtgaaattgatcgacttaaggcagaggtatacgctgctcgagaaaaagttggagtgtacattcctaaagacagatatcagcaggaggaaaatgagcgaaaggcaatggctgatcaaatagaacaaatgaatgcttctttggaagcaaaccagaagctaattagtgacctgcaagaaaagtatgattctgagcttcgacattctgctgatttgagcaaaaagcttgaagtcacggagaaatgtatggaccacacaagcaacctactctctgcgacaaaagaagatctgaaacaggcacagtataatctaaaggagaaagattatataatttccgagcagaaaaaagcagaaaatgctttaacacaccaagcttgtgtgctgagatcagacttggaaaaatatactcgcgataatacttcactgtattcaaaaattgctagaggagacaagctaagtgcaacaaacaggtcggtcgtgaatacattccaaactgaccttgcttcgaagttggatactctttccaatacactcaatgcatcaatagaccagcaaaatatgcacctaaaagctgtggaggatttatgccaatcctgtgttgattcccatgacagggctacttctgagctgaaaaagaagattttggcttcaaaatcattatacatgtcacatatggaagctttccaaaatgttgtcctcctacataaagcaagtgcaaatgccacactagaagatatatcatcactgtctgctacaagctgctgtagtcttgatcagctactagtttgtgttgagggagaggctcaaaatatatttaatgacatccataaattgttaaccacacaccgaagcgaaatgacacacttcactcaacaattaagggagagtttccaaataagcttggacaggacaaaagaaatgtctacctatattattgggctctttgacaagtatgttgaggagacctccaaattgcagagtcactcaaataatactcatgaagcacaaatgaaaagcattgaagattttcagatggtttacgaggagcaatcaaaatcagaggagcagaagcttctagcggacattagcagtttagtgtctaaacatattactcgacagagagagttggtgggagttagattgagctctctgggtgatgctgcccgtggaaacaaggcatttttggatgaacacacatcggccatggagtttgtcacaaaagatgctaagaggaagtgggaaacatttgcagagcaggctgagaatgactgcaaagctggctccagctcttctgcagtcaagcattgccgcatggaaaccatgcttcaggagtgcgcatgcactgttgactccgcagttcagcaatggaagaagtcacatgctgctgtcaacgatctcagcagaaagcaagttgctgaagttgaagcactcgtcaggactgcaattgagaacaatgagcaacatgaagtggaagttgcatcttctcgagctgtggctgaagaagacaccaccaatagcagcaaggacatagcccagggcgttgaaaatctgttggaaaaggcacagaaatctagttcaagagtggtctcaatggtggaggctcacttcgcagagctacagaagctgcaagagagccactccacccaggctaccggtatcaacatgcacgcagacaagtctttccaaaccagttacaaggactacgagccgacgggtgaaactccagtgaggtctgagccgaacgtgccaagcaaaggctcgatcgagtcgcttcgagccatgcccatggagaccttgatgaacgagttccgtgagaaccatccgtatgaatctgaatcgagcaaagaatccaagttatctcagatccctcgcttgccgctcgcgacaatcaactgagacatctcacatcccccgtgtgcagtgtaattttattagtagagcatcaatttggtgtccttgttgtgcacttgtgctaagttaactgcggcgggtgagctgccttggctctccccccagtgcatttccccttcccccagtcaatcatctgtatcattgcgttgtgcgacactgatttttgtagagcatcagaaatttgcccaagaattgcactggagtctgaatgctgc

SEQ ID NO: 22136 - DNA, 1449 bp, Zea mays
  Clone ID: LIB3357-009-H9_FLI
gcacgaacgaagcagcgcgagcgaggagcagacgatccttcccgacctcgaagcctaccccccttccagctgcggccatggcgaccgtcatgcagaagatcaaggacatcgaggacgagatggcaaggacacagaagaataaagccactgctcaccatcttggtcttcttaaggctaaacttgcaaaattgcggcgggagttgctcactccaacatccaaaggtggtggtggtgcaggtgaaggatttgatgtgacgaagagtggagatgcacgtgttggtttagttggctttccttcggttgggaaatcaacattgttgaacaagctaacagggacattttcagaggttgcttcctacgagtttacaactttaacatgtattcctggagttatcatgtataagggtgctaaaatccagcttctagatctcccagggatcatcgaaggtgctaaagatggaaagggcagaggaagacaggttatcagcacagctaggacatgcaatgttattttgattgttcttgatgccataaaaccaataactcacaagcgtcttattgagaaggagcttgaaggatttggcattaggttgaacaaaacaccacccaatttgactttcagaagaaaggacaagggtggaatcaacttcacatcaacagtgacgaacacacatttggaccttgatacagtaaaagcaatctgtagcgagtacaggatacataatgctgatgtctccctgagatatgatgctacagcagatgatctcatagatgttattgaaggaagccggatttacactccttgcgtatatgttgtcaacaagattgatcagataacactcgaggagctggaaatcttggacaaacttccccattactgcccggttagtgctcatcttgaatggaatcttgatggacttctggagaaggtatgggaatacttggatttggttaggatatacacaaaacctaaagggctgaacccagattatgaggatcctgttatcgtatcatctaagaagaaaaccgtggaagatttctgcgacagaatccacaaggacatggtcaaacaatttaaatacgctctggtatggggttccagtgtgaaacataagcctcagagagttggcaaggagcatgagcttgacgatgaggacgtcgttcagatcattaagaaaatataggcgtatcatgtggtggaacaaaacctgttttttctggaaaactgggagcgttgaggattttgttgagtagtagcctcgcgagaagagcttgaactcggcctttgcttgttagtgaggctcatatgtaatgttccctgttcacagaaaatttgctttgatccaaagacaatgtgagtcagcatttacttatatacaacgagtcatgtagctgtgatgtaacttcctctaacttggtgccatgtggactggagtcaccgatgtgtgc

SEQ ID NO: 22137 - DNA, 999 bp, Zea mays
  Clone ID: LIB3357-010-C7_FLI
ggcttccgctgctcttctttctttcctggcatcttggagacggcggcgagacgaggagaggactggaccatggctgcctcttcggctctcaggctaatcctgggctcctcgtcggcgtcgcgtcgccagattctgtccgagatgggatacaaattcacgcttcttagtgcggatatcgatgagaaagcgatcagaaaggagaacccagaggaactggtggtcgccttggctcatgcgaaagcagacgctattctggagaagatgcagaacaatgggatgatgaaagagattcttgattctcaagatactactctgatgataactgctgaccaggttgtgttgcatgatggagtgattagagaaaaacctagcacaccagaagaggcacggaaattcatcaaagggtactctgaaagccatgctgcgacgattggatctgtgcttgttacaaatgtgaagactggagctagaagggaaggatgggataaagcagaagtttatttccacaaaattcctgacgaagttgtggagagtttgatcgaggagggcgatgtgttctatgtcgctggtggtctccttgtggagcaccccttaacttcacctctcgtggaagccattgttggtacaattgatagtgtaatggggctccctaaggcgctcacggagaagctcatcaaggaatccctttcagagacatagctacaatcctatggactgaactgacctgtaatgcagaaatcatattggtggcggactggcggtggctaaatcagtttggcagcaatgtagtgtgagaatcatgtaaccattcctattttccaacaaaaaaggccgtcatgtgatcagcccactatgaacggaattcatccttggcttccatgaccataggtctgctgaatcattcgttttgttttctgtaatgtgttcggccgcaaggatttttaacgcctggcagattgcttgatttgatctatgaattcgtgctaggtgctctgtggt

SEQ ID NO: 22138 - DNA, 532 bp, Zea mays
  Clone ID: LIB3357-010-D10_FLI
gctcgcggccttctctccgtccactcgaaccgcgccgacgagcgacgacaaccgttgctgcattcttcaatggcgactgtgccagttaacccaaaacctttcctgaacaacctgacggggaagcctgtaattgtcaaactcaagtggggtatggagtacaaaggttatcttgcttcggtggactcctatatgaatctccagcttgccaacactgaggagtacattgatgggcaattctctggaaacctgggagagattctgatcaggtgcaacaacgttatgtatctccgaggcgttccagaggatgcagagatagaggatgcagaatgagaagatgtgaatgtaatttgattctgacatgtatgtttgaatatgccggtgacaactagacctatcggatcttagttatgatcagtagggcttgaggtgctgttcaaactgagaaggaatatcacgaattatttgaatgtgaacttgcacgatgtattagacgttatatcaatgcaaaacaatcggctctggttgctgagat

SEQ ID NO: 22139 - DNA, 794 bp, Zea mays
  Clone ID: LIB3357-011-G5_FLI
ctccgatcgacctgctccctccccaccaccgagcccatggcggaccagctcaccgacgaccagatcgccgagttcaaggaggccttcagcctcttcgacaaggacggggatggttgcatcacgaccaaggagctgggcactgtcatgcgctcgctggggcaaaatcctacagaggctgagctccaggacatgatcaacgaggtcgatgctgatggaaacggcaccatcgatttcccagagtttctcaaccttatggctcgcaagatgaaggacaccgactctgaggaagagctcaaggaggccttccgtgtgtttgacaaggaccagaacggcttcatctcggccgccgagctccgccatgtcatgacaaatcttggtgagaagctaactgatgaggaggtggacgagatgatccgtgaggctgatgtcgatggtgatggccagatcaactatgaggagtttgtcaaggtcatgatggccaagtgagccacagaaccataatctgaaggcagagaagattctgcattgcatattagtcaagatgcaactttttattccatcgacttctagtgaaacattctgctagttgtagttgctgaaaatggcaatgtagttcctgctttgttcttccctccagtgtgttttcataactgttgtttcatgtgaacttgtaatgattgccctctctgctgtgtcttgattgcagttaaaatcatatgtagtttcaccccacccacacatcaacttctgtttcacgctgtttgtatcaatggatggcccgttgtttttagtgc

SEQ ID NO: 22140 - DNA, 2178 bp, Zea mays
  Clone ID: LIB3357-011-H9_FLI
ctcgtctcccggccctcccacaaaaaaaaaactgctcggttgctgctcctgctccgccgcgccggcatcatgtgtggcatcttagccgtgctcggttgctccgactggtctcaggcaaagagggctcgcatcctcgcctgctccagaaggttgaagcacaggggccccgactggtcgggcctttaccagcacgagggcaacttcctggcgcagcagcggctcgccgtcgtctccccgctgtccggcgaccagccgctgttcaacgaggaccgcaccgtcgtggtggtggccaatggagagatctacaaccacaagaacgtccggaagcagttcaccggcacacacaacttcagcacgggcagtgactgcgaggtcatcatgcccctgtacgagaagtacggcgagaacttcgtggacatgctggacggggtgttcgcgttcgtgctctacgacacccgcgacaggacctacgtggcggcgcgcgacgccatcggcgtcaacccgctctacatcggctggggcagtgacggttccgtctggatcgcgtccgagatgaaggcgctgaacgaggactgcgtgcgcttcgagatcttcccgccgggccacctctactccagcgccggcggcgggttccggcggtggtacaccccgcactggttccaggagcaggtgccccggacgccgtaccagccgctcgtcctcagagaggccttcgagaaggcggtcatcaagaggctcatgactgacgtcccgttcggggtcctcctctccggcggcctcgactcctcgctagtcgcctccgtcaccaagcgccacctcgtcgagaccgaggccgccgagaagttcggcaccgagctccactcctttgtcgtcggcctcgagggctcccctgacctgaaggccgcacgagaggtcgctgactacctcggaaccatccatcacgagttccacttcaccgtacaggacggcatcgacgcgatcgaggaggtgatctaccacgacgagacgtacgacgtgacgacgatccgggccagcacgcccatgttcctgatggctcgcaagatcaagtcgctgggcgtgaagatggtgctgtccggggagggctccgacgagctcctgggcggctacctctacttccacttcgcccccaacaaggaggagttccacagggagacctgccgcaaggtgaaagccctgcaccagtacgactgcctgcgcgccaacaaggccacgtcggcgtggggcctggaggtccgcgtgccgttcctcgacaaggagttcatcaacgtcgccatgggcatggaccccgaatggaaaatgtacgacaagaacctgggccgcatcgagaagtgggtcatgaggaaggcgttcgacgacgacgagcacccttacctgcccaagcatattctctacaggcagaaagaacagttcagtgacggcgttggctacaactggatcgatggcctcaaatccttcactgaacagcaggtgacggatgagatgatgaacaacgccgcccagatgttcccctacaacacgcccgtcaacaaggaggcctactactaccggatgatattcgagaggctcttccctcaggactcggcgagggagacggtgccgtggggcccgagcatcgcctgcagcacgcccgcggccatcgagtgggtggagcagtggaaggcctccaacgacccctccggccgcttcatctcctcccacgactccgccgccaccgaccacaccggcggtaagccggcggtggccaacggcggcggccacggcgccgcgaacggcacggtcaacggcaaggacgtcgcagtcgcgatcgcggtctgacgagagtacgtgctcgcgcacctccctgctagcttctaccgggctgcagcctgcagcatgcactgtgcgagcacagccgatcagcgccaataaactggaggataagaacgactggtaggtgtgtgtgtgtgtcgtgcgtgcccaccggccatatcccggtgcggcagcacgtgctattgttacgtgttgtactgccgccagcgtacgtgtctgtgtgtctcgatcatatctgtacgtttttagatttagaagaaaaaaaaaaaggcatgtccgtgtctgtatgtctggatcatatctgtacgttcttagatttagaagaaagaagaaaaacattaaaaaaac

SEQ ID NO: 22141 - DNA, 1509 bp, Zea mays
  Clone ID: LIB3357-012-A11_FLI
cagagccccgagcaatcccttctcgcccttttcacttttcagatccagccagccagccagccatcccactccgcaccgcattcctcgcagtggcagagcttgcagcggtggtctcttccccttcctcctgtctcctcctcgctcgatctcctctcccaaacagcgagaagcggatggggagggcgccgtgctgcgagaaggtggggctgaagaaggggaggtggaccaaggaggaggacgaggtcctggcgaggtacatcaaggagcacggggaaggatcgtggaggtcactgcccaagaatgccgggctgctgcggtgcgggaagagctgcaggctgcggtggatcaactacctgagggcggggctcaagagggggaacatctcggaggaggaggaggacatgatcatcaagctccacgccacgcttggcaacaggtggtccctgatcgccggtcacttgcccggtcgaacagacaacgagatcaaaaactactggaactcgcacctgagcaggcgggcggccgacttccgcgacggcgtcgtcgtcgacatcgacctcagcaagctgcccggcggcgggaaacggcgcggcggccgggccagccggggcgccgtcgtggccgcggccaaggagaagaaggccaaggagaaggacgacaggggcaatagcaaggtcgcagaagcggagcagcagctcagggacacggaggacgacgacggcggcagcgtctccacgccgaggcctcagtctgatgactgcggcaccgcccagagcgaagaggagcaagcgcaggccagcgccagcgacctgacatccgatgggcatgggcccgaggaggaggaggaggaggacccgctggctctgagcgaggagatggtgagtgcgcttctggccccggaaagcccaaagctggaggtgggccccgatggctcgtgcatggacagctacagtggccctccgtcaggggaaagcggctgtgggtccagtgggccttctggcgacgtggcccaggacctggacctagacgacgacaaggccatcatggactgggacttgatggggctggacatctcgaccgccggtgacatgtgggaccagctggtgtgggactacgacgaaacgttggtcacggaaccggaaggaggtgaggaagggcaccagcagcaggacgatgtcatgtcagacctcttcttcctggacaatctctaggaggtgcgaggatagcatgggcatggctgccgtgatgctttatgctttttaatttgatccggtacttgtaggtttttgggtgtgttcagttcagagatgagtggcggtgtcagagacgagataaggggagtgctccagtgacatctttgtttgctggccggatctcacgaacccgtagaatggcaagaatgtagaaaaataagcacgcaatatcacttggaaacctttcatcagtagagcctgtctaacatctacagacggagaaatgcaaaaaaaaaaaaaggttgctgggattgcc

SEQ ID NO: 22142 - DNA, 2016 bp, Zea mays
  Clone ID: LIB3357-012-A5_FLI
gatcttcgttcccttcgcctccccattccgtaccgcgtcagatcgcacccctcctccatggcggcgctcagcctccgccagaggcagcttgatctgattgtgcggatgctgcacctcaacaagccaccgccgccgcccggcacggctgcggagcaagaagaggaggtgtacaagatcctggtactggacagcttctgcctctcgctgctctcgccgctgctccgcgtcgccgacctccgcaagcacggggtcaccctctactttcccatcgacaagccccgccagcaggtcgccgacgcccccgccgtgtacttcctccgccccacgcaagccaatgccgaccgcgtcgctgcagatgccgccgcctcgctctacgcatccttccacctcaacttctcctccgccctcccgcgcccgctcctcgaccgcctggccgccgccaccgcagcctccggctctgcccaccgcgtcgcccgcctcgccgaccagtacctcgacttcgtctctctcgaggacaacctcttctccctcgcccacccgcgctcctacgtcgcgctcaacgaccccaaagcggccgacgccgacattgaggccctcgtcgacgcgatcgcgctcggcctcttctgcgcggcggccacgctcggcaccgtgcccgtcatcaggtgcccccgcggtggccccgccgagatggtcgccgccgcccttgacgcccgcctccggcatcacctcctcgccaagcctaacctcttcaccgaggcctcagcctcagcctccgttgcctccttccagcgccccgtgctctgcctcttcgacaggaatttggacctctctgtgggaatacagcacgattggagctaccgccccttggtccatgacgtcctcggcctcaagctcaacaagctcaagatgcccgcggacaagtctggcccggccaaggcctacgatctcgatgattccgatgccttctgggtagcaaacagctggtcgccgttccccagggtggctgaggagatcgagtcgcagctcgccaagtacaagcaggatgtggacgaggtgaaccagcgcaccggtggcaacaaggatggcatcgagttcgatggcacagacctcattggcaacacccagcacctgatgaatgccgttaactcgctcccggagctcacagaacgcaagaagatgatcgacaagcacacgaatatcgcgacagcgttgcttgggcacatcaaggagagatcgctggatggatactgtgactgcgggaacgacatgctcacgaagggcaccgtggacaggagcacgctactgggccttctccgagggaagggcaccaaggcggacaagcttcgtctggctgtgacctacctcctctgtttcgagacgccagagctagagcaggtcgaggcggcgctgcgtgagtcagaagtggacatgtcagcgtttcagtatgtgaagaggatcaaatcgctgaacacgcagtttagtgcctcgtcgtcaagcagtgcaacgaggagcaacattgttgattgggcagagaagctgtatgggcagtccattagcgcagtgacagcaggggtgaagaatctcttgtccagtgggaggcagcttgcattgacgaggacggtcgaagctctcatggaagggaagccgaatccggaggtggacaactatctgctgtttgacccacgtgcccctagatcaggaagcggtgggcagttcaaagggccattcagagaagcaattgtgttcatgattggtggtgggaattacattgagtacaggagcttgatggagctggcagaatgctcgcagccgccttcttccaagcatgtcatatacggagcaactgagattgtcaacggggtggagttcatcgagcaacttgcagaactggggcagaaagcggggctgggtctgggtggtggaaacaaccctccactacagtaattactaataaataagggggggttctttcacatcgtttgaacattgtcagatatgatatgatcatttgcttcc

SEQ ID NO: 22143 - DNA, 1031 bp, Zea mays
  Clone ID: LIB3357-012-D1_FLI
agcaacagcaggggctgcagtgcaaacgactgctagttcccctttccccgcatgatctctgccccttcccctaccttctcttgttcttgcttgcacgacccttttccttgtgcgctagctgccgcttcttcttcgtcttcctggagctccccgcatccacacatgccccaagaaccagacaataaaacaacacggaaccatcggagtctttttctactactatttccagcgattttattatatggatgtgtgcacaggtgcacgtagataggtagaatagaagggagattatagctagctagaggcagcgagcagctcggttgctgggacacgcgatcgagctacagcaaagaagactgcagggtggcgcggcgggcatggaggatctgtacagcatccacccggggatctcgcgccacggggcggcggcgactagcgaggcgtccggggtcgccggtggaccgggctcacccccgcccccgcccccgccggcggcggatctgacggagctggtcaaggcgcagatcgccgggcacccacgctacccgtccctcctctccgcctacatcgactgccgcaaggtgggcgcgccgtcggaggtggccacgctgctggaggagatcggccgggagaggtgcgccgccgcctccgccggcggggaggtcgtcggcatggacccgaagcagatcaacaactggttcatcaaccagcggaagcggcattggaagccgtcggaggacatgcggttcgcgctcatggagggcggcgtcgccggatcctcctccgggacgacgctctacttcgacacgggcaccatcgggccgtgatcacctctgatgacaagccgtttcgaattgagggcaaattgttggttgatacggagattagttacatgaagcaatatccgctgtcattttgtcggattcattgtgtatatgcatgggcgacaacgtgtattgtcgggtacacagtatgtagtggcatgtaaagacaccgtaacaatataacatgaattgtttaattgcctgttg

SEQ ID NO: 22144 - DNA, 969 bp, Zea mays
  Clone ID: LIB3357-013-A11_FLI
cgccgtcgcccgctgccagcgaacacgcacagcacacgccatctacgcacaggcacagcaaccgcaaccgcctgccgctcagtgcgtgccatgaagctggatgtcccggcgaggcagcagagcagccaggacgcagagcagagcggcaagacagtggccgcggccgtcctcggcactgaggcgtggagccacccggagctccctctcctcctccgcgacgccaacaccgacgacgccctggtgccgccgctcaacttcgccatggtcgacgacggcatcttccgctcgggcctcccggacgccgccaacttccgcttcctgctctccctcaacctgcgctccatcgtgtacctgtgcccggagccgtacccggaggagaacgcgcggttcctgcgcacgaacgggatccgccttcaccagttcgccgtcgaagggagcaagagtggtccgacagtgctggataccatgtcggcgcaggaaccattcgtccacatccccgaagaaacgatccgagaggcgctcaaagttgtccttgacgtaagaaaccagccggtcctcatccactgcaagagaggcaagcaccggactggctgcgtcgtcggatgcctgaggaagctgcagaagtggtgcctgtcctccgtgttcgacgagtacctgcacttcgcggcggcgaaggcgaggaccaccgaccagaggttcatggagctgttcgacgcgtcgagcctgatgcacctgacggcggcctcgcagtactgaccactgaccagagcggggcgagtggttcccgagcggtcccgatcctgcgaccatgccgcatcaagcaagccgttttcccctgctgtttccgaagcaactcggcagagaataatgctggaaccatgagtgtgctgtgttgcgtgagtgctgtggttgcttcgtgttcaactggtttcagattctgaactggcacggcctgcattcacttgaatc

SEQ ID NO: 22145 - DNA, 884 bp, Zea mays
  Clone ID: LIB3357-013-A5_FLI
gcagcaacccagcagaagcacaccactccggccggttcgtcgtccgtccctagctagctaggcttggttctgcctgcgcacacgcagataattaagctggtgcgtctcgcggcgtggtggatcggaggagaggtgggacacaggcacccatggcggggctacagaggtcggcgaccacgttcagaaggtccgggtcctcgggcctggtctgggacgagcggttcctgaccgaggccgaggcgaaggcgaagggcggcggtggcgccgccgccgaggacccccagccggagctccggcactcgaggagcgtcgggagcatcggcatgctgctccgtggtggagacagcgacgacggcaataagaaggcgaaggaggtggagaaggcgcgcggcggccatcagcagcgggtgttccggaccaaggacgtggcccccgacatggacccgccctcgccgagggtgtccggctgcatcctctgcgccatcctgggcgggagctctggcggcggcaaggcacgccgccggcccaagcccaagcccaagcccaagcccaggaaggatgtagcgacgacgacggcgtagcatagcagcacgtacgtacgccgcgttgacgcgttgtcttcccgctgtaaaaaaaaaagtttggggtcatggttgtgtgagagtgaacatgtttatacatactggtagcggtaggcagcgtcatatgagcttgctactcgatgtaatgtacaccattttcctcttcttttcttcttcttctttttattagtcaggttagtttcctctctttaatttgggtcggttgtggttttccgctcgaaccagatccatgcagcagctactgagatctgagggggctaattggtcttgttgctaaaaaag

SEQ ID NO: 22146 - DNA, 726 bp, Zea mays
  Clone ID: LIB3357-013-C5_FLI
ctctcgtccccgttgctcggttggattcttcttctctcttcataggaaggaaggattggctaccgagatattcctactagggctgtagtgcagccagtaccagtaccagtaccagtaccccagcagccggtgaggagaggagacagagagagcgagcggaggagagccatggaaggcgacagcttctccggcggcgccatggcgaacggcggcggcggcgggcaggtggtggacgggaagctgatccacacgttccacaggagcttcgtgcaggtgcagagcctgctggaccagaaccggatgctcatcagcgagatcaaccagaaccacgagtcccgcgcgcccgacaacctcacccgcaacgtcggcctcatccgcgagctcaacaacaacatccgccgcgtcgtcggcctctacgccgacctctccgcctccttcgcgcgcaccatggaccacgcgtcctccgagggcgactcctccggcaccggcaccggccgcgccggcgccggcgccggccacaagcgcgtccgccccgcctagctagcttttagtttttttttgtcttcttctgctgggtctagcttggtgtggcaatcctaggtgttgccattgccactaggaggcgtatttagtctttttctcttgcggttcttcttgttcgccttcttcctttgtgctcgctagctgcgacgaacgccggtgattagtgtatggtaatttagtgac

SEQ ID NO: 22147 - DNA, 791 bp, Zea mays
  Clone ID: LIB3357-013-H4_FLI
gtctgcagcccccaactacccccagcctcggaaggaaccttccagaagcgcaagactctaaaggccgtcgccttcccattcttcctcgccgcgggggtcgcctgagatcacataaacaatggtgaaggctgttgctgtgcttggtagcagcgatggtgtcaagggcaccatctttttcacccaagagggagatggccctaccgctgtcaccggaagtgtctctggcctcaagcctggcctccatgggttccatgtacatgcacttggtgacaccaccaatggatgcatgtcaactggaccacactacaatcctgcgagcaaggagcatggggcaccagaagatgagaaccgccatgctggtgatcttggaaacgtgacagctggagcagatggtgttgctaatatcaatgtcaccgacagccagatcccactgactgggccaaactcaatcattggcagagctgttgttgttcacgctgatcctgatgatcttggaaagggtgggcacgagctcagcaagagcactggaaacgccggtggccgtgttgcttgtgggatcattggactccagggctgaaaacgattgccggacttgggggtgcctgagaggtccgtctcctgccgtccccagcagacgagcctgaacattcggagacatcgtgaaataagagcgtcgctgatctgtgatcatcgtatttgtcattatgcacctgtagcaaccgatggactaaacagtgctggattatgctgttggatgacctgagtatgtgttacatgtcggttttgatgac

SEQ ID NO: 22148 - DNA, 1314 bp, Zea mays
  Clone ID: LIB3357-014-C4_FLI
ctggaaccttcccgagagaggatacaaaggcacccggatcgaggaaaccaatccattccattccattccattccacacaaggctaggcacaagcgaaccaaacccatggcgtccgacggcagcggcgtggtgacggtgtacggcagcaacggcgcggagctgctggagccgtccaagcagcccaagtcggcgactttctccgtcaaggtgggtctggcgcagatgctccggggcggggtcatcatggacgtggtgaccccggagcaggcgcggctcgcggaggaggccggcgcgtgcgccgtgatggcgctggagcgggtccccgccgacatccgcgcgcagggcggcgtggcgcgcatgtcggacccgggcctcatccgcgacatcaagcgcgccgtcaccatcccggtcatggccaaggcccgcatcgggcacttcgtggaggcccagatcctggaggccgtgggcgtcgactacgtggacgagagcgaggtgctgacccccgccgacgacgcgcaccacatcaacaagcacaacttccgcgtccccttcgtctgcggctgccgcgacctcggcgaggcgctccgcagggtgcgcgagggcgccgccatgatccgcaccaagggggaggccggcacgggcaacgtcgtcgaggccgtgcgccacgtgcgctccgtcatgggcgacgtccgcgcgctccgcagcatggacgacgacgaggtcttcgcctacgccaagcgcatcgccgcgccctacgacctcgtcatgcagaccaagcagctgggccgcctccccgtcgtgcagttcgccgcggggggtgtcgccacgcccgccgacgccgcgctcatgatgcagctcggatgcgacggcgtcttcgtcggctcgggcatcttcaagagcggcgaccccgcgcgccgcgcccgcgccatcgtccaggcagtcacccactacagcgaccccaccatcctggccgacgtcagcacggggctcggggaggccatggtcggcatcaacctcaacgacccaaaggtggaacgatacgccgccagatccgagtgaaccctttctttccgtagtcatctccatccatccatccatctgccttggattgcatttccgtcgtttcatgtctctcaatcagtaataatggaatgaatgaaatggtaagaaacaaagctattacctatgcagaacctctttaattttgtgctactgtactaagttagcctagtccccacccccaccctggattatcatgtacccaaatgttggatggattgtatgtctgtcactgagccagaccttcttattgct

SEQ ID NO: 22149 - DNA, 1244 bp, Zea mays
  Clone ID: LIB3357-015-D7_FLI
ctccaatctcgccgccaattaatactcgccccctcccttccatccgctcctcccctccccttctcgccaagctcagcgccgaggcatgctgtgagcgagagcgatctgtgcggcgtcagctccggtgatcttggaggcgccgctagcagcttggtgccgcgggctggctggttgtccgtctggccggagctagctacctagctctcgagcgaggagaagagggcgggagccaactgaagtgaagcgaagcgaagcgagatggacctggtgccgcagctggacagcccgcactcggacaacggcggcggcggcggcagcggaagcttggcgtccggggcgctgtcgccgggggcatcgtccgcaggcacggtgtcggcgctggcgtcgccgagccggtacgagtcgcagaagcgccgggactggaacacgttcgggcagtacctgaggaaccaccgcccgccgctgtcccttgcgcgctgcagcggcgcgcacgtgctcgagttcctgcgctacctcgaccagttcggcaagaccaaggtgcacaccgccgcctgccctttcttcggccacccggcgccgccggcgccctgcccgtgcccgctccgccaggcgtggggcagcctcgacgcgctcgtcggcaggctgcgcgccgcctacgaggagaacggcgggcggcccgagaacaaccccttcggcgcgcgcgccgtcagactgtacctccgcgaggtccgcgaccatcagtcccgcgccaggggcgtcagctacgagaagaagaagaagcgaaagaaggccccgccgcaccccgtccctgccgccgtcatctcctcctcccacgacggcaacggacaccactacgagcaccagatgccgccgccaccaccgcccggcgcagcggcttgactagccggccggccccatgtatgctactactaccactgtaccacatgcactactggtcgatctctctagctagctgaagctcctgtcaccgactactatatatggagtacccatctatctatctatagttattggcttcttgctactgtatatctatcgatcgatcgatcgatctgtagttatagtttagcgcgctgccactactagtacaaagacaaaccccctgctgctgctacaaattacttagccggttgctctttcatatgatttgctgctggtattgctactggaactactactgcttcctaattagatcagttgtcgatctgatcattttctagctg

SEQ ID NO: 22150 - DNA, 834 bp, Zea mays
  Clone ID: LIB3357-017-A10_FLI
tcgctccctgcctctgccctctggtcacctcgcttccgctcccggctcccctccggccacccagacatcgtccgttcgctcgccaagagacaggaccggagaccatggcggaccagctcaccgacgaccagatcgccgagttcaaggaggccttcagcctcttcgacaaggacggcgacggttgcatcacaaccaaggagctcggaactgtcatgcgatcactgggtcagaacccaaccgaggctgagctccaggacatgatcaacgaggtcgatgcggacggcaacggcaccatcgacttcccggagttcctcaacctcatggcccgcaagatgaaggacaccgactccgaggaggagctcaaggaggcgttcagggtgttcgacaaggaccagaacggcttcatctctgcggcggagctccgccacgtgatgaccaacctcggcgagaagctgaccgacgaggaggtcgatgagatgatccgcgaggccgacgtcgatggcgatggtcagatcaactacgaggagttcgtcaaggtcatgatggccaagtgagtaaagcctgcggtaacggtatactaccccgcgggaattgaaggaggaaaccaaaccgtgcatcgcatattagaaaggcaatgcaggtcttgtttccttcgtcttccccatgaagaaaccgtactagctgtagctgctgaacgtttgagtccccctgctgccacccttatctccatttgtgtcatcgaaactccttgcttcccctgctgtgtgaatctgtacggctttgcgtgttctggacactgattgcagttgaatccagtttgtagttctatttgtt

SEQ ID NO: 22151 - DNA, 1723 bp, Zea mays
  Clone ID: LIB3357-017-D1_FLI
ttacagtctacagtttacagccatgttactctccggccgccaccactgccaccacaaattcaccccttcttcaccgccggccgccttccgctccacccatctccgctgtctccggccgcttcggtccctagcccttgcatccgccaaccctcctccgccaccgtcgccactaccttccctattcccgtcgccaaggcgtccatggcggtggcggcacagcgccagcgacgttatcgaagaccttcctcctgtcgaggccgatggaaacgacgccgtcaaggtcaagaagagcttctgggcagcggtgagcctcatcatcggcacggcggtcgggccgggcatgctgggcctgccgtccgccaccatccgctccggccaggcgccctccgcggtctgcatcctgctctcgtgggcctacgtggtgtcctccatcgtcctcgtcgcagagctcagcttcgccgccatggcgcgtgacggcgtcgacgaggtcagcttcacgggacttgcgtcgagcaccctgggggcgggccctggcgcggtcgtcgctgtcgtgtacgccgcgctcagcttctccctgctcgtcgcttgcgtcgccggcatcggctcgctcgtctcccagctgttccccggggtgagtccggtcctggccaacgccctgttcccctgcttcgccggcgtcctcatcgccttcttccctttcaaggccgtcgacggcgccaaccgagccctctgtggtctgatgctagtttccattaccgctctcgtggtgactggtgtgtccgtcggtcggaccagcttgctgggatctctcagctacgcgtgctggagccctggcgcgatcctgccggccataccggtgaccgtgctcacgctcgggttccatgtcatcacacccttcatctgcaagatcgtgggagactcggtgtacgacgctcgaaaggcgatactgattgggggcgctgtgccattggccatggtgctgtcatggaatgccgtcattctcgggctggctagtgctggcggcaatgctgggtttgatgaccctatcaaactcctcctctcagtgaatccagccgcgctgcctgctgttcgaggcttcgcttttgctgcactggcgacgagcctgatagggtacgcagtgagctttccgaagcagttggcggacacagtggagctgattcttcagaggttttctcagaagcaaggaagcgtgcaccaagctaatggtagcggtggatatggcagaaatggggcgattcttacatggatggtgctgatcattcccatctttattgcgtcgttcttctcagcagtcttctccaaggcactggattttgctggggtttatgcaaactgcttcctgtttgggattctgcctcctgttatggcctggatccatcggtcacagaagaaaaagagatctcctgattcatgtgaagatattttacctggcgggaatgctgctctgctgatacttttcgctgttgctgttgtcctagcaatctggcactagtagaaggtaagcacaccagggactcattctgtttgtttgccagaccgttcgtcagtgaactgaaagcactgaggtggttagaactttgaggttttgaatgttcatggcatcaatgctttatagttcctctccccgtatcatgattttcttctttgtttgtcctaagttggtcgctaactaactatttacccatttaaatctctctttcgt

SEQ ID NO: 22152 - DNA, 814 bp, Zea mays
  Clone ID: LIB3357-017-D11_FLI
ggaaaaatatccccaaaccctagctcccgatctcgatggcgaaccctcgcgtcttcttcgacatgaccgtcggcggcgccccggcgggccggatcgtgatggagctgtacgccaacgaggtgcccaagaccgcggagaacttccgcgcgctgtgcacgggcgagaagggcgtgggcaagtccgggaagccgctccactacaagggctccaccttccaccgcgtcatccccgagttcatgtgccagggcggcgacttcacccgcggcaacggcaccggcggcgagtccatctacggcgagaagttccccgacgagaagttcgtgcgcaagcacaccgcccccggtgtgctctccatggccaacgccgggcccaacaccaacggctcccagttcttcatctgcaccgtcgcgaccccttggctcgacggcaagcacgtcgtcttcggccaggtcgtcgagggcatggacgtcgtcaaggccatcgagaaggtgggcacccgcaacggctccacctccaaggtggtcaaggtcgctgactgcggacagctctcctagatctctctgatctggtctgttcggccgccctccctccgtcatcgtcgactccccctgcgtccgttcctttggatctgaataagatggtggtgatctgagtggtggtcttagtttatcatgtatcgctcgcagtttaatttagcggtttaggtgtggatctgtgaaccccatggcgcctctgcttgattcgtgtttcacctgttatgttctgagattcatgataatgctatgagaactgaaattcccgtttcatgcttctt

SEQ ID NO: 22153 - DNA, 613 bp, Zea mays
  Clone ID: LIB3357-017-H2_FLI
cttgccgccgccgcccgatccaggtctgtagactgctcactcctctccgctccggtccgaatggcccgcacgaagcagacggcgcgcaagtcgaccggcggcaaggcgccgcggaagcagctggccaccaaggcggcgcgcaagtcggccccggccacggggggcgtgaagaagccgcaccgcttccgccccggcaccgtcgcgctccgcgagatccgcaagtaccagaagagcacggagctgctcatccgcaagctccccttccagcgcctggttcgcgagatcgcgcaggacttcaagacggacctgcggttccagtcgtcggcggtggcggcgctgcaggaggccgcggaggcgtacctggtggggctcttcgaggacaccaacctctgcgccatccacgccaagagggtcaccatcatgcccaaggacatccagctcgcccgccgcatcaggggcgagagggcttgagctgtcgcgctgctgttcgtcgttgtaatgtctgaagaggatggtgggttcatttcatgtcgtgcctttcgtggatgtgttgccctctctgaatggaatgcgactgcccttgtccgaaattaatgaatgcccttgttccttc

SEQ ID NO: 22154 - DNA, 709 bp, Zea mays
  Clone ID: LIB3357-018-E11_FLI
ctttttaaagagaagggaaccaaaagcaggacgagagacgggcagcagcagcggcctgacctgcgcaaaaccccgccgctctcatcttgccaaaaccccaagaagccgcagggggacggaactccctccccagctttttccccagaggaagcaaccgcagaggaggagaagctgcgcagaaggggaagcgccgccacttgctcgcctttgccccttctgtctcccttcgtccgtagcagaccaggaacgcccaaggcgctagcgtctccaagatggtgctgcaaaacgacattgacttactcaatccaccggcagagcttgagaagctaaagcacaagaagaagcggctagtccagtcccccaactccttcttcatggatgtcaagtgccagggctgtttcagcataaccactgtgttcagccactcccagactgtggttgtgtgcccaggctgccaaactgttctgtgccaacctaccggtgggaaggccaggctcaccgaggggtgctccttccgtcgcaagggcgattaggtcctgcttctcttaacgtgagaagagataaatttggtgttttgcaactttctcaggatatgtactcggtgaggattttgttaattattatggctgttagcgtggcctgacaatgcttgtgtaaacctgcactttgtttgagcgtagtgacagctaatatggtgctgtttggcttt

SEQ ID NO: 22155 - DNA, 2283 bp, Zea mays
  Clone ID: LIB3357-018-F2_FLI
ccatcccataccaccccccttcatgtcgtcgccttcctccccgcgcacttgcccctgcatctctccgctgcccaccactccctcgcattaacgacgaaggctcatcatctctgatggaggtaacagtcggctaacacaccgccccgccccgcccctgttgtctgtcccttcattttctagcttagaagagtattcttgttccggtttcttcgttccgtcgagcgcggcattctgtgggtcgtgtggattttggcccgggggacgaggaggaggctggtcaaagatctgtggtcaaaaattgatggtggggttcatggaatgggtgcatgactggttgctgtgggacgccttcctggagtgcggagggatcatgaggccaccgattagatagcggctggggagcgagggaccacaggaggcggaggccgccgttagcaccccccaccaccccgcgccgcgagcaagcagccatgggggaagacctcgtcaccaccctgtccatggagaacggcggcggcggcggcggcggccaccacggcccctgcacgctcctctccatggacccgtccggccacctctccgcgccggacgaccgcgccgtcggcgtcatggtgcagaccctcatcggagggggcgtcggcgccggcgcccgcgcccacgccgtgtcgccctccggcgcgcctccgcccgacatcaaccagccgtggcagaccgacctctgcgacatgctggacgtcggcctcggcccgcaggtctacagcgccgaggccgtgctcagctgcgcccccaaggccgggagccggaaggccgccaagcgcggggacagcatctggggcgcctggttcttcttcaccttctatttcaagcccctgctgtccgacaagtgcaaggacaaggtcgtccgggacaacagcggcggggtctcgggcttcgacaagtccgacctccgccttgatatgttcctggtgcagcacgacatggagaacatgtacatgtgggtgttcaaggagcggccggagaatgctctggggaagatgcagctgaggagctacatgaacggccactcccggcccggggagccgcagttccccttcagcgtcgacagggggtttgtgcggtcgcaccggatgcagcgtaagcactaccgggggctgtcaaacccgcaatgtatccatgggattgaggtggtcaggtcaccaaatcttgtagggctcaccgaggcagaccttaggaggtgggcggacctgactgggagggagctcaatttcatcatcccacaggaagccagtgatttcgggacatggaggaccattccaaattcagagcttgagcttgagaagccacaccctgtcatgaagagcaacggcacccaaaacccaaagaaaacaggcttgaatctgtcgtcaccgtccaatcattcaggcgaagatggtatggatctctctccagttagcagcaagcgtaggaaggaattgtccccacaggccatggatgaggaagtattcttcccactgaattcttgccctcagaagacacaacaagatgtggagatgcactcaccaacgcagcctgctgcgtggctccatgagtttactggggtgatgagaaacgcctgtgggccagtgactgctgccaagtctatctatgaggatgaccagggctacttaataatggtcagcttgccgtttgttgatcagcagagggtgaaggtttcgtggaggaacactctgactcatggcattgtgaagatcgtttgtgttagtactgctaggatgcaacatataaggagacatggcaggatgttcgcgcttgccgatccttccccagagcattgccctcctggtgatttcattcgtgaaatacctctagctactcgtatccctgaagatgctaagctggaggcttgttttgatgaggctgcctcagtgctggagatcatggtcccaaaacgagggaatgaacctgaagaacatgaagttagggtctctctgcgaccccctcactacggagctaatgatctacttttgacctaagctatctctgcaccatgctacatcttctttgtaaccccagattaatgccaaatttagctgagaatcaaggtttcagtatgcttgttctctgcctaatgtttccagtacttgtgccatactatgtctcttcagcgacgaagacttgctgaagactagtttattctagcttctgtgttatgggtgtctttttaaccctcatgtttagattttgtactaagttcagttaaaagaaataatattctgagttgcc

SEQ ID NO: 22156 - DNA, 1795 bp, Zea mays
  Clone ID: LIB3357-018-H12_FLI
ctccgctacgctctcaccacctcctccgacgtctgatcggcatcgccttcgcctccgctaaaatactcgcggtccacgctctcctccaaatcccatcgccacgccttcgcccgcgcgcgtctctccctcccccacactccgccaccagcgccgaagcagagcagccatggccggttacgagcagcgcgtcgtcgccgtcatcatggtcggcggccccaccaaagggacgcggttccggccgctgtcgctgaacgtgcccaagccgctcttccctatcgccggccagcccatggtgcaccaccccatctccgcctgcagccggatccccaacctggcacagatataccttatcgggttctacgacgagcgggaattcgcgctatatgtctcgtctatctccaacgagctcaggatccctgtcaggtacctgcgagaggataagcctcacgggtcagctggagggctctacatctttagagattacatcatggaagacagcccgtcacacatagttctgcttaactgcgacgtctgttctagcttccccctccagacatgctggaggcccataaaaaatatggaggaatgggtactttactagtcaacaaggtatctgcagagtcagctaaccagtttggcgagttggtagctgatcctgaaacaaacgaactgctgcactatacggaaaagccagagacttttgtgagtgatctcataaattgtggagtatatatatttacccccaatatctttagcgccattgaggatgtcttaaaacagaaaaaagacagagcaaatttgcggcgtgtatctagctttgaagctcttcattcagcaaccaaggctcttccaccagactttgttcggttagatcaagacattttatcccctcgagcaggaaagaaagagctgtacacataccagacacttgatttttgggaacagataaaaaccccagggatgtctttgagatgctctggattatatctttctcggttccgccgtacctctcctcatcttttagcctcaggagatggcaaaagaactgccactattgtaggcgatgtgtatatccatccatctgccaaggtgcatcctacttcaaagattggccccaatgtttctatatcagcaaatgcgcgcgttggagctggtgccaggcttatcaattgcataattctagatggtgttgaaattatggaaaatgccgttgttatacattcaattgtggggtggaagtcatccattggaaaatggtcacgtgtacagggcgaaggtgatcaaaatgccaaacttggcattactattcttggtgaagccgttgatgttgaagatgaagtagtgatagttaacagcatcgtgctcccaaataaaactctcaatgtcagtgtccaagaggagatcatcctataatagccgtcattttttgttttatccctaataaggtctgagtaccaatcacatagtttaagtttattcattctcaccatgtaagcttctattagattgagattattgttttgggtttataccttgcagcatgccactgcacaatcttgacttgctgtgctactttgattagcgagtgtggtgtaaaatgtacgaacaactaacacccgagctgctagcttcagattaaagcaagctgttcaaactgccgcagctgtaatccatagagacaaaacactattgaagacttctagcccacaagtgaaattggaagtgtaatcaaatcctaatataattgtcataatcatattgttaaactgtataagtgaattgcctacctttttct

SEQ ID NO: 22157 - DNA, 1364 bp, Zea mays
  Clone ID: LIB3357-018-H5_FLI
cacaaatacacaatcccctcttcggtacctttctccgagtcgtcttcccgtcgatcggcaaagagactttaagcgagagccgctagggttttagcggcttccatttctgagcgagggtttatccgccaggggcggcgcgacgcggcggcagttgagctgggatttccctcccatcccgttcctttccaggcgaggcgatggacgaggcggcggtcgacgacctcatccggcggctcctcgaggcccgcggcgggcgcaccccgcgcaacgcgcaggtgactgatgctgagatccggcgcctctgcgccgccgccaaggatgtgttcctctcccagcccaacctcctggagctcgaggcccccatcaagatatgcggggatgtccatggtcagtattcagaccttcttcgattatttgagtatggtggctatccaccagatgcaaattatctgttcctcggtgactatgttgatagggggaaacagagcatagaaacaatatgccttctcttggcatacaagataaagtacccagaaaacttctttcttctcaggggaaaccatgaatgcgcctcaatcaaccgaatatatgggttttttgatgagtgtaagaggagattcaatgttcgtatctggaagatattcaccgagtgttttaactgcctcccagtggctgcgcttattgatgacaagatcttttgcatgcatggagggttgtctcctgatctaaagagcatggaccaaatacgtaacattcctcgtcctgtggatgttcctgatgttggtctcctatgtgatctgttatggtcggaccctgataaggagattgataggtggggtgagaatgacaggggtgtttcctacacctttggagctgacgtagttgccgagtttcttcagaaacatgatctagatttgatctgcagggcccaccaggtcgtagaggatggttatgaatttttcgcaaaacgccagcttgtaacaatattctcagcaccgaactactgtggagagttcgacaatgctggtgcactgatgagcattgacaactccctagtatgctcgttccagatactcaagccttcagagaagaaaggaaaagcaggaaatgggaacatgccaaagcccggtacacctcccaggaagataaaaataagtgttacccatatttagccaggttctcgctatcaatctgcatttgcgaagttgtgattaagtgctcccccaaacttgtggtaggttttttttttggtgagcttaacacgattttaaactgtggaccatcgtgcctcatgtctttctgatctgaagtctgatgcaaatgtatcctgacattttgccaaccaagagagatcatgctaacat

SEQ ID NO: 22158 - DNA, 1478 bp, Zea mays
  Clone ID: LIB3357-019-D3_FLI
gatcgctccagagtccagaccaccaggagactctctcagacagcataagctcacatcggcaataaaaaagcatccccgtctcccctgattctctccgcccagctcagctcagctccccgccgctcctctccgcgccccttcatcccggatctcggcatgggcaccgccaccaccaacggctcggcggagcaggcgtccgcgcccgtgccggcgctcaagttcctcatctacggccgcacgggctggatcggggggctgctgggcggcctctgcgccgcgcgcgggatccccttcgcctacggcgccggcaggctcgagaaccgcgcccagctcgaggccgacatcgacgccgccgcgcccacccacgtgttcaacgccgcgggcgtcacggggcgccccaacgtcgactggtgcgagacgcaccgcgccgagaccatccgcgccaacgtcgtgggcacgctcacgctcgccgacatctgccggggccgtggggtcctgctcatcaactacgccacgggctgcatcttcgagtacgacgccggccacccgctcggctccggggtcggcttcaaggaggaggacacgcccaacttcgtcggatcattctactccaaaaccaaggccatggtagaggaattgctcaagaactacgagaacgtatgcacccttcgtgtgaggatgcctatctcatcggatctctccaatcctcgcaacttcatcaccaaaatcacccggtacgataaggtcgtcaacatcccgaattcaatgacagtactggacgagctccttcccatctcgatcgaaatggcgaagagaaacctcacgggaatatggaatttcacgaaccccggcgtggtgagccacaacgagatactagagatgtacagagactacatcgatccaggcttctcctggaaaaacttcaacctggaggagcaggcaaaggtcatagtcgcaccgaggagcaacaatgagcttgaccagaccaaactgaagagagagttcccggagcttttgtcgatcaaggagtcgctgataaaatatgttttcgaaccaaactgtaaggcgtccaaggcttgacaagtggaggtgcgcacagctgtatgttgacgctatttgttccaatctgaattgacgttactctctctccgggaactctcaataagcacaccccctgtttcgtgtgcaatgcatttgaaacggttaggtttctcataggaggtgtcatgctgccatactcctttgtactttcagattattgaacggagcagggcaaggtgtaatttagctcagctttcgcattggctcctggcctcctggggcgttatcataccgtgcggttggaatgaactgaggagcttcatgcctgcctgcttctgttgtgccatagaatttgtagttcgtgatgtttcatttgtaaccttttattgaatatgacttttaatgggatccttagcaatacaggacccctgtttcat

SEQ ID NO: 22159 - DNA, 947 bp, Zea mays
  Clone ID: LIB3357-019-E11_FLI
tttactctgatgtacagtatccaaagctagaggaaatgggagagtacacaacctgtgttggtttgacttacagtcagggctgcatatggttcaaagagcggaggagaaaagagaggagggagatgggagccattggtccttagatggaaaggcaatttagtgcactgtaggggatgaaagtaaagttatatcacaagttctgttccccaagaattatatcctgagcaaaattttccgcaaggatgttccacctctgatagtgaatttgaccccctcccccaaaatgcacatggttgtaacagagacactacatgacatcattcctagaaccaaagaactatgaagaagagaaagatcactgagtctactagccagagatctgaagtgtatgtggatacagatcaatgtgagctgcaattttgtgaacgtgtaaagctggcaacaggaacagccgaacaggaccacgtcaatggaagtgggagcagccgccgccggcaagctgaatgcggagctgtttcagtggttggcgttcggccgcgtgatcccgttcatggagtttgccaagcgcctggcggcgaggtggccgcgccgtcaccttcctctccatgcagaggaacgtagccagactcccgcccgtcatggagggcctgcctgcccgagggcgccaagttcacggccgacgtgccgtcggagaagcactgttagcaacaatacaagaaagacgtcagaagctcaccagcactgaagatggagcactgaagatggaaaagctgaccaacaatactgacggtgtcacaccaacgaagcggtagaggcgaggcaacacatgagtatttgggcccgaatgggtcgtgtatttggtcggactggtcggtagtttataagctctctctagtattgtaagaaggtatcgaagaattaatgaacagacaaagacgctggttctc

SEQ ID NO: 22160 - DNA, 703 bp, Zea mays
  Clone ID: LIB3357-019-E8_FLI
caccgccaccgctactgtcgtagtcctagatccgacagcctcacgagctacattccctcgaggccggccttcccggtgtctcagcagcggcggcgcatggcgatggctgcggggcgtgggctcttggccctcttctcggtcgtcgtagtggctgggctcacctctgcggcaaatggtcctttcctgtccgatagcgtcttccagccgagcgccggatctacagggaggagcttactgcaggccaagaacagttgccccgtgaactttgagttccaaaactacacaatcatcacaagcaagtgcaaagggccaaagtttccagccggcccatgctgtgccgcactcaaggagttcgcgtgcccttactatacgtacctcaatgacgagagcaacgactgtgcatcgacaatgttcagctacatcaacctgtatggcaagtatccaccgggcctgttctccagcgagtgcaaagaaggcaagcaggggctctcttgcgcagatgtcctcgagagagacagtgccactgcaagcagtggtcatcacgctcaaatcagcttgcttgcgttgattactgtcttgagtgtggtagtagcgttgttccactgaactatatatgcattctcccaaatatggtgtgttacaactaatgaggtttgaattgcaccttttggtgctcatggtgggattctaggttcttcctttt

SEQ ID NO: 22161 - DNA, 885 bp, Zea mays
  Clone ID: LIB3357-019-F3_FLI
cagaaattgatgattcccccgctttgatctccgtacgtcctgtcatctcatcgatctgcttcgcatccacgcctgagcagactcatggtggcgttcatggcgagcagcggggccatgaaggcgtcgagcaggccaaccttcgtcacccctcgcagcttctttaactggggcaaaagcgcgagagaaaccgagacgccgccgccgcagctgcagttctcctaccacgacgtcgagccaccgttccccatgtcgctcgtggcaaaaacacacctcagagaccgtgagctcaggtgctgctacaaggccaccgtggacggcttcagtgctacggacttccaccggcggtgcgacttcaagggcccctgcgtcgtcgttggctacaccgacggtggcttccgtttcggcgggttcagcccggaggggtaccgaagcacggacgactactacgacacgctggacgcgttcctcttctactgggcggaatctacggaggtctcggcgccgcccgtggtgctgcccaaggtgggcgggagcggcgcggcgctgttcgactactcccgcggcgggccacagttcggcgccgacggcctgctcatcggcccgccgctcaccgccgtgatgggcgtgttcactggacccgactccagcgccggcgtcggcgacctccgcagcgctcgctcgcggcttggcctgtcgtacgcgaggcggccggacgggaaggagagcctgttcggcgacgagggcagggcccagctcgtggaggtgctcgtcttctgcaatccgcagatcgcgagcctgtactgactgctcattgttactagcttgcagctagagtctgtataaactattcattatcgcttaatttggagtctaaaacataccaat

SEQ ID NO: 22162 - DNA, 1758 bp, Zea mays
  Clone ID: LIB3357-021-B1_FLI
gtcggctgccgcagactggtagtagccggcgcgccgtcaccgtatcctcagatcagcggcgagcagataccacaccactctactgacgcccgacgagcagtgtaacattttccttcagccatgggtaaggagaagactcacatcaacattgtggtcattggccatgtcgactctggcaagtcgaccaccactggccacctgatctacaagcttggaggtattgacaagcgagtgattgagaggttcgagaaagaggctgccgagatgaacaagcggtcattcaagtatgcgtgggtgcttgacaagctcaaggctgagcgtgagagaggtattacaattgatattgccctgtggaagttcgagaccaccaagtactactgcactgttattgatgccccgggacaccgtgacttcatcaaaaatatgatcactggcacttcccaagctgactgtgctgttcttatcattgactcaaccactggtggttttgaggctggtatctccaaggatggccagacccgtgagcatgctctccttgctttcacacttggtgtgaagcagatgatttgctgctgcaacaagatggatgctactacacccaagtattcaaaggcccgttatgatgagattgtgaaggaagtctcttcctacctgaagaaggttggatacaaccctgataagatctacttcgttccaatctctggttttgaaggtgacaacatgattgagaggtccaccaaccttgactggtacaagggcccaaccctacttgaggctctggacttgatcaatgagccaaagaggccttcagacaagcccctgcgtctcccccttcaggatgtgtacaagattggtggtattggaactgtccctgttggacgtgttgagactggtgtcattaagcctggtatggttgttacttttgggcctactggtcttactactgaggttaagtccgttgagatgcaccatgaggctctccaggaggcccttcccggtgacaatgttggcttcaacgtgaagaatgttgctgtgaaggatctgaagcgtgggtatgtggcctccaactccaaggatgaccctgccaaggaggctgctagcttcacctcccaggtcatcatcatgaaccaccctggccagattggcaatggctatgccccagttctggactgccacacctcacacattgctgtcaagtttgctgagctcgttaccaagattgataggcgatccggcaaggagctggagaaggagcccaaatttctcaagaacggtgatgctggtatggtgaagatggttcccactaagcccatggtggtggagaccttttctcagtatcctcctcttggtcgatttgctgtccgtgacatgaggcaaacggtggctgtcggagtcatcaagagtgtggagaagaaggacccaactggagccaaggtgacgaaggctgctgccaagaagaaatgatctatctggctggtgacgaaggctgctgccaagaagaaatgatctatctggctggtgctgtgcttgcttgttggttacctcgtggaagcttaaaatatctcgtcttgttgacatccttgcagttgtcgcgtgaacaagtaatctatgatggcaatgtttgcctggtcatgaagtattattactttcgttgaaaccgtgatgctattaagacttaattttttttatggaacatcgaatgtaaggcatacatggttatgagttttgtactacccttgttgcagtgtgttcctgttt

SEQ ID NO: 22163 - DNA, 864 bp, Zea mays
  Clone ID: LIB3357-021-F5_FLI
cagaagcggcggcggcggagcaaacgcaggcgaaggcgagggtgtgagggaaggagcaccagccatggtgcacgtcaacttctaccgcaactatggtaagacgttcaagaaaccaaggcgtccttatgagaaggagcgtcttgatgctgaactgaagctggtcggtgagtatgggctgaggtgcaagcgtgagctttggagggtccagtatgcactgagcaggatccgtaatgctgcaaggcacttgctcacccttgacgagaagaacccccgtcgtatctttgagggtgaggcgcttcttcgccgcatgaaccgctatgggctgcttgctgagggtcagaacaagcttgattatgttcttgccctcaccgctgagaacttcctcgcaaggcggcttcaaacacttgtcttcaaggctggcatggccaagtccattcaccatgctcgtgtcttgatcaagcagcgtcacatcagggttggcaggcaaattgtcaacgtcccatcattcatggtgagggtggagtctgagaagcacattgacttttcactgtcaagcccattcggtggaggccccgcaggaagggtgaagagaaagaatcagaagaaggcaagcggtggcggcgatgctggcgatgaggatgaggagtgaggatggacaagtagcgttacccaatataataatattatctagttttcttgaacttgttcgaatgatgagtgcttagctgtgtgatctgacgcagagttccctgtgctgactctgtgtcatggatggtccattttatcttgtggtattatcagcctttacataactgctatgtttggatatgttcaattctgttgcaattttatgtggttgttttt

SEQ ID NO: 22164 - DNA, 1041 bp, Zea mays
  Clone ID: LIB3357-022-B11_FLI
cgtgtggagcaaggaaggagaggggagccgagcgggcaaaggggagcgcggcgacagacatggcggagcagcacaaggaggagtcgggcgtgacagtgctggacaagatctccgacaagctccacgggcgcgggggcggctcgtcttcgtcgtcggactcggacgacgagcgctcgtcggcgacggccgccgtgaaggccaagatctaccgcatcttcgggcgcgagaagcccgtgcactccgtcctcggcggcggcaagccggccgatctgtttctatggaggaacaagaggatctctggtggggtgctcgcaggcgcaactgccttctggctgctgtttgaggtcatggattaccacctcctcaccctgctatgccactgcctcatcctcaccctggccatcctgttcctctggtccaatgccacgactttcatcaacaagtctcctcctaacatccccgaggtgaagatcccagatgacctggctgtgaatgttgcacgttccctgagatatgagatcaacaggggttttgctaccttgagggagattggccaaggccatgacctcaagaaatttctgattgtgattgcaggactgtggatcctttctgttcttgggagctgctgcaatttcctcaccttgtcttacatagtttttatggtactgtacactgtaccggtcctgtatgagaaacatgaggataaggttgatgcttttggtgagaaggccatggtcgagctgaagaggtactacgccatcttcgacgagaaatgcctatcaaagattccgaagggcccattaaaagacaagaagcaacattagaagcttagaatcagataagggtctgcggtgatttatcatctcttttgaccattattcgtcggttttggtggatggatgtgattccatgtctaaatacctggacgtgctctagtgttttagtgtggtcagtagcaatgttctaaattatctgagattacgctgaatcatgttctgaagtccacgtttaacgttgctctccctatcctttggaagtggc

SEQ ID NO: 22165 - DNA, 874 bp, Zea mays
  Clone ID: LIB3357-022-D12_FLI
cccacccaacccccccctccgccccgcgcttcgcctgggtaccggcgtccgccgcgccccgtcccgtccaggaacaggaagagcagtaacccatccatcggggatcaccaggggagcaagatgtcgactgccgccgccccaagattgcccgctcccagatccggggcaagctatcactatcagacgaccgcggctccggtggccaacaccctctccttcgccggccacgcgaggcaggcggcccgcgcgtccgggccacggctgtccagcaggttcgtggcgtccgcggcggccgtgctgcacaaggtgaagctggtcggcccggacgggacggagcacgagttcgaggcccccgacgacacctacatcctcgaggcggccgagaccgccggggtggagctgcccttctcctgccgcgccgggtcctgctccacctgcgccgggaggatgtcggccggcgaggtcgaccagtcggaggggtccttcctcgacgacggccagatggccgaggggtacctcctcacctgcatctcctaccccaaggcagactgcgtcatccacacccacaaggaggaggacctgtactagagattgggttgctttatgcatcagtggttgttccaaaggtggtggtgactggtgcgttcgttgctattccgtgccaccagcggaaggggggtttcgttgttgagatgggctagttcttgtcatcaatttcggtcattcgatgagatcatgtcatatgagttgtggcaataatgctggcaatatggttttgcaattcaaactgcaaatgtgaccagcaatgtcaaaaactgcacactgtgtctgtgtgcgaacttgtgaaattgacattgagttcaattagctagtt

SEQ ID NO: 22166 - DNA, 1063 bp, Zea mays
  Clone ID: LIB3357-022-F4_FLI
cagatcttgtgaccctccctcagccgcgtcgcgtcgcatcctacgatccaaagctctctctgctcgcaggtcgcagccatggcgaagaactacccgaccgtgagcgccgagtacagcgaggctgtggagaaggccaggcgcaagctccgagccctcatcgccgagaagagctgcgccccgctcatgctccgcctcgcgtggcactccgcggggacgttcgacgtgtcgtcgaggaccggcggtccattcggcacgatgaagcatcagtcggaattggctcacggcgctaacgcggggctggacatcgcggtgcggctgctcgagcccatcaaggaggagttcccaatcctctcttacgccgatttctaccagctcgcgggagttgtggccgtggaggtcaccggtgggcctgagattcccttccaccccggtagggaggacaagcctcagcccccacctgagggccgccttcctgatgccactaagggttctgaccacctgaggcaagtttttggcaagcagatgggcttgagcgatcaggacattgttgccctctctggtggccacaccttgggaaggtgccacaaagagcggtctggtttcgagggggcctggactacaaaccctttggtctttgacaactcttacttcaaggaacttctgagtggtgataaggagggccttcttcagctcccaagtgacaaagccctgctgagcgaccctgttttccgccctcttgtcgagaaatatgctgcggatgagaaggctttctttgatgactacaaagaggcccacctcaagctctccgaactggggtttgctgatgcttaaatagaccctatcttggagtgatacattctgctgcctgtatggaatcatgtggtcttttgcatctggagtcaatgttgtctttctcgtaataaatttgtcgatgttgagcccttaggctgttgttggtacaatggtacttcgtcgatgcttgaatttgggaccctttgttcgttttcctagactctgatgctgtatgcaactgaaacaagtaaatctatgatcttaaggctgc

SEQ ID NO: 22167 - DNA, 677 bp, Zea mays
  Clone ID: LIB3357-023-B7_FLI
ccagattatagcagctagctcaccgtcaccgacatacagtacaatagcagcttattagcttgtgtcagtccatccatccatccatggagaaactcgtctacttcgcgaccattatatccttatccatggcggcgctgctagtgccactccgcgtacagtgcgaagaagcagctagagctgctgctgccagaagctgccatgccggcaccggagcttctgcttctgcaccagccgcagcagcagcgtggaaaaggagctgcggcggcggcaaggcggggaagcagcagccgcaggtggagggcatgttcgtgttcgggagctcgctggtggacaacggcaacaacaactttctcaacggctccggcgtgcgcgcagactacctcccctacggcgtggacttccccctcggcccctccggccgtttctccaacggccgcaacgtcatcgacgcgctcggcgagctcctcggcctccccgggcgcgtcccacccttcgccgacccgcgcacccggcgggcccgcgccgcgctgcgcggcgtcaacttcgcctccggcggctccggcatcctggagcacaccgggcaggtcaccggcaaggtggtgagcctgcggcagcagatcaccaactttgagtcggtgacccttcctgacctgcgggcccagctgcgtggaccagct

SEQ ID NO: 22168 - DNA, 886 bp, Zea mays
  Clone ID: LIB3357-023-C10_FLI
cccaatcacaccagctctctctagagctagccctctcttcctccaacacttgttgatcccctcccatctcctcaagccttcttcactgaatttctggccggtcgatcgtcatgcacagctacagagccatgcacccgtacactcatcactcgtaccagcaccacaccgcggccgttgcgcccaccaagcacggccacggccacggacatggacatggccatggcgacgaggaggacgaccagtccatgctgctcctctccctctggcctcctggccaccaccacggcaacgccgctgcttcatcggcgtgctcgtctcccccgatctgcgccagcgccaccaccacctctatggcagccgctgcctcctcccccgcttcttacccttggctcacccaccaaagcctttacaataatgccggctgcggcggagggagcagcagcagcagccacagtagcttcctgttccaggagcatcagcaggagccaggtgtcagcatctcactgtccatagccccgccgtgcagcaacaacgcggcttcgtcctgtggtggcggtggcttcgctgcaccgccggcggcaccgtcgacggtgacgacgaccgtgacgccgggcgggggccaggttcccagacagtactggatcccctccgccgccgagatcctggtcggctccacgcagttctcctgcgccgtctgcaacaagaccttcaaccgcttcaacaacatgcagatgcacatgtggggccacggttcgcagtaccgcaaggggtcggagtccctgcgcggcgccatcacggtgggcacggctccgccggcgtcgctgatgcggctgccgtgctactgctgcgcggaaggctgccggaacaacatcgagcacccgcgggc

SEQ ID NO: 22169 - DNA, 676 bp, Zea mays
  Clone ID: LIB3357-023-H6_FLI
ctcctcgcattttccttgcaaccgattgcctatccccctcccaaccaaagaccgatggcgcccaaggccgagaagaagcccgcggcgaagaagccggtggaggaggagcccgcggccgagaagacgaccgccgggaagaagcccaaggcggagaagcgggtccccgctggcaagtccgccggcaaggagggcggcgagggcaagcgtggcaagaagaagggcaagaagagcgtggagacgtacaagatctacatcttcaaggtgctgaagcaggtgcacccggacatcggcatctcctccaaggccatgtccatcatgaactccttcatcaacgacatcttcgagaagctggccggcgaggccgccaagctcgcgcgctacaacaagaagcccaccatcacctcccgcgagatccagacctccgtgcgcctcgtgctccccggcgagctcgccaagcacgccgtctctgagggcaccaaggccgtcaccaagttcacctcctcctaggcttgcacgctcgccctttgtaggcttctcttgtgttgatgttcgccttgtgttgtagttagatgttgctggtttctctgtcggcgctgctctgcttctgtaggaactgcgtcatgtaacccagcaaggacttgtttatttgtgaatcatcaacactttgttgttgatc

SEQ ID NO: 22170 - DNA, 1074 bp, Zea mays
  Clone ID: LIB3357-024-A4_FLI
cgggggagcccgctgcacgacctcctcgccgtctccagcttcagcgagtacaccgtcgtggacgtgaaccaggtggtcaaggtcgaccccgccgtgccgcccaagctcgcctgcctcctcagctgcggcgccggcaccggggtaggagcagcgtggaggtctgccaaggtggagccaggatccactgttgcaatctttggccttggatctgtcggtttggcggtggtccaaggcgcgaaaatgtgtggcgcatccaagatcatcggcgttgatctcaaccctgacaaggaggaagtagggagatcgttcggcgtcacagacttcgtcaatccatcgcagctggacaagcgttccgtcgtagaggtgatcgttgagatgaccggcggcggcgtggactacagcttcgagtgcatcggcgtgccgtcggtgatgaccgacgccttcagatgcaccaagatggggaagggcaagacgatcgtgctggggctggggagggacagcgacgaggtgtgcctgccgtcgctggagctgctgttcgggaggtgcgtcatggggtcgctcttcggcgggctgaagcccaagacccacatccccgtcctcgccaagaaatgcatggacaaggagctgcagctggacgcgctggtcacgcatgagcttggactgcaggacatcaacaaggccttcgacctgctcctgcaggggaaaagtctgcgctgcatcctctggatggacaaggacaagtaacggaaggagaggggcggccggaccaatccttcctgtctctgaataaatttgccctgttttttcagcgaggcgtcgctgaaagctggtgttagcggcgaccaagactatctgttcctgaaagccggtgtatcagtatcgtttcgttgtctgaactgattaaatcctaatatcgatagattagactctcccagcaactgctttgtcccctaaataaagtgattcatcatctcttttttacatctagcaatatcctgtaaaaggtccatacgaaacagcgaacccgtctgtcccctagtgtcgttgtggaaatctcacacacgggttatactg

SEQ ID NO: 22171 - DNA, 743 bp, Zea mays
  Clone ID: LIB3357-024-B7_FLI
cccattcctcgcgcggcgaccacccgattcgaagcgtgcggagagaccgaagaagcgggagagatggctcgtaccaagcagactgctcgcaagtccacgggagggaaggctcccaggaagcagcttgccaccaaggctgcccgtaagtctgcccccaccactggtggagtgaagaagcctcaccgctaccgccctggaactgttgccctccgtgagatccgcaagtatcagaagagcactgagctgctgatcaggaagctgcccttccagaggctcgtcagggaaattgcacaggacttcaaaactgatttgcgtttccagagccatgcggtgcttgccctccaggaggctgctgaggcataccttgttggcctgtttgaggacaccaacctgtgcgccatccatgctaagcgtgtgaccatcatgccaaaggacattcagctggcaaggaggatccgcggcgagagggcctaatcgccacctcaaacatcgtgacaaaaacatgaagtcctggggttattgttaatctggtgccattgtaaggacatatgagtagggtttgttttgtggatcgcaagtttctcttctgctactgttgctgctacctttgctggtgttattgctagggtcgaatacttaagttaactatgcgctgacagtctggactagcagtgttatgtgcgctgctggaccttgcgcgcaatgctgtggccgatttgttcgttaatgtcaagaattgtgtt

SEQ ID NO: 22172 - DNA, 684 bp, Zea mays
  Clone ID: LIB3357-024-C11_FLI
ctcgcattttccttgcaaccgattgcctatccccctcccaaccaaagaccgatggcgcccaaggccgagaagaagcccgcggcgaagaagccggtggaggaggagcccgcggccgagaagacgaccgccgggaagaagcccaaggcggagaagcgggtccccgctggcaagtccgccggcaaggagggcggcgagggcaagcgtggcaagaagaagggcaagaagagcgtggagacgtacaagatctacatcttcaaggtgctgaagcaggtgcacccggacatcggcatctcctccaaggccatgtccatcatgaactccttcatcaacgacatcttcgagaagctggccggcgaggccgccaagctcgcgcgctacaacaagaagcccaccatcacctcccgcgagatccagacctccgtgcgcctcgtgctccccggcgagctcgccaagcacgccgtctctgagggcaccaaggccgtcaccaagttcacctcctcctaggcttgcacgctcgccctttgtaggcttctcttgtgttgatgttcgccttgtgttgtagttagatgttgctggtttctctgtcggcgctgctctgcttctgtaggaactgcgtcatgtaacccagcaaggacttgtttatttgtgaatcatcaacactttgttgttgatcacttatgttcc

SEQ ID NO: 22173 - DNA, 2477 bp, Zea mays
  Clone ID: LIB3357-024-H9_FLI
cttccctctcacctcctaaaacctccattgcccgcgcgcacgagcgcccgcgtcgaggactccagctcgtgtgtccgtgcgaacgcgcggttttcttgtcacgaactgtcgctccggtcaggggattgaggaggtggggcggcggcggcggatttgtcgggcccgagattcccggacaaggagaaatgaagtacgtccttgtcaccggcggggtagtgagcggcctgggcaagggcgttacagccagcagcatcggcgtcgtcctgaaggcgtgcggcctccgcattacgtccattaagattgatccttatcttaacactgatgctgggactatgtctccattcgaacatggtgaagtgttcgtactggatgatggtggcgaggtggacttggatcttggtaattacgagagatttttggacattaaacttactcgggacaataatataaccactggaaagatctatcagtctgtaattgacaaggagaggaaaggggaatatttgggaaagactgtccaggttgtgccacacatcacaaatgccatacaggagtggatcgagcgtgttgctaagataccagttgatggcaaggagggacctgctgatgtctgtgtgatagaattggggggcactataggtgatattgaatctatgccatttattgaagctttgggtcagttctcttatcgtgttggtcctggcaacttctgcctggtgcacgtcagtctagttccagttttgaatgttgttggtgaacagaaaacaaagccaacccagcatagtgtacgtggtttgaggggactcgggctcaccccaaatattttagcttgtcgcagtactaaggaattagaggaaaatgtgaaggagaaactctcccagttttgccatgttccggcagcaaatattatcactttgtatgatgtttccaatatctggcgcattcctttgttgctacatgaacaaaaggctcatgaggctattcttaaagttctgaatctggaaaggatggacagcatcgctcgagagccaaagttagacgaatggattgcaagagctactatatttgatacccttcatgacactgtgaggattgctatggttgggaagtacactggcttatcagattcatacctctctgtgttgaaagccctcttgcatgcatctgttgattgccacaggaagcttgttgttgattgggttgcttcaatggatcttgaggactccactgcaattgaggcacctgattcatataaaactgcgtggaatttactgaagggggcaggtggaattttggtacctggtggctttggtgacagaggtgttcaagggaaaattttggctgctaagtatgcccgtgaaaaaaatgtcccatatcttggtatatgtcttgggatgcagatcgctgtggtggagtatgctcgtcatgtcatgaatcttactgatgcgaacagcactgaatttgatccaaataccaagaccccttgtgttatttttatgcctgagggttccaaaacacacatgggtgcgacaatgcgattaggatcaaggaggacatttttcaagattgctgattgcaagtcttctaaattgtatggcaatgtcacttatgttgatgaaaggcatcggcacagatatgaggtgaaccctgatatggttccagagttcgaaaatgctggacttcagtttgttggcaaagatgatactggaaggaggatggagattatcgaaatacccaaccaccgatattttgttggcgcacaattccatcctgagttcaagtcaagaccttcaaaaccttctcccctatttgtggggctaattgcggctgcatctggacagttggatagggtcctgcaagaccgctgcactggtcatgctgtttcagagaaacatgttctgagcaacggctcatatacacccgcaatacaccaaaatgggcacccaaagaagctcccaaatggtctatcaaacggaacatactatggcaatggcaatggcaatggcgtgcatgcttaggagcatcagtggatggatcgaggatttgcaactttttgcttacagatttgcgattcctaatgcatcagttttgtcgtggctggcttgactgactaccatcatggtcgctcgagaaacaaaaagttcctgtgctcgatgtggactgtctggtagggatagtgctcgttcggtggtttctagcgaagcgcgagatagtggtttctgtgttcgccgatctctaccctcttctgtaagcaaatggagcagatttgggtcagaagagtttacatgctgtacatcctaaagaaaagctgaatgttttggttgctcaaattaggttttcagtgaggtctagagctgatgcttagaaatgcgcagcagtgcaagagagtatttcgaaattaagcaagtctgtattttgaatttggatacttttttttgtgcttgtgcgcaaataagttgatgccctgcgcttgcttc

SEQ ID NO: 22174 - DNA, 1586 bp, Zea mays
  Clone ID: LIB3357-025-A11_FLI
gccgtctgccttctgcgcctccatttcggcctctgtcccttgcaagttcagtctcgcctccaaccatgggtaaagagaagtcccacatcaacattgtggttattggccatgtcgactctggcaagtcgaccaccacaggacaccttatctacaagcttggaggcattgacaagcgtgtgatcgagaggtttgagaaggaggctgctgaaatgaacaagcggtccttcaagtacgcctgggtgctcgacaagctcaaggctgagcgtgagagaggtatcaccattgatattgctctgtggaagtttgagaccaccaagtactactgcacggtcattgatgcccctggacaccgtgacttcatcaagaacatgatcactggtacctcccaggctgactgtgctgtccttatcattgactccaccactggtggttttgaggctggtatctccaaggacggccagacccgtgaacatgctctccttgcgttcacccttggagtgaagcagatgatttgctgctgcaacaagatggatgcaaccactcccaaatactccaaggcacgttatgaagagattgtgaaggaagtctcatcctacctcaagaaagttgggtacaaccctgataagattgcctttgttcccatttctggttttgagggcgacaacatgattgagaggtccaccaaccttgactggtacaaaggcccaaccctgcttgaggctcttgaccagatcaccgagcccaagaggccttcagacaagcccctgcgtctgcccctccaggatgtgtacaagattggtggtattggaactgtaccggttggtcgtgtggagactggtgtcatcaagcctggtatggttgtcacctttggtccaactggcctgactaccgaggtgaagtctgttgagatgcaccacgaggcgcttcaggaggctcttccgggtgacaatgttggcttcaacgtgaagaacgttgctgtcaaggatctcaagcgtgggtttgtggcctccaactccaaggatgaccctgccaaggaggctgccagcttcacctcccaggtcatcatcatgaaccaccctgggcagattggcaacggctatgccccagtgctggactgccacacctcccacattgctgtcaagtttgctgagctcattaccaagatcgacaggcggtctggcaaggagcttgagaaggagccaaagttcctgaagaacggtgatgctggtatggtgaagatgataccaaccaagcccatggtggtggagacattctcagcgtatcctcccctcggtaggtttgctgtccgtgacatgaggcagacggttgctgttggagttatcaagagtgtggagaagaaggacccgaccggcgccaaggtgaccaaggcggctgccaagaagaaatgatgcgatcctgcgcctgctttagcaatacctagttttcatcatcacaagttttgtttgtgatcgttgctgttatcgtgtgaactgttgagatctgttagcatgtgcacttttatctatttatttggtaccatcttgctatttcaccttttgcaatacaagaatgctggagtatatgtt

SEQ ID NO: 22175 - DNA, 657 bp, Zea mays
  Clone ID: LIB3357-025-A5_FLI
gcaatctctagcagcagatcctcgtgcaaagcaaagcgctagccttcctactgtcccgatggcccgcacgaagcagacggcgaggaagtccactggcggcaaggcgcctaggaagcagctggccacgaaggcggctcgcaagtctgccccggctaccggcggagtgaagaagccccaccgtttccgccccggcaccgtcgcgctccgggagatccgcaagtaccagaagagcacggagctgctgatccgcaagctgccgttccagcgcctggtgcgtgagatcgcccaggatttcaagaccgaccttcgcttccagagctccgccgtcgccgcgctgcaggaggcgtccgaggcctaccttgtcgggctcttcgaggacaccaacctctgcgccattcacgccaagcgcgtcaccatcatgcccaaggacatccagctcgcccgccgcatccgtggggagagggcctaggcgtcgtcgcggtggaggtggaagtagtagtcgcagtttctgtcatcactgtctggctagaagttgtagagatgtgccggtttatgtagtttgggttattggtcgaatcattatgtagttgggtcttcactgctgtaatttaactatgactatgcaatggcaatgaagttctcggttatcacttcccg

SEQ ID NO: 22176 - DNA, 1600 bp, Zea mays
  Clone ID: LIB3357-025-A6_FLI
cactgcccccccttcggcctttcctctcagtcctctctcgccactccgcctcgccgtccacacccccctctccgtgaaaattgctgagatggccatcgacaaggtggacgccaaggagagggagaagatcgaggccgttcgcaagctgctgtgcaagcaggcgccgctctccgcgaagcaggcgcagtactgcaacgacgcgtgcttggagcggttcctgcggtcgcggggggacagcgtcaagaaggcggcgaagcacctgaggacggtcctctcatggagggagagcgtcggagctgatcacatcatggccgacgagttctccgccgagctcgccgacggcgtggccttcgtctccggccacgacgacgacggccgcccagttgtggtgtttcgaatcaagcaggactaccccaagttccactctcagaaatcgttcgtgcgcctgctggtgttcacgctggaggtggccatggcgtgcatgtcccggttcgtggaccagttcgtcgtcctcttcgacgcaagctttttccgctcggcgtcggctttcctcaacctactcatgggcacgctcaagatcgtcgccgactactaccccggccgcctccaccgcgccttcgtcatcgacccgccctccctcttctccgtcctctggaagggggtgcggccgttcgtggagctggcgccagcgacggcggtggtgtgctccctggacttcgaggactcgctcgaggacgcgtctttcacggcgtacccgcggaccgcgtcgctgcggttcgagccggcggccgtcgtggggaagaacccgggcgtggggtcggtctcgtcgcggttctccgtcacccccaccgacaaccccatcaagccgtggtacctctccaccatccccacctcggtgggctcccgctccgtggtgcccacctccagcagcccgtcgctggtcggcgcgtccccgctctccgcgcgctccttctccttcgcctcgcccgccacgctgcgctccacggtcgccacgcctgcgccgttcccgcgcggcgcgggcgcgcccctgacgccgtcctccgccgccaaggcccagaagaccccgccgccgccgcagcagttcccgcggacgccgcgcccgtcgttcctgcagtcgccgtcgatgctgttcgcgttccggaaggacgggcaggccagccgcgtggagcgcgagcgcgagtccttcctcccgtacctgcgcttctaccgccggccctacgacgagatttcctaccgcgccaagatgcgcccgccgctcggcggcctcatatccatcgtcggcgacaagttcaggcagaagccggtgccgcagccgcagccgcagccgctgcgtcgccacgctgggctccacctccaccaccagcaccattaccagcagcagcagaggatctgattctcgtctcgtcgctgcatggcgaccagagaatttttctccatacaccatagatccgatgctatattatgccaagttaatcttttgccaactttttttcccctccagtgcttagtgcctatgatattcttgaagccatgtataataacatcccgaaaaatgtgagtaaaatcgacccctttctgc

SEQ ID NO: 22177 - DNA, 802 bp, Zea mays
  Clone ID: LIB3357-025-C6_FLI
aaaaatatccccaaaccctagctcccgatctcgatggcgaaccctcgcgtcttcttcgacatgaccgtcggcggcgccccggcgggccggatcgtgatggagctgtacgccaacgaggtgcccaagaccgcggagaacttccgcgcgctgtgcacgggcgagaagggcgtgggcaagtccgggaagccgctccactacaagggctccaccttccaccgcgtcatccccgagttcatgtgccagggcggcgacttcacccgcggcaacggcaccggcggcgagtccatctacggcgagaagttccccgacgagaagttcgtgcgcaagcacaccgcccccggtgtgctctccatggccaacgccgggcccaacaccaacggctcccagttcttcatctgcaccgtcgcgaccccttggctcgacggcaagcacgtcgtcttcggccaggtcgtcgagggcatggacgtcgtcaaggccatcgagaaggtgggcacccgcaacggctccacctccaaggtggtcaaggtcgctgactgcggacagctctcctagatctctctgatctggtctgttcggccgccctccctccgtcatcgtcgactccccctgcgtccgttcctttggatctgaataagatggtggtgatctgagtggtggtcttagtttatcatgtatcgctcgcagtttaatttagcggtttaggtgtggatctgtgaaccccatggcgcctctgcttgattcgtgtttcacctgttatgttctgagattcatgataatgctatgagaactgaaattcccgttt

SEQ ID NO: 22178 - DNA, 905 bp, Zea mays
  Clone ID: LIB3357-025-E12_FLI
ctcgggtcaaaccctaagcagggagttgatttatccgctgcagccatgagtaagttgcagtctgagtctgtcaaggatgccatctcccagattgttggggatgccaaggagaagaataggaagttcactgagactgtggaacttcagattggtctgaagaattatgatccacagaaggacaagcgtttcagtggctctgttaagttgccccatatccctcgtcccaagatgaaggtgtgcatgcttggtgatgcccagcatgttgaggaggccgagaagatgggacttgactacatggatgttgaggctctcaagaaaatgaacaagaacaagaagcttgttaagaggcttgccaagaagtaccatgctttcttggcatcagaggccatcatcaagcagattccccgtctccttggtcctggtctcaacaaggcaggcaagttcccgaccctggttactcaccaggaatccctcgaatccaaggtgaacgagactaaggcaaccgtcaagttccagctcaagaaggtcctttgcatgggcgtcgccgtcggcaacttggcgatggaggagaagcagatccagcagaacatccagatgagcgtgaacttccttgtttcccttctgaagaagaactggcagaatgtgagatgcctctacgtcaagagcaccatggggaagccatacagggtgttctaagtatgctcttttgtgaagtctgctaggttctggcaccgaggttttattgaattaaactcttgttaaggatatgtttttggacgatcctatatttcgtcctggcgctactatgtttcagaatggtggtactactataagtatcctggcgctctaagtattgcttgaaaggatcaatataatttgcgtgtcatacccacaaccttttctgc

SEQ ID NO: 22179 - DNA, 350 bp, Zea mays
  Clone ID: LIB3357-025-F1_FLI
ctctgacggtcttgccagtttgccactacaaataagccgcaccgcatttcggaagaccacgcgaccgccacctccccgaagctgccgcgaccgatcgagcgtcgctccccgcgccgccgccaaaaccctagcttctcctactccatggccactgtctcgctcaccccgcaggctgtcttctccacggagtccggtggcgccctggcctctgctaccatcctccgctttccgccaaactttgtccgccagcttagcaccaaggcacgccgcaactgcagcaacatcggcgtcgcgcagatcgtcgccgccgcgtggtccgactgccccgccgctcgcccccacttaggcgg

SEQ ID NO: 22180 - DNA, 887 bp, Zea mays
  Clone ID: LIB3357-025-G6_FLI
gcaagcccatcggggcccctctagagcgcattagcactaggttttcccatctcttaaggctgccaccgccagcgccgccccctcggtgcatcctcagtgcgtacgaaggcgaccattcctccttcgctccttcgccgccgctatggttaagtactcgcaggagccgggcaaccctaccaaatcggccaaggccatgggaagggacctgagggtccacttcaagaacacaagggagacagcttttgcgcttcgcaagctgcctttgaccaaggctaagcgataccttgaggatgttattgctcacaagcaggcaattcccttccggagatactgtggaggtgttggtcgcaccgcacaagcaaagtctcgccactccaatgggcagggtcgctggcctgttaagtcagccaggttcatattggatttgctgaagaatgctgagagtaatgctgatgtgaaaggcttggacgtggacaacctctatgtttcacacatccaggtgaaccaagcccagaagcagaggcgccgcacctaccgtgctcacggacgcattaacccttacatgtcctccccttgccacattgagctgattctgtcagagaaggaagagcctgtgaagaaagaggctgacaacattgtcgcggcaaggaagcagtgaagtatgttagcctgctgataatggcatcctgtcgaagcattatagccttagctctttcatgtaccttttcaggctggtaccgataccgtggatctggatttgctatgttttgtactgtggtcgagtgtaaggtcagttcgtaatacaatcaatctgcgtggaacaatttgatatgcttgaatatgctagtgagatcatttcgacaatgaaagttgagaacagaagttac

SEQ ID NO: 22181 - DNA, 1452 bp, Zea mays
  Clone ID: LIB3357-027-C11_FLI
gcaaaccgcaatcgcacgcggcacttgcccccgcgatcataacctcacaccgcccgccaccagctgcgcagcgctcgacagcctcaccagccgccatcactcgcggcagtacacggccgctgggactgggagagtgggagtgagacgctgctgttgccgagtgcgaggagacactactactcactctcaagactcgagagcagcaggggcgaccgagctctgcgtgcgtggggagaaccggagaaggcagcagaggagaggagggagggagcgcgtggacgggctaggcgcagcagcatgggcgccgggatcagggtcctggcggcgctcttggcggcgctcgcggcagccaccgccggcgtgacggcgcagctgcggcaggactactacgcggcggtgtgcccggacctggagagcatcgtgcgcgccgcggtgtccaagaaggtgcaggcgcagcccgtcgccgtgggcgccaccatccgcctcttcttccacgactgcttcgtcgagggctgcgacgcgtcggtgatcctggtgtccacggggaacaacacggcggagaaggaccacccgagcaacctctccctggccggcgacggcttcgacaccgtcatccaggccaaggcggccgtcgacgccgtgccggcgtgcgccaaccaggtgtcgtgcgccgacatcctggcgctggccacccgggacgtcattgagctggctggcgggccgtcgtacgcggtggagctggggaggctggacgggctggtgtccatgtccaccaacgtcgacggcaagctgccgccgccgtccttcaacctggaccagctcacgagcattttcgccctcaacaacctgtcgcaggccgacatgattgctttatctgcggcgcacacggtggggttcgcgcactgcagcacgttctcggaccggatccagccgcagtcggtggacccgacgatgaacgcgacgtacgcggaggacctgcaggcggcgtgcccggcgggggtggaccccaacatcgcgctgcagctggaccccgtgacgccgcaggccttcgacaaccagtacttcgccaacctggtggacggccgggggctcttcgcctccgaccaggtgctcttctccgacgcgcggtcgcagcccaccgtggtggcgtgggcgcagaacgccaccgccttcgagcaggccttcgtcgacgccatcaccaggctcggccgcgtcggcgtcaagaccgacccgtcgctgggggacgtccgccgcgactgcgccttcctcaactgaaaaaggatggagacctggtttagagaaatttgccattatgaaacacggtgcgggcggcttccacgaaatggaggctaaggagagggattcgctgttatgaaaaggcagagcaaagcctacactctgaaatggacatgaagcctccgttaataagttcagaccggtatcagtgtcgtt

SEQ ID NO: 22182 - DNA, 969 bp, Zea mays
  Clone ID: LIB3357-027-C2_FLI
tggccgtcgtctcccgttcggaacgccaagccccccctccggcgaaatggcccccaagcgaggtggcagggcgccggtgccggccaagaagaagacggataaagtgacgaaccctctattcgagaagaggccgaagcagttcggcatcggcggcgcgttgccgcccaagaaggacctgcaccggttcgtcaagtggcccaaggtcgtgcgtatccagcggcagcgccgcatcctcaagcagcgcctcaaggtaccaccggcgctcaaccagttcacccgcaccctcgacaagaacctcgctacgaacctttttaagatgcttctcaagtaccggcctgaagacaaggctgccaagaaggagaggcttctgaagagggcccaagctgagaatgaaggaaaaactgttgagtcgaagaaaccaattgttgtgaagtatggccttaaccatgtgacttacctcattgagcagaacaaggctcagcttgttgtcatcgctcatgacgtggatccgattgaactggttgtgtggcttccagccctgtgtaggaagatggaggtcccttactgcattgttaaaggaaaggctcgtcttggatcgattgttcacaagaagaatgcatcagtcttgtgtcttaccactgtcaagaacgaggataagcttgagttcagcaagatcttggaggctattaaggcaaacttcaacgacaagttcgatgaggtcaggaagaagtggggaggtggcatcatgggatccaagtcgcaggccaagaccaaggcccgggaaaagctgctcgccaaggaggctgcgcagcggatgacctagattgtctactgctgtgtctgccctgtagtttgacggggaagaactgatgaactcgtattgtggttttccgaatctagtttcatatgtttctgtccaccagaccatgtttagaagctttgcaagacagagtttacagtgtttatgtg

SEQ ID NO: 22183 - DNA, 526 bp, Zea mays
  Clone ID: LIB3357-027-E2_FLI
cacgattctcctcctccgtccgcgtagctctcggtttcggcgatgtcggggcgcggcaagggcggcaaggggctgggcaagggcggcgccaagcgccaccgcaaggtgctgcgcgacaacatccagggcatcacgaagccggcgatccgtaggctggccaggaggggcggcgtcaagcgcatttctgggctcatctacgaggagacccgcggcgtgctcaagatcttcctcgagaacgtcatccgcgacgccgtcacctacaccgagcacgcccgccgcaagaccgtcaccgccatggatgtcgtctacgcgctcaagcgccagggccgcacgctctacggcttcggcggctaggccgcctccccttctgatgctttgatgtgacggccgtggtcggttgtgtgtctagttggccggtctactgtagtttgttctgtatcttcgtttcgaggtgttccagtttctagcccatttggtgtaatattttcactgctattatcaatggaaagccctcggttctatcccc

SEQ ID NO: 22184 - DNA, 898 bp, Zea mays
  Clone ID: LIB3357-027-H3_FLI
ctagcttgcccagccccgccgggccatgggcaaatacatgcgcaaggtaaaggtttccagcgaggttgccatcatggatgtcgccgctgctccgctcggggtccgcacccgcgcgcgcgccctcgcgctgcagcgccttgagaagcagcaggtgcagcaggaggagggctgcggcggtgagtacctggagctaaggagccggaggctcgagaagctgccgccgcaggtggcgtccgtgaggaggtgcggcgggaggaaggtggcggccacggcccccgccgctatggaggaggcggaagcatcgtacggggagaacatgctcgagtcggaggccatggggaggaataccagggagacgacgccctgcagcttgattaactctgagatgatcagcactcccggatccacaacaagatccagccactcttcccaccgcagggtgaaagctcctcctgtgcacgccatcccaagttcaacggagatgaacgagtacttcgctgctgaacagcgacgccaacaacaggctttcattgacaagtacaactttgatcctgtaaatgactgccctctcccaggcaggtttgaatgggtgaagctagactgatagattcagaggacatgagagcagcagcatggaactcacctccgctccctccaccgccgcagcgtcgtggcagaggcgcataccgtcgtgttagctttgtttctgttgtaaaacttagcgttagcttgtagccttaattgtcgcgtgtcacagtacagaactgatgctgagttacagcaccctgatatgatctggtccctcaactccaatgtaacccttaacagctcattctgtaaggaacctatcatcctgttaccagttgccgaattaatgaagtagagctagtagggatgt

SEQ ID NO: 22185 - DNA, 1060 bp, Zea mays
  Clone ID: LIB3357-028-B10_FLI
cctctctgtcgcccgctacgtcgctgacacaccacaccgctttgaggggggcttgcagctggagcatctctgttccgagttccttcctctttcctccaaggcaagggtcctccaacttccgctccctgtttctctacagatccgtctctcctctcggcattcgtcgtcgtcgtcgtcgtcgtcgtcgtcgtcgcgtgaacctccatggctggtaaagctgctgcagacactgggagcaacgaccgagtcgttgaggttgaggggtcctcctcctcctcctccatggcggacgtgtacaaaggcgagctcacgccgctgcagaggcacgtcgccttcttcgaccgcaacaaggacggcgtcatctacccctccgagacataccaagggttccgagctatcgggtgtggcgtcgccctgtctgctgctgctgccgtcttcgtcaacggtggacttggacccaagaccgtactggagaacgagaagcctgcgcctttcaagttccccatctacgtgaagaacatccacaggggcaagcacggcagcgattcgggcgtctacgattccaacggaagatttgttcctgaaaagtttgaggagattttcaagaagtatgcccaaacgaggcctgatgcccttacaggcaaagagctacaggagatgatgaaagcaaacagagaacccaaggacttgaaaggatggctgggtggcttcacagagtggaaggtgctgtactccctgtgcaaagacaaggacgggtttctccacaaagacactgtcagggcggtctacgatggcagcctgtttgaaaggttggagcaagagaggaactcaaagaaagagtcgagtaagaagaaatgatgagaaatccagacgctcttatgtggacgagtttgcaagtcacgctgtgcgtgtggttgggtactatcataatttgatttattctatatgtttgtcgattcacataacgatattgcaagtatttgtcgaacgtgtttgaattagcaagacatatagctgtgagctttgatagcctcccatattttttcagttcatattttac

SEQ ID NO: 22186 - DNA, 687 bp, Zea mays
  Clone ID: LIB3357-028-C4_FLI
gctcgcatttcctcccaatccatcccgcctccaaacccgaactccaagtcgccccgcatcgatggcgcccaaggccgagaagaagcccgcggcgaagaagccggcggaggaggagcccgctgccgagaaggcgccggccgggaagaagcccaaggcggagaagcgtgtcccagcaggcaagtccgccggcaaggagggcggcgagggaaagaggggccggaagaagggcaagaagagcgtggagacctacaagatctacatcttcaaggtgctgaagcaggtgcacccggacatcggcatctcctctaaggccatgtccatcatgaactccttcatcaacgacatcttcgagaagctcgccgccgaggccgccaagctcgcgcggtacaacaagaagcccaccatcacctcccgtgagatccagacctccgtgcgcctcgtcctccccggggagctcgccaagcacgccgtctccgagggcaccaaggccgtcaccaagttcacctcgtcctaggctgcgtggcctccgcttgcaggcttccctcgtatgttcgcgtgtcttgctgtagttaggtgctgctgtgtctggtctcctccggtagcaactgttatctgatggaacagtaacaatgcttattgaatccagctagttgcttatttgtggatcctctctctttgttgttggcc

SEQ ID NO: 22187 - DNA, 1595 bp, Zea mays
  Clone ID: LIB3357-028-E4_FLI
cgtcttcgtactcgcctatctccgcgactcaaagcttcttccatttcctaccgccgccgctgcagctccaccccattccgtcgacaccatgagggagtgcatctcgatccacatcggccaagccggtatccaggtcggaaacgcgtgctgggagctctactgcctcgagcatggcattcaggccgatggtcagatgcccggtgacaagaccattgggggtggtgatgatgctttcaacaccttcttcagtgagactggtgctgggaagcacgtccctcgtgctgtttttgttgaccttgaaccaactgtcatcgatgaggtgaggactggcacctaccgccagctcttccaccctgagcagcttatcagtggcaaggaggatgcagccaacaacttcgcccgtggtcactacaccattggcaaggagattgttgacctgtgccttgatcgcatcaggaagcttgccgacaactgcactggtctccagggcttcctcgtcttcaacgctgttggcggaggaacaggctctggccttggttccctcctcctggagcgtctgtctgttgactacggcaagaagtccaagcttggtttcactgtgtacccatccccccaagtttcgacctcagtggttgagccatacaacagtgtcctgtccacccactccctcctcgagcacactgatgtggctatcctgctggacaacgaggccatctatgacatctgccgccgttcccttgacattgagcgcccaacctacaccaacctcaacaggcttgtgtcccaggtcatctcatccctgactgcctccctgaggttcgatggtgctcttaacgtggatgtgaatgagttccagaccaacttggtgccctacccgaggatccacttcatgctttcctcctatgctccagtcatctctgctgagaaggcctaccacgagcagctgtctgtggccgagatcaccaacagcgccttcgagccatcctccatgatggccaagtgcgatccccgccatggtaagtacatggcctgctgcctcatgtaccgtggtgatgtggtccccaaggatgtgaatgctgctgtggccaccatcaagaccaagcgcaccatccagtttgtggactggtgcccaactggctttaagtgcggcattaactaccagcctccaagtgtggtgcctggtggtgacctggccaaggtgcagcgcgctgtgtgcatgatctccaactccaccagtgttgtggaggtgttctcccgcatcgaccacaagttcgacctcatgtacgccaagcgtgccttcgtgcactggtatgtcggtgagggtatggaggagggcgagttctctgaggcccgtgaggatctggcagcgctcgagaaggactacgaggaggttggtgctgagtttgatgagggtgaggaaggtgatgatggtgatgagtactagaagtatcctgatgcggtcatcgtcaggcttgtgtgctgctcttgtccccgttgtggtttgcaacacctgatgttgtaagactttctggttatgtccgccccgctgtgccactgggttattaagaacgtcgttatggatggttgtctacact

SEQ ID NO: 22188 - DNA, 704 bp, Zea mays
  Clone ID: LIB3357-028-G2_FLI
gcgaaaccctagcccaaactcgaccgcctctgctataagtagctccactctctctcctccaagcctaccccagccgccgccgccgccaccgccacctgccccagcgcgccgccgccgcagccaccatgggtcgcgtccgcaccaagaccgtgaagaagacctccaggcaggtgatcgagaagtactactcccgcatgaccctcgacttccacaccaacaagaaggtgctcgaggaggtctcgattctgccctcgaagcgcctccgcaacaaggtggctggcttcagtacccacctgatgcgccgcatccagcgcggcccagtccgcggcatctcgctcaagctgcaggaggaggagcgcgagcgccgcatggacttcgtgccggagaagtccgcgctcgaggtcgaagagatccgcgtcgacaaggagaccatggagatgctcgctgccctcggcatggccgacctgcccggcgttgagcgccaggctgaggtctccaacgcccccgcctacggccgcccgcagtacggtggtccccgccgtgaccgcgtttagacttcgcggtggttgcctcttgatcgcactgctattcgtagttgttgtcctactatgctaaacttcttttagatctttggttgcatctgtggcggttaagttttgaacttgcctgttatggtataaattctgaagtgtttggttcaaaag

SEQ ID NO: 22189 - DNA, 811 bp, Zea mays
  Clone ID: LIB3357-028-G8_FLI
gagagaaggaaaaatatccccaaaccctagctcccgatctcgatggcgaaccctcgcgtcttcttcgacatgaccgtcggcggcgccccggcgggccggatcgtgatggagctgtacgccaacgaggtgcccaagaccgcggagaacttccgcgcgctgtgcacgggcgagaagggcgtgggcaagtccgggaagccgctccactacaagggctccaccttccaccgcgtcatccccgagttcatgtgccagggcggcgacttcacccgcggcaacggcaccggcggcgagtccatctacggcgagaagttccccgacgagaagttcgtgcgcaagcacaccgcccccggtgtgctctccatggccaacgccgggcccaacaccaacggctcccagttcttcatctgcaccgtcgcgaccccttggctcgacggcaagcacgtcgtcttcggccaggtcgtcgagggcatggacgtcgtcaaggccatcgagaaggtgggcacccgcaacggctccacctccaaggtggtcaaggtcgctgactgcggacagctctcctagatctctctgatctggtctgttcggccgccctccctccgtcatcgtcgactccccctgcgtccgttcctttggatctgaataagatggtggtgatctgagtggtggtcttagtttatcatgtatcgctcgcagtttaatttagcggtttaggtgtggatctgtgaaccccatggcgcctctgcttgattcgtgtttcacctgttatgttctgagattcatgataatgctatgagaactgaaattcccgttt

SEQ ID NO: 22190 - DNA, 667 bp, Zea mays
  Clone ID: LIB3357-029-E7_FLI
gtcaaaatccagcacaagctcacatcacaagctctctgctgccccccaccagcaaagcaaggccctcgagtgaccggggcagcgatcgagcggcttcccaaccaggcaacaagggcgacgaaggacgatatggacaggctgaacgcgaagctgtacctgcacaactgcttcatcatgaaggagaacgagcggctgcgcaacaaggctctgctgctcaaccaggagaaccaggccttgctcaccgagctcaagcagcgcgtcgccagaacggcggcggcggcggcagcggcaggcaaccgcgcgccaacgatcccggacctcaatgccgccgctcctgcaggggtgcacgagaagccggcggcgtcgcccaagccaaagaaggcggtcgcaaactgacgcgcgcggcttaattaactagttctaggcaccagctatatatataagtttgtagttatcatgcattattaccggtcttctggatgcgtgtcaaggacgtctgcgcctagttttagctaatgctggctaatggaaaaattgcattgcatgcctgagcgagtgctgatctctgcagggatagctagatcatgtagtgtaggttgtctaagcgcatgcagtgcgaaaatatcaaatagcccagcgacaaaacaatggaacagggcaatcagac

SEQ ID NO: 22191 - DNA, 630 bp, Zea mays
  Clone ID: LIB3357-029-G8_FLI
ctcgttatcccgcattcgtctatggcggctgcactgggcgccgtgctccggcggctgcatacggcggcggcgcagccccctcgcctgacgaaattcgcgctgcacccgcccaaattcgttgaaatcgaattcgctgatggtagctcatttcacctgtcagcagaatttctcagagtatacagcccagcagctgatagcaaaatccgatcagtgggcggtgaaaaggttatatttggacgacgacatgttgggataatgtcagctgaatcagtaggaaactacggagtccggatactctttgatgacttgcacaagacagggatcttcacatgggattacttgcaccatctcggttcaaacaaattcagtctgatgagaaattacatcagaactttgagaaagcatggtcttagtcgcgaaccccagagaaggaaatgatggagcaacagtctctagacagcctcgcttcttggcgcatggatcgatccatcaggcttgcctgccatgtaacaaagagatgctcaattgaatatttgagatgtgaacgcataacgcaaggatatccattaactagtgatccacagtgactgtgatgggaaagactgaataaaagtactaaaacgttcattt

SEQ ID NO: 22192 - DNA, 728 bp, Zea mays
  Clone ID: LIB3357-029-H2_FLI
gcacggcccggcgtgccccttcttcggccacccgaacccgccggcgccgtgcccctgcccgctccgccaggcctggggcagcctcgacgccctcgtgggccgcctccgcgccgcctacgaggagaacggaggccgcccagagtccaatcccttcgccgcgcgcgccgtacgcctctacctctgcgaggtccgcgagcaccaggcccgcgcccgcggcgtcagctacgagaagaagaagcgcaggaagccgcagcagctgccgggcccgggcgacagcagcggccttcacggccacgcgcaccagccgccgcctccaccgcccgcgggcgccgcctgctgagctagctgatcgatccaccgctctttcgtgcgctctcccattcggccggtatgatgccagccagattgagcttgagcatgctcatatattttatgtatcattccgtgcgcgtatgcatgcatgtgcatggcgcagtgtagccatgcagctccatgctgctgatccgtctactctacctacctgctgctgagacctgagtgtactgcattgcttgtctttgtctgtgtttcgattcgatttagcattggtgttgtcgaatctatttccttgtaggagtgagcaagtgtttgctgtactgtcaactgagtatatatgtccctttgagatctactagctagggactgggagatacatatatggggatctctcttgctgtttctgttcgtgg

SEQ ID NO: 22193 - DNA, 1030 bp, Zea mays
  Clone ID: LIB3357-030-B12_FLI
tacatgtcttgaaattgctaatggaactgaagcaaatgctaaaaagagtgataaacagttaaagaaggaagcaagaaaacaaagggaactagaaatcagtgctatggaggaaagggctttgcaggaagatataccacaaactccagatgattttgagaagttggttaggagctccccaaatagtagttttatctggataaagtatatggcaactttgttagatcttgcagatgttaagaaagcacgtgcagtagctgagaggatgctgtgaaaaaggtattccaaagagccttgcaatattgtgatcccaaaaagctgcacttggctcttcttgcaatgtacgagaggaccgaacagtatgagcttgcagatgaacttctagacagaatgaccaaaaggttcaaaacttcctgcaagatatggttatgccgcattcagtttgccctcaagcaaggcaaggatgttgagtacatcaaagccattgtaaaccgtgcacttctaagtttgccacacagaaagcgcataaaattcctctcacaaactgctattctagaattcaaatgtggggtgcctgaagaaggaagatccagatttgaactaatattgcgggagtacccaaaaagaacagacctttggagtgtttatctagaccaagaaatccgccttggtgacgtagaagttatacgggcattgtttgagaggagggtggcttgtctgaccctacctccaaaaaagatgcagttcttgttcaagaagtatcttaacttcgagaagtcactgggtaaagacaacgaaagaattcagcttgtgcaacagaaggcaatcgaatatgttcagagttcactgccgtcacaagacaactcttgaactacatggagacttaataagcccacaaacaatcattaggaaatgccagtcgtactgtagatgtgatctctttgatgacattattgtgaaaaggtcaatgtaaaatgtgggctattcaaaattttgtttgaaaccgttatataagttatgaggcattaagtct

SEQ ID NO: 22194 - DNA, 582 bp, Zea mays
  Clone ID: LIB3357-030-H5_FLI
ctcccctacaccagaaaaattcccagttctttggtccgcgtcagagaggcggcggcgatgtctgggcgcggcaagggcggcaagggtctgggcaagggcggcgcgaagcgccaccggaaggtgctccgcgacaacatccagggcatcaccaagccggcgatccggaggctggctaggaggggtggcgtgaagcgcatctcggggctcatctacgaggagacccgcggcgtgctcaagatctttctcgagaacgtcatccgcgacgccgtcacctacaccgagcacgcgcgccgcaagaccgtgaccgccatggacgtcgtctacgcgctcaagcgccagggacgcaccctctacggcttcggaggctaggctaggcgcctcttcatagtcggggactggttaggggacatgtctctgtgtgatgctttctgtggtattattgctgcaatagccgtgtaatccatcgcttctgcaatgaagcgctcggaagcatgctacgtatgttgtgtctgtgggtgattgtatttctggtagtaacagtgattgttcctgaattttggataatacaagctcattcgcagt

SEQ ID NO: 22195 - DNA, 1463 bp, Zea mays
  Clone ID: LIB3357-030-H7_FLI
cctcccctccttcctccttgggttcccagcccgtgcgcccgcctgtcgcagtcgcaccgcagccgccggccatggcctgcctcaccgacctcgtcaacctcaacctctcggacaccacagagaagatcatcgccgagtacatatggatcggtggatctggcatggatctcaggagcaaagccaggaccctcccgggcccggtgaccgatcccagcaagctgcccaagtggaactacgacggctccagcaccggccaggcccccggcgaggacagcgaggtcatcctgtacccgcaggccatcttcaaggacccattcaggaggggcaacaacatccttgtcatgtgcgattgctacaccccagctggcgagccaattcccaccaacaagaggtacagcgccgccaagatcttcagcagccttgaggtcgctgccgaggagccctggtatggtatcgagcaggagtacaccctccttcagaaggacaccaactggcccctcgggtggcctattggcggcttccctggccctcagggtccttactactgtggaatcggcgcggagaaatcgttcgggcgtgacatagtcgacgcccactacaaggcctgcctgtacgcaggcatcaacatcagtggcatcaacggggaggtcatgccggggcagtgggagttccaggtcggaccgtccgtcggcatctcttcgggcgatcaggtgtgggttgctcgctacattcttgagaggatcaccgagatcgccggcgtggtggtgacgttcgacccgaagccgatcccgggcgactggaacggcgcgggcgcccacaccaactacagcaccgagtccatgaggaaggagggcgggtacgaggtgatcaaggcggccatcgagaagctgaagctgcggcacaaggagcacatcgcggcctacggcgagggcaacgagcgccggctcaccggcaggcacgagaccgccgacatcaacaccttcagctggggagtcgccaaccgtggcgcgtcggtgcgcgtgggccgcgagacggagcagaacggcaagggctacttcgaggaccgccggccggcgtccaacatggacccctacgtggtcacctccatgatcgccgagaccaccatcgtctggaagccctgaggcaccccgtggccgtgtcgtgtcggtttgctccgcgtacggcgctggccgttgcatcgcagggcccagcggttgcgcaactattttcccttccccgttctgtttgcttgtactactactctaccgctagtcctgcatagcattttagctagaacacaacaacagccaaaaaaaagtattgttgcttgcttcgacgcttgccaccacttccattccatgccgtccgtccgcttccttcctgtgtaatcctcctccaataatagacgtgccatgttgcatcctctattcctctgcattgtataaaagtggtgtaattctttt

SEQ ID NO: 22196 - DNA, 981 bp, Zea mays
  Clone ID: LIB3357-032-C1_FLI
cgagctagagctagagctatagagatcactctccttctccgcgtgaggtagtgacgtgacgcccagccatggcaacaatggcactgcgcgccgtggcgacggcgctgctggtggcggcggcgtccgtgtgcggcgcgtcggcgtcgacgctggtgctgtacaaccggtgcggggagacggtgtggccgggcatccagccgagcgccgggaaggaggtgctggcgcgcggcgggctgcagctggcgccggggcggtcggcgtcggtgcggctccccgcggggtggtcggggcgcgtgtggggacggcaggggtgctcgttcgacgcgccggccacgctggcggagatcaccctgggcaccgcgccgtcccaggacttctacgacgtgagcctggtggacgggtacaacatccccatcgcgatgacgccggtgcacgggtcgggcgcccggtgcgcggcggccgggtgcgtgagcgacctgaaccgcgtgtgccccgcggggctcgccgtccgcggcgagggccgcgtggtggggtgccgcagcgcctgcgccgcctacggcgcgccgcagtactgctgcacggggcagttcgggagcccccagcagtgcaagcccacggcctactcccgcctcttcaagtcggcgtgccccaaggcttactcctacgcctacgacgacccgacgtccatcctcacctgctccgccggcgcctcctacgtcgtcaccttctgcccgcaccgccgctgaactttttatttttttaggtcttcggccgcgtgttgttagttatcctctgcctgcgtttgcgttttgatgttgtgcgtgcgttcgtttcatttgcctccgtcacgcgtcttcggaatctccagatcttcctccctaagtatagcaatgcgctcggctctactgctgctgcgttttgaaaacctgggatctgaattctgaaatcttgaacagtaaaaactagctacgggcattctcc

SEQ ID NO: 22197 - DNA, 683 bp, Zea mays
  Clone ID: LIB3357-032-D5_FLI
gtccgagtctgagctcatctccgcgcgctgccgccgccgccgccgccgctcgacgcccaccgcgcagccatggcggaacagaccgagaaggcttttctcaagcagcctaaggtgttcctcagctcaaagaaatctggcaagggtaagaagccaggcaagggtggcaatcgattttggaagagcattggccttggtttcaagactcccagggaagcaattgaagggacctacattgacaagaaatgtccattcactggaaccgtttctatcagaggcagaattattgctggaacatgccacagtgctaaaatgaacagaaccatcattgttcgcaggaactacctccactttgttaagaaataccagaggtatgaaaagaggcactccaacattccagctcacatctccccatgcttccgtgtgaaggaaggcgaccatgtcatcattggccagtgcaggcccctatcaaaaactgtgaggttcaatgtcgttaaagtcattccagctggatctgctgctgctggcaagaaggctttcaccgcagcctgagtttaaaactatgttcgatgagtagtttatagagtgatgtcttttttttgttaaaaaaactgccttctaggcttgtgcctttcgaatatggtttggagattgttcccatcttaatgaagtccaatcatctgaac

SEQ ID NO: 22198 - DNA, 576 bp, Zea mays
  Clone ID: LIB3357-032-F10_FLI
cgccggcggccaccaccaccaccgccatgatcagcatcctcgcgcaggagcgcctcctcgggttcgccctgggctccgtctctatgggaggtttcgtcctccaccagcgccgcgccatctaccgctcaatcgctgaagccgatgggtcgtcctacttctaccagcctggtgaaattgccggtcgtagaagttcaactgaactggctcatgtatggaacaaggcggtggacgagactcttgggaaacttgttgtgtaccttagctctcgtggatggtgatccaagcaccatgtcgaacatggcaactgaggaggcacgggtggaggaagactcttttttgaagccactgatgtgctcatatttctctgtatccggattgagcatgttttgttttaaaagaaaagatgctcccagtgaccgatttatctcgaactgagctgattctactgcatgtttcccttaactggtgcatgttacttcgaggtcaatgttctggcccctgtgaaaggcaggattcgtctaactattttgcatatatctattgcaaataaagccttcgtccaaaaagattgcaagt

SEQ ID NO: 22199 - DNA, 1871 bp, Zea mays
  Clone ID: LIB3357-032-H7_FLI
ctgacttctgagcgaggagtggacgagtggtgtgccgtcgtccggttcccgttggtttggcgatgaggcgcgctcgcggtcgccgcgggctgctgcttctcctcggcgtggcgctctcggcggctgcgctgctccgtggctgcgcggggcagcaaggggaggacggctcggacgcccctgcggcggcggcggcggagacggcccccatggaggagaaggagcgcagggcgctgtacgccgccatcgagagcttcgtcggcaaggggtggaacggctccgggctctacccagacccctgcggctggtctcccatccagggggtgtcatgtgatctcttcaatggcctgtggtacccaacagtgatgagcattggcccagtccttgacaactcgctgcagtgcggccccgacgccaagttcagcgcccagctgttcgacctgaggcgcctccggacgctgtctttctacagctgcttcccggcgagcaaccccacggccatcccgaccggcagctgggagaagctggcggggacgctggagacgctggagttccgcaccaacccgggcctgaacggcgccatcccggcgtccctcggtcgcctggccagcctgcagtcgctggtgctcgtggagaacaacctgacggggcccgtgcccgcggagctgggcgcgctgtcgaggctgagacggctggtgctgtccgggaacgggctgtcggggccgatcccggtgacactcggtggcctcacggggctcctgaagatggacctgagcagcaacctgctgcagggcagcatcccgccggagctcgcggggctcaggagcctcacgctgctggacctcaggaacaacagcctcaccggcgggctgccccagttcgtgcagggcatggcgtcgctgcaggacctgctgctctcgaacaacccgctggacggcggcctgccgcagtccggctggggggcgctggcgggcctggccacgctggacctgtccaacgtcggcctcgtgggcgccataccggggtccatggcggccctgacggggctccggttcctggcgctggaccacaaccgcctgacgggggccgtgccgcccgagctcgcccggctgcccagcatcggcgcgctgtacctgaacggcaacaacctgacggggacgctggagttctcggccgggttctaccagcgcatggggcggcggttcgcgtcgtgggacaaccccgggctgtgctacaacgtcgcggccgtggacgcggcccacgcgccgtcgggcgtggtggtgtgcaaggacctgcaggagcccagcgtgggcggcggcgcgcgggacatggacggggacgcggaggaggacgggacgaagcccgaggcgggctccagcctcgtggcctcctcgtcgtccggcatgccggttggcagtgtcggtgggctccggtacctggtggtggttcggggaatggtggctgcggttcttgggttcgtgtccctcctacaatagcaagcaagcaggttcagaagaagaacacggagaaacttgaagtaatgctaagtaggttagcacgaagtagtttctgcgcgtactctgtgatcttttggcatttgcttttggttggtagtggcttaccatcgtcagatggtgaaggaggaaggagggaacatggatctggatggtggcaggctgtgactgtgagccacagattacattacagtagtagagtaaactaagagagttcttgtggactgaaggtgtgtagtggtggatagggtagcttctccggggttcttttgtgtgtaattagcctgtgtcgccctgtggtgtcatgttacaacagcaagtggaaatctatgctggttcgtccgttgttggagaatcagg

SEQ ID NO: 22200 - DNA, 1161 bp, Zea mays
  Clone ID: LIB3357-033-B9_FLI
ttttaggcatggatagataccaaagggtagagaagcctcggaatgacacgccaatcagccagaatgagatcagaatcactactcaggggaggatgaggaactatatcagctatgggatgtcgctgcttgaggaaaatggacatgatgagattagtatcaaggccatgggacgggccataaataagacagttatggttgttgaattgatcaagagaagggttggaggtcttcatcagaacactgctactgaatctgttgatatcacagacacatgggaacctttggaagaaggccttctcccactagagacaactcgccatgtgtcgatgatcactgtgacactgtcaaagaaccctctggatacatcatctccaggataccagccacctatcccagctgaagaggtgaaacctgcttttgactatgatcatgaagaatcgtatcccactggtcgtggaagaggacgtggtggtggcagaagaggcaggggaagaggcatgagcaatggcccccctccacctgcttatggttacaacgaagagtgggaggaggaaggagattattataacagagggcgcgggagagggcggctacgtggacgaggagggagagggcgtggtggctactacggaggtgggaggcgtggtggctacggttatgattatggctatgcccccagaggcgggtactatgaagagcaagacgaatactatgatgagcccgaggaatatgctcctccccctggccgcggacgtggcagagggagaaggggcggcatgccttggcgtgggcgtggaggccgcgggccaccgcgcggtggccgagggagctactactaggcgcgagaaatgcgacgtgccgaatgcgtgtgcttattagttatctgttagcgtttgctgcagtgctcttctatggagctccgaccccggactggaattatctcgtaggcccttccaggtgctactctacttcagctgctgtccctgtgcaactcgtccgggcaagttttgtggctcgctcgtggttttgtagctaggttaagcgagtgaagttacactcggtagcgcagtatttcctgcgagattgtttattcttctgttaatgtacctaccttactatttcgtttggattatggatactgggtgcatcagtttcatgttt

SEQ ID NO: 22201 - DNA, 1672 bp, Zea mays
  Clone ID: LIB3357-033-C3_FLI
gcctctctttcggttctcacggcgacgactgggcgagcgccgcctcccctccctcgctccgtgaggtcctcgccggcgacgagtgccgccgcccgtttccatgtattttccgccgattagtgtccaccagatctagtgaaggctggtaacttgacgcaaggtgttcaagaaatttaagccacacactcttcatcataggcccaggcaatatttgtgttaatctcagggacctccagtagattgctgagagttatccttgatacaggggaatatagacacagaattttttgaacattgatctgtagccagtgctgcaatggctacaaagcttgtggttctcggtatcccctgggatgttgacactgaagggttacgagagtacatggccaagtttggacccctagatgattgtgtcgtcatgaaggagcggtcttctgggcgatctcgtgggtttggctatgtaacattcgcatcagccgacgatgcaaagaatgttcttgattgcgagcatgttcttgggagccgtacattagaagtgaagatagctactccaaaggaagaaatgaaatcacaaggaacaaagaaagctacgaggatatttgttgctcgaattccacagtcagtggacgagtcgatgtttcgtaggcattttgaagcttttggagaaattcttgatctttacatgccaaaggaacatggttcaaaggggcatcgtggaattgggtttatcacgtttcagagtgcagagtctgtggacagcatcatgcaagagtcacatgagcttgatggcacaacagtagttgttgatcgcgcgactccgaaggaggaagatgtaagataccccccgagtagaccatctcagggtggctatggtgcatataacgcatacatttcagctgctaccaggtatgcaactttgggtgcaccaacactgtatgatcatcctggatcagcctatggaagagggtactatggatcctctcaagcagtgggcaagaagatatttgttggtagacttccacaagaagcaaacacggatgacctaagacattactttggcagatttggtcgaatcgtagatgcgtatattccaaaggaccccaaaagaagtggccaccgaggttttgggtttgtcaccttcgctgatgagggtgtggcagaacgggtatctcgtagaagccatgaaattctgggccatgaggttgcaatagacacagctgcaccacttgagaatgattcagctggtggtggttatattgatcccatggatctttacggagcttatggttcaatgagatcttttggcaggttctgcggtggtctagattataattacggctatggccccagcagcggaagcagcagatcaaggtcggattggcgataccgaccttactgaacgtgttttagtttttacctctagggaaggaaactgaggagatggagaaaagaattacctgtctaagaatgctaagtgaggggggtaccttacgcgtggaatctatcaatttgtttcatgttgtgattttggatttgtcgtgattcacattattgacacaagatgaaggcagtccttgtagttactgtatggaagtgctgtatgtgtaataaaaaagtatcatttgcgaaagaagttataacgccatcagacgaggtgcctgcacgtttatat

SEQ ID NO: 22202 - DNA, 1263 bp, Zea mays
  Clone ID: LIB3357-033-C8_FLI
ctaaatctctaaccctagcgtactgagcttggcatggcggcggcagtgtcccgggctcccagcggcacagtcgtgcggcgcgagcgcagcctctgtgcctaggctgcgcctgcacgtcggccggcggcacgcggtggctaataggctggaggcactgcccgagcggctgcccaccagtggtccagctcccactatggttctaaccagcaatatttcggttcagaagaccttgtacgaggttttatctgtgagtgaagacgctacatacgatgagatccgcgcagcatacaggtctgccgctctgaacacacaccctgacaaagcgcagacaactctcgagtcatcatccgtgccttccactgagcaacaggaattttctagcgtgcagaaagcatgggaagtcctacgccatcctacatccagagcagattatgacaagcagctgcagtcatccagacagagcatcgagatcatcgcatccgaaatccaagtcggggacatgatcgtcgagagcgctgctggtgctctagagctgctgtacccatgcaggtgtggcgattatttctccatcacttcgggtgaacttagcgggatggggattgtcgtcactcgggatggagaagaagtagaagagctgcaggcgtcggattctgcatcggcttctgtcgttctgggctgtggctcctgttctctcaaaatacggctggttatagatggaagctcatgatcacatttcaggctctggttgcacgctgttcagcagtgtggtcagtttgaatgcttaacaaccacctccacatgtttgtcaaacagtatgcaattcccggtctgctgaaaatcttgcagcttatcccgatggtggttgcattgtgataaatggcattttgaccgttgttatcagctaacgaccatcgtcaagtccagctgctgggagttcaaagatgttccggtggtggttattcggtagatgtttagttaatgttgtttttctaggccaatttaatggtctcatcggtcagccattcacctaaacgatggctaaactaacgggttttttatttggtatcagctgaatgaatgctgggtgtttttgatagctgctgatgagaaagaagtgttggctgtggctgttggtgttgtattgaataacttgtgaccgtatctgtactgctaaacatgggcagcatcccatgcagaagtagaacggctatgtatctgtatctttagaatttgatattcgtaaaactgtgtctgttcggctct

SEQ ID NO: 22203 - DNA, 1539 bp, Zea mays
  Clone ID: LIB3357-033-E1_FLI
ccaatcacccctgcgctgcttcctttgtcaggttcagtcgctcaccattctgccgttcacacctctctcgctgcctttatttcctgttggcgacgctctcgccacgtcttcggcggcccgttcgtcggcgactagcgcctccgtttgccaggtcttcgtcgtccgtttcgccgtcgactggtgcccagcaggtacatctggaagaatggtgatttaccttagcacaccaaaaaccgacaaggtatccgaagatggggcaaacgataaacttaaattcggactttcatctatgcaagggtggcgtgcaactatggaagacgctcactcggctttgctagatcttgacaatgacactgcatcctttggtgtttttgatggacatggaggaaaagtagttgccaaattctgtgcaaaatatctacacagagaagttctccataccgaagcctatgctgctggtgacctgggtgctgctgtccacagagcttacttaagaatggatgaaatgatgcggggtcaaagaggatggcgggaactccaagcacttggagataagataaatcagttcactggcataacagaaggcttgatttggtcccctaaagcaagtgattcaaatgatagacatgatgattgggctttcgaggagggaccacactctgacttcactgggccaaattgtgggagtacagcatgtgtagcattagtgagaaataggcaactcgttgtggcaaatgctggtgactcccgctgcgtcatctcaaggaatggccaggcatacaatttgtcaagagaccataaaccagagcttgaggcagagagagaaaggatacaaagtgctgggggttacattaaaatggggcatgtaaatggaagtttaaacttgtcaagagctattggagacatggagcttaaacaaaacaagttcttgtcccctgataagcaaattttgaccgcaaaccctgacataaacattgtcgagctatgtgacgacgacgaattcattgttttagcatgtgatggcatttgggactgcatgtcaagccagcagttggttgatttcatccgtgaacatataaacacagaggaaagcctttctgcagtatgtgaaagagtgcttgatagatgcctggctccatcgaccatgggtggcgagggatgcgataacatgacgatgatcttggtgcagttcaagaagccatttgctcaggtaaaggatgccagtgatgcggaacaactaactggagatgcgggatgctctgagacccatggggccgaggagaatggctctgacaagcagatatagcgaagacatggactcttttggagtcttggtacatggcctgacgctgaacctgggtaaaacaggagtacgatgttgcaatgtacataccaaccatgcgctgagttggcgtgaaggatatattcattgttccactgttgtctttaaccaaacgtgctgttttcttccggttgtgatttttggtgatctgacaatatctaattatacatttgggtggaaatgatgttacaatagtt

SEQ ID NO: 22204 - DNA, 517 bp, Zea mays
  Clone ID: LIB3357-033-G3_FLI
cgaccaacgaggcaacgaccaaacccttccccctccctagctccgtgctccagcgggagtccgcggcggcggtgaagatgattatcccagtgcgctgcttcacctgcggcaaggttattgggaacaagtgggatgtctacctcgacctcctccaggccgactactcagaaggggatgctctggatgctttggaattgttccgctactgctgcaggcgaatgctcatgacacatgttgacctcattgagaagttgctcaactacaacaccctagagaagaccgagacaagttaagcgagcacatcatgctccaaaaacactactgtttcgcagtatcatagagcttaggtagtatgttgtctcttctctatcagtagaaatgggttgtgagtgtgaacatgcttttgctcatgagcattcaaggacttttcatgcgacagtgcttgttgccacctatgcaacgatgttggatattttaagtgatataattgctaaaagaaagctaatgtatttgtgtg

SEQ ID NO: 22205 - DNA, 799 bp, Zea mays
  Clone ID: LIB3357-033-H4_FLI
aatatccccaaaccctagctcccgatctcgatggcgaaccctcgcgtcttcttcgacatgaccgtcggcggcgccccggcgggccggatcgtgatggagctgtacgccaacgaggtgcccaagaccgcggagaacttccgcgcgctgtgcacgggcgagaagggcgtgggcaagtccgggaagccgctccactacaagggctccaccttccaccgcgtcatccccgagttcatgtgccagggcggcgacttcacccgcggcaacggcaccggcggcgagtccatctacggcgagaagttccccgacgagaagttcgtgcgcaagcacaccgcccccggtgtgctctccatggccaacgccgggcccaacaccaacggctcccagttcttcatctgcaccgtcgcgaccccttggctcgacggcaagcacgtcgtcttcggccaggtcgtcgagggcatggacgtcgtcaaggccatcgagaaggtgggcacccgcaacggctccacctccaaggtggtcaaggtcgctgactgcggacagctctcctagatctctctgatctggtctgttcggccgccctccctccgtcatcgtcgactccccctgcgtccgttcctttggatctgaataagatggtggtgatctgagtggtggtcttagtttatcatgtatcgctcgcagtttaatttagcggtttaggtgtggatctgtgaaccccatggcgcctctgcttgattcgtgtttcacctgttatgttctgagattcatgataatgctatgagaactgaaattcccgttt

SEQ ID NO: 22206 - DNA, 726 bp, Zea mays; identical to SEQ ID NO: 21668
  Clone ID: LIB3357-035-G11_FLI

SEQ ID NO: 22207 - DNA, 892 bp, Zea mays
  Clone ID: LIB3357-037-C4_FLI
gccactaatgtcatttttggtcttgctcttggatacaagtcggttatcatcccgattttcgctattgctgttagcatctatgtcagtttctccattgctgcgatgtacggcattgcagttgccgctcttggtatgctgagcacaatcgcaactggtcttgctattgatgcttatggtcccatcagtgacaatgctggtggtattgctgagatggctggaatgagccacagaatccgtgagagaactgatgctcttgatgctgctggcaacacaactgctgctattggaaaggggtttgccattggttcagctgctcttgtgtccctggcgctttttggtgcctttgtcagcagagctggagtgaaggtcgtcgacgtcctctcccccaaggttttcattggtttgattgttggagccatgcttccctactggttctctgccatgaccatgaagagtgttggaagcgccgccctgaagatggtggaggaggtccgcaggcagttcaacaccattcctgggttgatggagggaacagccaagcccgactacgcaacctgtgtgaagatctccactgatgcttccatcaaggagatgattcctcccggcgctctggtcatgctgactcccctcatcgttggaaccctcttcggcgtcgagactctctccggtgttcttgctggtgcccttgtttctggagtgcagatcgccatctctgcctccaacaccggcggtgcatgggacaatgccaagaagtacattgaggctggggccagcgagcacgcgaggaccctcggtcccaagggatccgactgccacaaggccgctgtgatcggtgacaccattggtgaccccctgagggacggaccggaggtgtccttcagtctagatcgcg

SEQ ID NO: 22208 - DNA, 458 bp, Zea mays
  Clone ID: LIB3357-037-D1_FLI
gacctcggtcctcgttttcactcgcttgacctgttgctgttggccatacctcctctctcgcctccggtcagatcagattagcctccatggccgccgatcgcggcttcaagatctttgcagccgccgatggcttcggccagccactcaaggacgccgtcgtcgcttatctccgcgcccaccccgccgtcgccgaggtcgttgacctcggcgtcgacaagtactacgccgccgccgcagccgtcgcccgacacgtctcctctcccgactcggagcccgacgcccccgaggtccgcggcgtcgtagtctgcggcaccggcgccggcgtctgcatcttcgccaacaagtacccgcgcgtctacgccacccactgcgcttcccccgccgacgccgtcaacacacgctccatcaacgcctgcaacgtccttgctctctccggaatcgccacgcagcccgacgcc

SEQ ID NO: 22209 - DNA, 242 bp, Zea mays
  Clone ID: LIB3357-037-E4_FLI
gcgggttggcttctcctcccccaccggttcgtgttcaggttctggttcgtgggcgagagggaagagatggcggcgtcggacgttgagtaccgttgcttcgttggcggcctcgcctgggccaccgacgaccactccctcaacaacgccttcagcacctacggcgaggtcctcgagtcgaagatcatcctggatcgggagacgcagaggtcccgcggcttcggcttcgtcaccttctccacgga

SEQ ID NO: 22210 - DNA, 1239 bp, Zea mays
  Clone ID: LIB3357-037-G3_FLI
cgccactcccttcgcctctctaaggttccggcggaagccgtcctctgcgtgactgcgtcggctgcggtggagatggcttcctcgtcggcgtcttcgaggcaccaggtcaccatcaccctcggccgcagcggtcaggttgtcaaaaggagggctatgtctgatgatattaatgacggtgaattgcctttgttggggaaaaagcgatctgtgagggataggttaggaagtaatgtgtctgattctgatttttatgaaagccagcagagaaacaaacggcgacaattagaaagtaatagctcacatggagatgatggttcagaccgcctggttgggaagggtgatctgagactgaaactcatgaggaaaggcttgttgccgaggagcaatggtagtgcagaacagaatgacatagatctccgtgaaaagctttcccgaaaccataagttaccaaattatgattctagaggtcatgctgcagaatcaagggctagttatgatatgagagatgagcctccagagttaagttccagatattcttcgagggaggatgtcctagggtcgaggcactcttctgttgtaagtcgagttccttatgcaagaagtgtggatgatttgttaaagttggattattcaagaaaatcctacccgtcatggacagatgatggtttgaggcacagatcacctgaaaggatgttaaaagttcggagcgatatgtatccacggatagcttatgatcagattaggcccatgccaccccttaggtctgctggttcctcgagacctcaaagttttattacaagagatgctcctgacacgtcaaggagccaaccatatgctggcaaatccaccatttctattgatacagtacagaggactaatggaatcactccatctactgcagctctgcctaaggcccctgttatggatgaagccccgcttacagttactggattgctgaactcgttgggtcttgagaagtatgttgttctttttcaggctgaggaggtggatttgtctgcattgaggcaaatgggagagagcgacctcaaagacatgggggtaccaatgggcccgaggaagaagattctccttgcagttggccctcagtccaaataacgccaaagatgagcaaacagggtgtgggtctaagaacatttgttggcaaccgaaaatattggtgtaagaactccagatataagatattgtatacccaattatccatagtggcggtcttaatcc

SEQ ID NO: 22211 - DNA, 926 bp, Zea mays
  Clone ID: LIB3357-037-H4_FLI
atccacccctagctgcctggtgcccacgataacccagagacctcgagaacggctggaagaaccgagagcgctccggaaatgtcggcgggtgagctgcggttggagctggacgagctgcggcggctggagagcctcgccaagcacccccgcgtccagatcctcctcgccaacgaaatccgcaacgttgaagcgaagttggcgaaggcaaccgaaccatcgcctgagccactggcggcggcttctgcgccagcgcccgcgcccgctgcgcgtcctgttttaagctacgtcactcttgggtcgttcagctgggagcaggacaacgagaagattaggatatatgtttcccttgagggagttgagcaagagaaggtggagactactttcaagccaacatcagtggatataaagtttcatgatgtcaaaggcaagaattaccggtgtgctataccaaagctgaacaaggaaattgttcctgagaaatgtaaggttgtggtgaaaccaaccagggttgttgttactcttttcaagggttctaaaggcaactggttagacttgcacttcaaggaagacaagttcaagccaaacatggacaaggaaaaagatccgatgtcaggaattatggacttaatgaagaacatgtacgaggagggcgacgaggatatgaagcgcacaatagccaaagcttggtctgatgccaggtctgggaagacgactgattcgatgagcggattacgttgagctggtataatcagttgatgggcttaagttttctgcgctagcccctgcagccgaagtgtttctgatggttcaaatagcgttgcagtgccttgttggtgttagtccttgtttatcttacatttgtgagtgaagttggacgtgccaaacatatttaaatatatcctcttgaacgggggaaagatcatatc

SEQ ID NO: 22212 - DNA, 1377 bp, Zea mays
  Clone ID: LIB3357-037-H6_FLI
agaatagagagaaggtcgaagggctagacccggtcccccaattccaattcgcccctctcgcggccggcctcgcgagacgccgattcggatcccatctcctgctcagagcctcgattcgaccggcgggggcgacgattcgaccgggtcggtagccaggcagaggcagcggaaggagaggatgagcttccaggacctggaggcggggcacgtccgcggggcgccgctcggcggcggccggaggaacggcaggggccccgcgggggcggggggcgccggcgccggcgcgtcgcaggccgtggcgtcgggcgtcttccagatcaacaccgcggttgccacgttccagcgcctcgtcaacacgctcggcacgcccaaggatacccccgacctccgcgacaggatacataaaacacggcaacacataacacaactagtgaaggatacatcagacaagcttaaacaagctagcgaggcggatcatcgcgttgaagtcagcgctaccaaaaagattgctgatgcaaagctagctaaagatttccaagcagtcctaaaagaattccagaaagctcaacgattagcagtagagagagaagctgcatatgcaccttttattactcaagcgggcctgccacagagctacaactcaagtgaagtgaacaatggtgctgataagttggcagagcagcgcacgcagcttctagaatctagaaggcaggagttggtcttcttggacaatgaaatagtgttcaatgaggccatcattgaggagagggatcagggaatacaagagattcaacaccaaatcactgaagtaaatgaaatcttcaaagatcttgctgtgctagtccatgatcaaggagcaatgatagatgacattgattcccatatagagaatgctgttgtagcgacttcgcaggctaaaggtcagctttcaaaagctgccaagactcagaagtcgaactcttcgctgatatgcttgttactggttatcttcggcgtggtcctgctcatagtgataatagtacttgcagcataaaagcttggaaggcagctgaggttccgatgatcgagcttattgcgatgaattccttattattattttttttgctgtgcagccaggaatggatcctggcatccgcctggatgtatccaggcggtgattggtgatgtgcttgtggtatggctgtgtatttggtgatgatgtatctggaatgcatgggtggtttcacataaaagtatactctttcctgccagtgtagttcctcttgtctcatatgcacgctttgtttatatattgtaatgtatgagtgcgtgctgtagaacaaggttggattatctgtggtatgaatttcctcgattccatgagaaacgcttttctat

SEQ ID NO: 22213 - DNA, 463 bp, Zea mays
  Clone ID: LIB3357-041-A9_FLI
gcagccggcagcccagagccggagagcccagtgaaacagagccggtgaacgcagcccagtcagtgagtcccccgatcccgactccggcgatctccccaaccccatggccgccgccggcgaggcccccagcacgctcctccgcttcctctacttcgtcggcgccggagtaatctgcaccaaggccatcaacacctatcgcgactacgagcacaagaaggagtccaccgccgccctcgccgccgccgaatcggcgttggctgctgccgcggcggccgagcccgctcctgcaaccgccgccgcgaagccctgattgtggacgagggcctgtcttcggcggttagggttctcgggatgttgctctccagaggggagatagatattttcttttgtttctgatgtttcagctacgtgtatgtgctcttttggcttgaatcaatcagtaataatacttcttttcctgtct

SEQ ID NO: 22214 - DNA, 872 bp, Zea mays
  Clone ID: LIB3357-041-C4_FLI
cctggaagcatctggaggcgtggcacggcagccgtcgcccgccacaccagcagcgaactgcttcccggtgcccgcggcggcgaagcacaggagagaggcggcgagtgaaaccgatgacgccgccgatggatccgcccgacgtcgagatggagatggagcccgcgccccagcctccggctccgacagcggtcggggaggggtggagcatgctgtcgcgcgcccgcgggctgctcgaggagggcaaaccgtccctcgctctgcaggcgtgtgttatctgagcattgatggcatccgaagtaagggcctgcaacttaatttcaagaagccgagtcaaatcgagctttaagagttctcttggccataagatctcaaggcggtgaacaagctctcatgcagacattgaaccgtgcacgtgaactctatgcacagagattgcaggccagtcctagtgttgatgagcttgcctctttgcttgcccaatgtgccatagcagaggctcagtcatcaaatactaaccctccacaagggcctgggtcagaccctgtcaatatgctgaattctgatgaggcctgcattcttgctgagagtggaaggaagcagatcatcctggacgcatttgctgatgggagcagcttcatttgcttgaaatgtggggggctctttagcacatctcgcaaggatgagcacttagcctactggtgcgggactgcatgatcctggttacgtcttgctgtggtatatccatggtcacacctagcaatgaaccgatgatcatgatacccgtgagattttgtataaactttgttctgttccaatccgattactgcttctttactgcggggatgccagaggcacgtctgttaagtcgtagt

SEQ ID NO: 22215 - DNA, 646 bp, Zea mays
  Clone ID: LIB3357-041-E2_FLI
gcaatctctagcagcagatcctcgtgcaaagcaaagcgctagccttcctactgtcccgatggcccgcacgaagcagacggcgaggaagtccactggcggcaaggcgcctaggaagcagctggccacgaaggcggctcgcaagtctgccccggctaccggcggagtgaagaagccccaccgtttccgccccggcaccgtcgcgctccgggagatccgcaagtaccagaagagcacggagctgctgatccgcaagctgccgttccagcgcctggtgcgtgagatcgcccaggatttcaagaccgaccttcgcttccagagctccgccgtcgccgcgctgcaggaggcgtccgaggcctaccttgtcgggctcttcgaggacaccaacctctgcgccattcacgccaagcgcgtcaccatcatgcccaaggacatccagctcgcccgccgcatccgtggggagagggcctaggcgtcgtcgcggtggaggtggaagtagtagtcgcagtttctgtcatcactgtctggctagaagttgtagagatgtgccggtttatgtagtttgggttattggtcgaatcattatgtagttgggtcttcactgctgtaatttaactatgactatgcaatggcaatgaagttctcggtt

SEQ ID NO: 22216 - DNA, 1203 bp, Zea mays
  Clone ID: LIB3357-041-F5_FLI
gctcggccctcggctccttaaggcttcatcttctcaagttccggccgtccatcgccgccgccggcctcggccggctcagttcctgcctgccagccaaaaattccacaccacccacccagagactgaggcgcgcggtggtgaagacgtgatcgaaagtcgaaaccaaaacgatatatagatggggcgcgggcgcggcaaggtggaggtgcgtcgcatcgagaacagcgtgagccggcaggtgaccttctcgaagcggcggcgcgggctggcgaagaaggcgcgggagctggccgtgctctgcgacgccgacgtcgcgctgctcgtcttctccgacaagggcaggctccacgacttcgccgcgcacggcagcatggagcgaatccttggccgatacgagaggtacttgctatgtgaagatagggacgatgtaacccaagactaccctgaagaatcgcaggggaacatgagctatgaccacatcaagttgaggtccaaactcgaagctataaagaagagccaaaggaatctcatgggggagcagctcgagtccctgacgttcagagaggtacagcagcttgagcaccggatagacagcgctctgaggaacgtcagatccaggaaggaccacatcttgctcaactcgatccaggagctccggaacaaggaaacttttctgatggaacaaaatggcattctagagaaggagaaggctgcagtgggggcatcatcatccctgcacaccaccaccagcaccgcagcagcttcttccacggcagcggcggcggcggcccttccaaacctgaacatctgtcccgacgactccgacgagccaggaatggcggcggcggcggggatcaggttgccgtggtggatgctccagccatctgccgtcagccaacggcaggaacagcactgaactgcttgtcttctcagatgatccacgctgcttgttccagctcgattctagtttctattagaactcgattcagctaaggcgggaatttgtgatctttctattgatctgccgttcttattggttgctagatcgattttatccttgtccttcttagtatctgaacctctgctgtgtcgtttgtcgtagttcttggtcgcaaaagctccggtttgcgtctctagtttggtttggttcctgtaaaatctgctgttgtccttcaatgagctgtgcaggccagttagatgatt

SEQ ID NO: 22217 - DNA, 1774 bp, Zea mays
  Clone ID: LIB3357-041-G10_FLI
ccgggagcggcaagactgggacacgccacccctttatttcgagctttctgcgtgcgggaggggggttgacaggcgatggcggccgagggcgaggcggcggcgctggagttcacaccgacgtggatcgtcgcggcggtctgctctctcatcgtgctcctctcgctcgtcgccgagcgatgcctccactacctcggcaagacgctcaagaggaagaaccagaagccgctcttcgaggcgctgctcaaggtcaaagaagagttgatgcttctggggttcatctccctgctgctgacggtgttccaggggatgatccggaggacgtgcatccctgaacgctggacattccacatgctgccatgcgagaagccagatgagaaggccggtgaggccgccaccatggagcattttgtagggacgcttggcaggatcggtaggcgtctgttgcaggaaggcactgctggggctgagcaatgccagaagaagggaaaagttccacttttgtcccttgaagccatacatcagctgcacattttcatatttgttctggcaatcacacatgttattttcagcgtcacaactatgcttttaggaggtgcacagatacaccaatggaaacagtgggagaatggaattaaaaaagatgctcctggaaatgggcctaaggtaaccaatgtacatcatcatgaatttatcaagaaacgttttaagggtattggcaaagattctataatattgagttggctgcattcttttggtaagcagttttatagatcagtatctaaatcagattacaccacaatgcgtcttggttttatcatgactcactgccctggaaatccaaaatttgatttccatagatacatggtaagggttttagaggcggattttaagaaagtggtaggcataagctggtacttgtgggtcttcgtggtgatatttctgttgctgaatgttaatggctggcacacatacttttggattgctttccttccccttattcttctgttagccattggcactaagctggagcatgtcatagctcagctagcccatgatgtagctgagaagcacacagcggtcgagggcgatgtgatcgtaaaaccatcagatgaacacttctggttcggcaagcctagggttatcctttacctgatccacttcatcctctttcagaatgcgtttgagattgcgtttttcttctggatactgagcacttatggattcgactcgtgcatcatgggacaagttcgttttattgtgccaaggcttgtcatcggggtggttattcagcttctctgcagctacagcaccttgcctctgtatgcaattgtaacccagatggggagctgctacaagaaggagatcttcaacgagcatgtgcagcagggcgtcctgggctgggctcagaaggtcaagatgaaaaagggactgaagggagctgcatctgctagcaaggacgaatcgattaccaatgccgattcggcaggaccttccgttaagattgaaatggcgaaggctggggaggatgttgagatcgttggaaacacaggttgattgggacaatagggtgcccgtgttgtaatgatgtaacaggctaatatgccatcatcttttttttgtagatactagatagcttgctgtggcaataccgcaatagcggtgaactagagaaggtttgggcccgggagcctcatctgttatcggtccagtaggaagcaaattcttatatacgggatatcgataaaaaatgaactaagttcctggattcattacc

SEQ ID NO: 22218 - DNA, 656 bp, Zea mays
  Clone ID: LIB3357-042-C10_FLI
ttcctcccatctcccaagacctcctcagacccgagaagcgcagctgcggccatggacgccaccggcactggagctggagggaaggcgaagaagggagcggccggtcgcaaggccggcgggccgaggaagaagtcggtgacgaggtccgtgaaggccgggctccagttccccgtcggccgcatcgggcgctacctcaagaagggccgctacgcgcagcgcgtcggcagcggtgcccccgtctacctcgcggccgtcctggagtacctcgccgctgaggtcctggagctcgccggcaacgctgccaaggacaacaagaagacgcgcatcgtcccgcgccacgtgctgctggcgatccgcaacgacgaggagctcgggaagctgctggctggcgtgaccatcgcccacggcggcgtgttgcccaacatcaacccggtcctgctgcccaagaagacggcggagaaggcgtccagcggcgggagcaaggaggccaagtcgcccaagaaggccgccaagtcccccaagaaggcatagggtttggaggcggatccgatgttgtcatgtgtaggttgtaagcgggcaatgtgattggctgtgtatctgcttcgctcaagttgctttatgtcattcctaatggaataggaaatgccgtgtttctt

SEQ ID NO: 22219 - DNA, 158 bp, Zea mays
  Clone ID: LIB3357-042-F2_FLI
ctccaggaagagcagccccatcccagaaatgcactgcagccactatcgcctgagcaattgacgggtcaattggaagcagcaagacaaggggggaggggaaaatcaccggtcccggttctcggctgtaccgacatgagaattgagatgatgcggaaaag

SEQ ID NO: 22220 - DNA, 837 bp, Zea mays
  Clone ID: LIB3357-042-G6_FLI
gcagcccccaactacccccagcctcggaaggaaccttccagaagcgcaagactctaaaggccgtcgccttcccattcttcctcgccgcgggggtcgcctgagatcacataaacaatggtgaaggctgttgctgtgcttggtagcagcgatggtgtcaagggcaccatctttttcacccaagagggagatggccctaccgctgtcaccggaagtgtctctggcctcaagcctggcctccatgggttccatgtacatgcacttggtgacaccaccaatggatgcatgtcaactggaccacactacaatcctgcgagcaaggagcatggggcaccagaagatgagaaccgccatgctggtgatcttggaaacgtgacagctggagcagatggtgttgctaatatcaatgtcaccgacagccagatcccactgactgggccaaactcaatcattggcagagctgttgttgttcacgctgatcctgatgatcttggaaagggtgggcacgagctcagcaagagcactggaaacgccggtggccgtgttgcttgtgggatcattggactccagggctgaaaacgattgccggacttgggggtgcctgagaggtccgtctcctgccgtccccagcagacgagcctgaacattcggagacatcgtgaaataagagcgtcgctgatctgtgatcatcgtatttgtcattatgcacctgtagcaaccgatggactaaacagtgctggattatgctgttggatgacctgagtatgtgttacatgtcggttttgatgacatcctatcgtttcgatgtgctttgtggaagtgttgttgcaaattttcaac

SEQ ID NO: 22221 - DNA, 721 bp, Zea mays
  Clone ID: LIB3357-043-D6_FLI
gccgccgcctccgacatcgtctcttcgtccccacgagcaaccgataatccgccggcgctgagatgttggtttatcaagacctcctatctggcgacgagctcctgtcggattcattcacctacaaggagctcgagaacggcgtcctgtgggaggtcgagggaaagtgggtcacccaaggtcctgttgatgtagacattggtgccaatccatccgccgagggtggtgaggatgaaagcgttgatgacacagccgtgaaggtggttgatattgttgacacattccgtctacaggagcaacctccttttgacaagaaatcatttgtctcttacataaaaaaatacatcaagaatctcactgctgtgttggagccagagaaagcggatgagttcaaaaagggtgtcgagggtgcaaccaagtttctccttagcaagctgaaggaccttcaattttttgttggtgagagcatgaaggacgaagcgtccgtggtattcgcctattacaaggatggtgccactaatccgacattcctctatttctctcatggtcttaaggagatcaagtgctagattagttacccatgttgggtactatatatgttctattgttatagccacaactatagctgccctgcctgaactgaactcaggtttttttaagaaaaaactgtccaagattggattgcttgttaaagctaaatattgttattgacgtgttattgctt

SEQ ID NO: 22222 - DNA, 2825 bp, Zea mays
  Clone ID: LIB3357-043-E10_FLI
ccgggagccccgttgctggccacgcccccaccgctcgcgcgcgtcgagcagcttctcgtcgtagttgagcctacgcttggcgcctaccgccggttccgctgccgggtgtcctcccttcgtgccgctgacaccagagggtaggatccccgcgctttcgaccagcagatcccgccgcgacccaggaaggagacacttatggggaagggacaaatattagctgttcttcaaataggtggagaattcaacaccgatgaagatggacacatgtcatattctggtggagaggcacatgctatgcatgttcaaagtgactggacttttagtgcatttaagcaagagatatcgtcaacacttaacaatctgaagcttgaccagtttgcattcaagtatttccttccaaagaatgataaaactttgatctctatttccaatgacaaggacctacgacgcatggttgaattccatgcggagtcagattcgacatacatttatgtcatgaagaaagctgacaacagatcaaagaacattgttgctgtcttggacactcccacagatgcctttgcgattgtcccaacaactcaggatgggtctaagagacaaaaggtttgtgcaagttggaagaatgtgataactggagttggccaagtgtttgaaggacctaaggatttccgtgatgccttacataagtatgccattgcacatagattccattatagatttatcaagaatgactcatctcgtgtgactgctgaatgtactggtgaaggttgcccatggcgaatacatgcttctaagtcccctgcaaagaaagaatttatggtcaagaaaatatctgaaagccacacctgtgaatctgaaacagtcaaaagcaatcggttggcttctcaacgatgggttgctagtgtcataaaagaaaagttgcgtgatagtccaaactacaggccaagagatattgcaaatgatcttcaacgagagtatggactatgcctgaactattcacaggcttggcgtggaagatcaattgctcagaaggaactttatagtacacacgaagaggcctgcagtcagttgccttggttttgtgaaaggattgtagagacaaaccctggaagtgtggcaactgtagtggccttggaagattcaaagtttcgtttttttgttgcattccatgcatcgctccatggttttgagcatgggtgcaggccgctcctttttcttgaagcgataactgcaaagccgaataagcactggaagctactggctgctgcttcagttgatggtgaaggtgatgtgtttccagttgcttttggtgttgtggatgacgagtcgcgtgaaaattggcattggtttcttgagcaactaaaatcttcacttggcacatctcgaaccatcacattcatatcgaatggagaacatggactttgggatgtattatcttcagttttccaagagtgtcatcatggctactgtgtggagtctcttattgaagaatttaagatgcaactggatgatgcatggactgaggaactaaaagattcgatggttgagcatcttaagaaggccataaattcatgcacagctgatgagttcaatcagtatattgagctcatcaaaagtggttctgacaagcttgctgattggctcttggagatcaaacctgagcgatggtcagatgcttttttcaagggatcacgtcatgggcagtattcttgtaatatttttggcactgtgtctgagtggattcccacgagatatgagctttcagttgtgcaattggttgacacgataagatgcaagctgatggagatgatgtacacacgcagagagtcttccaatgcatggactgaggtattaacaccggcagccaatcagaaacttcaggaagaggtgaacaaagcccacaccctcaatgtccttccagcagaaaacggtgaaaatggcaatgtgtttaaggtctgtgatgactcagttaatgttgtcaaccttgacacatgggaatgcacctgccaaaggtggcatatttctgggctgccatgcatgcatgtgattgctgtattggagcgcactgggcaatatgcatatgactactgtgtgaagtacttcacaacagaatgctaccgcttgacctattccttgtcaataaatcccatacctgatgttattgtgccgcctacattaatcgacttagctcagagcccagcaacatacccatgcccactgcgaacccgccgtcgggttggccggccaaaagagaagcctgctgatcctcgcattgcaatcaagagggcagtgcgctgcagcaggtgcaagggttatggacacaacaaggcaacctgcaaagttcctatcagcagtttcagcacgtagtatttactcatcaaatcagttgtgcagtgtgcattagtgtggagagttgttcgtgttattctctgcaatgttagtgttgatgtttcttttgatagtctgtgatacatgctagggatgatcttagcttggctgccaagagaggagtctgctgatcctcgcattgcaattaagagagcagtgcgctgcagaaggtgcaagggttatgggcttatggccaccacaaggcaatctgcaatgttccgatcagcacatagtatttaatcattggatcagttccgcaatgtatattaaggtggagagttgttcgtgttaattctccaaaatgctagttctgatgtttcttcggatagtctgttatacatgcaagggttgatcttagctctaaattgatctgtattttcaccattgcttagactaactgtattcagcttgtgagtaaaacgccgtagcttatactc

SEQ ID NO: 22223 - DNA, 794 bp, Zea mays
  Clone ID: LIB3357-043-H11_FLI
ccctaacccacgccagccgccgccgccagaccaaaccttccctaacccacgccagccgccgcagccacaccggcacaccgccggccagcagcagccatgccgcccaagttggacccctcgcaggtggtcgaggtcttcgtccgcgtgacgggcggcgaggtcggcgcggcgtcgtcgctggcgcccaagatcggcccgctcggcctctccccgaagaagatcggcgaggacatcgccaaggagaccgccagggactggaagggcctgcgcgtcaccgtgaagctcacggtgcagaaccggcaggccaaggtctccgtcgtcccctccgccgccgcccttgtcatcaaggcgctcaaggagcccgagcgggaccggaagaaggtcaagaacatccggcacagcggcaacgtcgccctcgacgacgtcgtcgagatcgccaggaccatgcgccccaggtccatggccaaggagatggccggcaccgtcaaggagatcctgggcacctgcgtcagcgtcggctgcaccgtcgacggcaaggaccccaaggacctgcagcaggagatcgatgatggtgaggtcgagatcccctccgcttaaaggtgagcaccccagcagctctttcttctttcattcattgctatgcgggatcgctaaaatttagacgagaccaatgctagtgctaccaaatgaaacatcgattttttttagattctgtatttctggtattgcgttgcgtttatatctggaggtaaaactcgaattttgtctggcctgataatcaaacttgttctctt

SEQ ID NO: 22224 - DNA, 651 bp, Zea mays
  Clone ID: LIB3357-044-D2_FLI
tcgtgaggttctccggggttcggtttcgtgggtgagcggatcgagatggcggcgtcggatgttgagtaccgctgcttcgtcggcggcctcgcctgggccacggacgaccactccctccacaacgccttcagcacctacggcgaggtcctcgagtccaagatcatcctcgatcgggagacgcagaggtcccgcggcttcggcttcgtcaccttctccacggaggaggcgatgcggaacgccatcgagggcatgaacggcaaggagctggacggccgcaacatcaccgtcaacgaggcccagtcccgcggcggccgtggaggcggcggcggcggcgggtacggtggtggccgtggaggcggcggctacggcggtggcgggcgccgtgatggcggcggcggctacggcggtggcggcggctacggtggtggcggcggcggctacggtggtggtggcggcggctacggcggtggcaaccgtggcggcggctacggcaactccgacgggaactggaggaactgagcggtggggcccgcgcggccaagttatcctgttcgctaccgtgttgtttaccctagtccagagtgtttatcttcgttcgtctcgtgtttgttgttgcccatctgtgtttttgattgaaggtcgctctgtgtc

SEQ ID NO: 22225 - DNA, 1663 bp, Zea mays
  Clone ID: LIB3357-044-D5_FLI
cgcttatccgaaccgctcgctgctggctcctccgcgcgcgtgttcgcggcatggccaggcttccaatggcgctctcccccgccgccatttcccccttcagcaccctccccctctactattcttcgcgtcctcaccgccgcctcctcgcccgcttcttctccgtcgcttcggcaccgggcggagcgaaagggcaccgaccggcggcctccgccgttgaggtgggcggcgtcaagatcgcgcgcgaggatgttgtgaaggaggatgacccgacaaacaacgtgcccgacaatatcttttcgaagatcggcctgcagctgcacaggagggataaccatccccttgggattttgaagaacacaatttatgattactttgacaagaacttcactgggcagtttgacaagtttgatgacctttgccctcttgtttctgtcaagcagaattttgatgatgtcttggtcccttctgaccatgtaagccggagttacaacgacacatattatgttgatggtcaaacagtcttaaggtgtcataccagtgctcatcaagctgagctgctaaggcatggacatacacactttcttgtaactggagatgtttaccgtagggattccatcgattcaactcactatcctgtcttccatcagatggaagggttccgtgtcttctctcctgatgaatggtcagggtctcgcatgggtgggacagcatatgcagctgcagaactcaagaaaacactggaaggcttggcaagacatctatttggtgctgtagagatgcgatgggttgacacttacttcccatttaccaacccatcctttgagctcgaaatatactttcaggatgattggttggaggttttggggtgtggagtcaccgagcaggaaattttgaaaagaaatggcaggagggaccatgtggcttgggcctttggattgggcttggagcgccttgcaatggtcctttttgacattccagatattcgactcttctggtcgaatgataaacggttcacgtcccagttctcagaaggcaagcttggtgtcaagttcaagccattttcaaagtttcctccttgttacaaggatatgagtttctggatcaatgatgcatttacagagaacaacttatgtgaggttgtcagaggaattgctggtgatcttgttgaggaggtaaaacttattgataatttcacgaacaagaaaggcatgacgagccattgctatagaatagcctataggtcgatggaacgctcgctcacagacgaggagattaacaatcttcagttgaatgtcagggaagctgtgaaagataaattggaagtagagttgagatagaagcagctagctatgcagttataccatgaactaaatgttgcctctctttatatgtaaatccatttaaaatgatttttttgtatctatcaagaaaatgcaccatttgtttctgtatagatcacgttttccgttatgtttaggggagagaaaatagttcccaatccaattggcactcatcaaatcgtgtaactcataaagatgacgtgctgtacgctgctcgctaggtttttttttgtgctgttagtgtaggataagatgactctatgtttgcagtagtcagagttgtgccattgtcctcacttcccatatacatatttcatcgaatt

SEQ ID NO: 22226 - DNA, 1458 bp, Zea mays
  Clone ID: LIB3357-044-G5_FLI
gccaattttgcatccccaccaccaatccaccaccccacacccagtgacagagacagaaggccgggcagggctacgcgacgcgacggagatggagcacacgaatcatcgccgccgccgtcaagctttggccaccgtgtcggtgacgacgacgctcctgctgcttctcctctgcctcgcggcgttgacgacggcagaggcgctgcgcgagcacagggacgagggcggcgctagcagcagtggcggaagcggaagcggctgcggcagcaacgccgccggcggcaagcaatcgccggccgtgtgggtgttcggggactcgtacgcggacacggggaacctgggcgacctcgggcgggagctgacccgcgagtggtacgacccgtacgggaccaccttccccggccgtcccaccggccgcttctccgacggccgcgtcctcaccgacttcatagcctccgcgatgggagtgccaacgccggtggcgtacaagctgcgcaggggcgctgcgcgcgggctcgtggcgcgcggcatgaacttcgccgtcggcggcgcgggcgtgatggacaccggcaacttccagcgcaacatcggcgagcagatcgacctgttccaggcgcagcgcccgccgccgccgccctccgcccgcggctgcgacggcggggtcgcggtcgtcgtcgtctccggcaacgactactcctacgccgccgacaaggacaacagcacaagcgtacgcgccgcgatcgcctacatcccggcggtggtgcggcagctccgggaacagctgctgcggctgcgcgacgaggcgggcatgcgcaaggtggtggtcaccaacctgcaccccatggggtgcacgccgctcttcacccgcgctctcaactacacggcctgcgacccgctggccaacgcgggcgccgtgcagcacaacgcggcgctccagtccgtgctcgccgcgctcgacccggccaaccgtaccttcctcctcctcgacctcaacacgcccttcgccgccttagtcgacggcgcggcggcggcgacggcggaggagaggttcgcggagccgaggcggccgtgctgcgagagcttcagcgccgacggccactgcgggcagcaggacgacagcggcaggcggcagtacacgctgtgtagcgacccgagcaagcatttttactgggacgacgtccacccgacgcaggccgcgtgggccgccgtctcccgaacgttcaggcccatgattcaagagttccttctgtctacctgatcacagctttgtttcgatcagatgagataaaaactagcactacttatcaaaagaaccaatcaatcaagggtggagagctaaccgagttgttggattagtgaaattctcctgtcattgttactctaaaaatggctggattttttgtattaaaaaaatccacggtgcgagatgttggaataaaaaagcgatcttcagttcagtat

SEQ ID NO: 22227 - DNA, 1265 bp, Zea mays
  Clone ID: LIB3357-045-B12_FLI
ctcatctcctccccaacccgttgtccactgcctccaggcaaaccggcagcgccgccgccggcgatgaccaccgcgcggctcgtctcaacatcccccgcccgcctaccctccacgtcggcttccccgattcccagaacctcgctgtgtgttgtcggtcgtgcccctgctttctccgctagggcgctcggcttctcgcttcgtctcaagccgtcgcctgccatggccgccgccggcccccctaccgcgcatggagactcaataggatcttctaggattggagaggttaagagggtgaccaaagagacaaatgtgcacgtgaagatcaaccttgatggcactggtgtcgccgagtgtagcacagggataccgttcttggatcacatgctcgatcagttggcatcacatggactctttgatgtctacgttaaagcaataggcgacacccatattgatgatcatcactcaaatgaggacattgctttggcaattggaacggcactacttgaagcacttggtgatcgaaagggaattaaccgatttggtcattttacagcaccgcttgatgaggcagcggttgaggttatactggatctgtctggtcgccctcatttaagctgtggcttagatattcctactcaaagagttggcacatatgatacacagctggttgagcacttcttccaatctgtggtgaacacatctgggatgactcttcacatccgtcagcttgctgggaaaaactcacaccatatcatcgaggcatctttcaaagcgtttgctcgggcccttcgacaggcaacagagtatgacctgcgccgtcaaggcactgtccccagctccaaaggtgtcttgtcgagatcatagcatcgcagtttggacgaacgcatatcttccactgcagcgcacatcaatgagaggaaaacctgcagagtagacagcttggtttttgctgctcacgttgggagcctgcgttagcctctgaacattgctaatgggataatcaagaaccatctagcaactagcaagcaccacttattatctgccttgtgacagtggcatagcgcgtctgctcgctactgcaactctattatctgctcgctggagttacaggatatctgaagattgaaggtctagacatgctgtgagcctgtgactttgtaagctacaccggtcaggaataatgctgcgtctggatcatccgcagaaacataggggtatgtaaattgtttggacattgaagggaatgcattgatctttgcgcgttc

SEQ ID NO: 22228 - DNA, 730 bp, Zea mays
  Clone ID: LIB3357-045-B6_FLI
ctggcttctcctccccctcttaccaagtcctcttcgggttagggttacttagggttttgtggaggggcgatggcggcggctgatgtggagtaccgttgcttcgtcggcgggcttgcctgggccaccagcaacgagtcgctggagaatgccttcgcctcctacggcgagatcctcgactccaaggtcatcaccgaccgggagacggggaggtctcgcggcttcggcttcgttaccttctcctccgagaactccatgctcgacgctatcgagaacatgaacggcaaggagctcgacggccgtaacatcaccgttaaccaggcccagtcccgtggcggtggcggtggcggcggtggctacggcggcggtcgcggcggcggcggctatggtggcgggcgccgtgacggcggttatggcggcggtggcggctacggcggtcggcgcgagggtggtggcggcggctacggaggcggtggcggctacggcggtcggcgcgagggtggtggtggcggctacggcggcggcggcggcggctggagggactgatgtgtgggcccatcctggcttcggccgagttatcttatctatctatagtatcgtgttaccgttcgcttctgtcaccgtgttagtgtccgttctacctttggattaggtgttggtacccctgttgttccctttggttgctcccgctatgaaacgagacgagagaagaatgagcaaggtttttgttcgc

SEQ ID NO: 22229 - DNA, 2564 bp, Zea mays
  Clone ID: LIB3357-045-C4_FLI
ggacgtgggcccccgacctgggagtccgtccgacgccaccatcggccatcgcctcgtccgccccattatgctcctcaaaccgcacgcgcgcgcgcgactcaccgccgttgtcgtcgtcgtgttcgcggagatccgcggggctcgcccatccccctcctccctgctctcctccccagcacccacggcccgctgctgcccctccgcgcgccccctcgccaaaccctagcttggccatctccccccactgccccggcgccaccacctgccctgccctgcgcgtggccggcggcgccgaccgccgccattgtcttacgtaggcgtccgagtcccgacgcgttggaatgcgctgactgaagtgtgatcattgaggttctggttaaagaaacttctagtatcgattggcttccctcccatggacaagatacaatctgattgcccttatcctggatgtttcttttgtgtcatgaaggaggcgaaccctagtaaacgaagagcaagtgtgttaaagtactttagggaacttccttcccaagacgatgatggtcaagttctccctattagtggtctctggaacacagcaatggctcacccaaatgatcccgagttcatcaacttgggcatatttgaatgcatggcatctcttatatggaaagggttgaaaaacagacgttggcttgcacatgatcagaatatttacatcccatattatgcagctcacataattggatcatacacaatgaatatggaggagtttgcagagcgtgctgttcgtgctggtgtaatacctccattagttgaattattaagaggtaggttgacatgggtcgagcaaagagttgctgttagagctttgggtcatttggctacatatcctagtacatttcctgcagttgccgatcatggggaagtacttgaacttgccattcaacttgcttcgagctcgctagaaattgtgtactctcacttttaccagtttgtggatcgaagacttggctaccattgcgaccttcttactcgtggcatgggtggtgtggaaatggagtcccgcaaagctgaggaatgggcaagtcaactgcagtgctggtctttgcaactcattaactgctttgcatttaagcctgaattcctccatgatatttgcaagcctgattttctagtcaagttacctggaatgtggggtggacttgtaaatgagaactcacctgctggtgttggtttgctaagaacaatctgccagagcaaggttggccgaggtcatgttgctaacattcctgctactattgatgctttatgcaacattgctcgttcttcagatgactggcaatacatggcagttgattgtctgatctggttaatgcaggatgcaagtacttgtcataaggttaaagatatagttgcgccaacactgatagatttatcagatatttcggcactgggtgattataaaaagcttggtgacacaattgtcacagtcctccaagaatgtatgcaacagagtgggaactcacgtggtgcaattggtgttcagaccaaagcagaaattgatgagcttttgagatccaagcaaagtctgaaattggaaaagagtatgccaaaagaggatcttcatataaaacaagctgcggcattggttgtcaagttggaaggcaattcactgttctcctcagggaacatcgcaggagctgcagagaaatactctgaagcgcttgcgttatgtccgatgaaatccaagaaagagcgggtggttctttacagcaatcgagctcagtgttaccttctcttgcagcagccattggctgccataagcgatgctactcgagcattgtgccttcacagccccgtgaaccgtcatgccaagagtttgtggcgaagagctcaagcgtatgatatgcttggtcttgcaaaagagagcttgttggacgcaatccttttcataaacgagtgctctcagtcgaacgatcccgacttatccctgaagcaaaacaaagtccctgactatgccgagcggttggtgaagaagcagatgcgctccgcttggctattcagggaagcagctctgaagcacgggggcgtacactgtgaaggagatgctagcgacgcgtttggccaggatgctgacgactctgagtgggaaacggctagcgaaagcgacgccgagaatgatgacacgggagaagcggatgatggaactgaatggaagaacgatggacaccgggaagatatctgtgagaaaagctgaggagcagggcaagctgaacctattcagagggagtcaaactgagcagtgacagaagcagctgctgggccttatgaagtctgctgcgctatcagcctatcaagcatcagatctttctaatgcagcgatctggtaacatttctactgtcctcgtcaaagcaaagccccagttaaactaattccccacgtcttgttgcttggtcagttgagttattgcgcctgcgaccattcaatgtttccccttagatgttggttctggtttggtgtttgtagcatgctctttctttcaccagtttctcaactctttgaatgaacaaaactgtgcatt

SEQ ID NO: 22230 - DNA, 623 bp, Zea mays
  Clone ID: LIB3357-045-G7_FLI
ccaatctgcccttgccgccgccgcccgatccaggtctgtagactgctcactcctctccgctccggtccgaatggcccgcacgaagcagacggcgcgcaagtcgaccggcggcaaggcgccgcggaagcagctggccaccaaggcggcgcgcaagtcggccccggccacggggggcgtgaagaagccgcaccgcttccgccccggcaccgtcgcgctccgcgagatccgcaagtaccagaagagcacggagctgctcatccgcaagctccccttccagcgcctggttcgcgagatcgcgcaggacttcaagacggacctgcggttccagtcgtcggcggtggcggcgctgcaggaggccgcggaggcgtacctggtggggctcttcgaggacaccaacctctgcgccatccacgccaagagggtcaccatcatgcccaaggacatccagctcgcccgccgcatcaggggcgagagggcttgagctgtcgcgctgctgttcgtcgttgtaatgtctgaagaggatggtgggttcatttcatgtcgtgcctttcgtggatgtgttgccctctctgaatggaatgcgactgcccttgtccgaaattaatgaatgcccttgttccttc

SEQ ID NO: 22231 - DNA, 893 bp, Zea mays
  Clone ID: LIB3357-046-B4_FLI
cagaaggccccaacccatctcatcactcaccgctcccaaggcgagagatctcacctccccattcccaaaccaacccaaacgccaaaattcaaagctgacgatcgatccaaaaacgccacaaatcccaccaaatccacctcaaatttgccacaaaatgccccagattggcacccaaaccccgcacccaccgtttcaaatctgacctcgccattcccactcctcccactctacccaccgcatactccagatccccaccgcaatggcgaccgcggtctccaaatccgccgtcaaatcccaccccaggttgcccaccacagcgcagccgccgccgccgaaccccggctccaacgccgcgtcggctggcggaggggcggcgcctccgccgccgccgtctcccgccgccggcgcgacgccgtcgaagaacgcggcgatggcggagctcaagtcgcgcgtgctcgccgcgctcgtcaagctctcggaccgcgacacgcaccacatcgccgttgaggagctggaccgcatcatccgcgcgccgccgtcgaccgacgccgtgcccatgctgctcaatgcgctggcacccgactccccggggctcgcctccccggccaggcgcgagtgtctgcgcctcctcgccacgctctgcacgtcgcacccggatgccgccgcgccgcacctccacaaggtgctcgcccacctcgcgcgtcggctaaaggacccggcgtccgacacttccgtgcgcgacacgtgccgagacgtcgcggggcagctcgcggcagtgtacctccgccctctgtcggcttcaggcgtttgcgaggcgggcaatgcgaccgtgacgctgttcgtgaagccgctgttcgaggtgatgggggagcagagcaaatcggtgcagggcg

SEQ ID NO: 22232 - DNA, 1100 bp, Zea mays
  Clone ID: LIB3357-046-H9_FLI
ctctctcacaggaccacggctcgcgcgcgcgggcaccgactccaaaatagatagatctcatctcatctccttcttgctgataggttgtttggttgcttacttagcttgcttgtcagatggacctggtgccgcacccggacagcccgcactccgacaacagcggcggcggcggcggctcggcgtccggggcgctgtcgccgggggcgtcatccgcgggcgcggcgtcggcgctggcgtcgccgagccggtacgagtcgcagaagcggcgggactggaacacgttcgggcagtacctgcggaaccaccggccgccgctgtccctggcgcgctgcagcggcgcgcacgtgctggagttcctgcgctacctcgaccagttcggcaagaccaaggtgcacaccccggcctgccccttcttcggccacccggcgccgccggcgccctgcccgtgcccgctccgccaggcgtggggcagcctggacgcgctcgtgggcaggctgcgcgccgcctacgaggagaacggcgggcggcccgagaacaaccccttcggcgcgcgcgccgtcaggctctaccttcgcgaggtccgcgaccatcagtcccgcgcccggggcgtcagctacgagaagaagaagcgcaagaaggccccggcgcaccccgtccctgccgccgtcatctcctcctcccacgacggcaacgggcaccactacgagcaccagatgccgccgccgccgccgcccggcgccgcggcttgactggccagccggccggccggccggagctcccggtcccggcgcggccccatgtatgctactaccacatgcactactattagccgatcatcttcttggtcggtgcctctctatagctagctgaagctcctgtgatcgactactatatatctattgcctctatctagttcttggctcctttctactatcgatctgtggctatagtttagctgccactactgctagtacaactgctgctgctgctacaaattactcccgttgctctttcaaatatgcttttgctgctggtattgctactggaactactactgtctcttgattaggtcagttctcgatctgatcgtttcccagctt

SEQ ID NO: 22233 - DNA, 885 bp, Zea mays
  Clone ID: LIB3357-047-A3_FLI
ctcagctgagccgagcggaaccagctcgcacgagaggaggcggccaaacggagaggaagtgagaccgaggtgagaaactgacaggacaggagtacgatcaccgccgcccgcagcaagaagagagcatggacttcctcacgcttccccgccgcgatctgcaggcgctgtgcaagcgcaacggcatccgcgccaacatgaccagtgccgccatggccgacgccctccgcgcgctccccaaggtcgaagggatcgaggagtacgttaaggttctgcagccggtctccgtgccgcaaacggcggctaagccggtgaatgaggagcagaagcaggagagtccgcttccgcgtggccgccgcgtcacggcccagtcatcggagcccattgagccggaggaagacaaggaaaatgatgcaaagcgacagtcgaacaaagaggacgtgcaggtacctggcgtcgggcggcgtggtgccagccgtcgcgctaggcccgtgcccgccgtgcctcagccgctgggcaaggcagtggcggaggaggatggccagggagagcaaaatctgaagcgggaggccaaaaaggatagcgcgcctgctcccgtcgtgggccggctcgctcggccctcgactgttgtaatcgcgcgggcagacgagtcggaggttgcaggtgtggaagaggagcagagcaaggaggtggtagatgatgcgctggcccttggcgtaggccgccgcggtgccagccgccgcgctcggccggcgccttctattgctgcgctagcaggcaatgtggtagcggatgaggagcagatagtccctatcccacgcggccgtcgtgtgaaggcccatggaaactcgtctgagcctatcaggttggacaccagttatgatgatg

SEQ ID NO: 22234 - DNA, 1168 bp, Zea mays
  Clone ID: LIB3357-047-E7_FLI
cacggaggaaaagcatctccaaaaaccctagctcccatcccctcgctgggaagtctcgtcggcggcggcggcggagatgggcaaggcgaaggggaagcagcgtcaggacaagttctaccacctcgccaaggagcaagggtaccggagtcgcgcggcgttcaagctgctccagctcgacgcgcggttccgcttcctcccgacggcgcgctcggtgcttgacctctgcgccgcgccgggagggtgggtccaggtggccgtcaaccatgctcccgtgggtgccttcgttgtcggcgttgacctcgttcccatacgccccatccgcggggcccactcgctcaccgaggacatcaccgccaccaagtgccgcgccgcggtgcggaggctcatggactccaacggcgtctccgctttcgacgtcgtgctccacgacgggtcgcccaacgtcggtggtgcctgggcgcaggaggctacatcgcagtcggcgctcgtcatagacgcactgcgcctcgctaccatgttcctcgctcccaagggcgccttcatcacgaaggtttttaggtctcaagattacaacgctattatgtactgtcttaaacagttgtttgagaaggtcgaggcgactaaacctacggcaagtcggtctacatctgctgaaatttatatcatttgcctgaaatacaaggctcctgcaaagattcaaccagaacttcttgatataaagcacttgttcagtgtggttccagaacagaccaaatctagggatgttatggatggtaggaaaaaaagacaccgtgatgggtatgaagaagggaatacaacattacggaaagttggtttggcatcagactttatatggtctgacacccaggcgccactagagtttttgggctcttacaatgcaatttcattcgataatccagaatccctggccataaagaatcatgagcttacaacagatgatataaaaaatttctgtgaggacttgcttctgttggataaacatagtttcaagcatattttaaaatggcgaattcgtttacgaaaatcactgtcagcgtcatcacaagtcaccccaaaggtcaatgatgctgtggagagcacaaaggtcatggatgatgatgtacttctacaggaaatggaagaattgactagtgtcattgatagaaag

SEQ ID NO: 22235 - DNA, 1077 bp, Zea mays
  Clone ID: LIB3357-048-E6_FLI
cacgtcttctcattcctcgacaatggagatccaggcacgacagctactggtgtctgtttttggcattctgatagcgataggtttcgccaatgccgcgctgggagagacagcaccgccggttgttgtcggcttggccaagtgctcggactgcgccaggaggaacatgaacgccgaggcagctttcagaggtcttcaggtggccatcaagtgcaagaacagcaagggggcctacgagagcgcagccgtgggacaggtgaacaagtccggggccttcagcgtcccgctggccgccgacgccgtcggcgaggacggggagctcaagtcggaatgcttcgcgcagctcatccacagcgcgtcgagtgcgccgtgccccgggcaggagccctccaggatcgtcgccgcgccacccggccacacggcccacaccaacggcaacgggaagacgttcctcgcgctcggcggcagggtctaccaaccgtcgcccgagtgcgcctcggcgttcctctgccaccctttcttccacagcatgcaccaccatcacgtaggagtccacacgcctgtggttatcccgcacctgcccgttcacggccactccgtgccgcctgtcaccaagccgccgccggtagacgttcctgagcacaaaccggcgccggtgcccgtgccggaccacaagcctccgtcgacgccgccggtagacgctcctgagcacaaaccggcgccggtgcccgagccggagcacaagcctccgtcgacgccggcgaacgctgcaccgtcgacgcccacggagccgtcagcgccggttaattcgccgccgaagccagcccccatctaccacccaccggcaaggcacgacgctgccactggcccgtagctcttcaagaggctgctcccgttcttcaagaagttgcccttctttcctccttctgcgatggagagtcagcactagaatgtttggacagtgtttcttggcttttgcaggttatgcagtttcctcggaataatttgtgacgttgattagttcagcatgaacgttgggtcagtttaagagtgtgtgttctacttccatctaatggaggc

SEQ ID NO: 22236 - DNA, 1236 bp, Zea mays
  Clone ID: LIB3357-048-G2_FLI
cttacccatctcaccacccaaaccctatcgcctcctcctcctccgccgccgctccctagggtgaacccatcgtcgccccgcctaggcccacaacgccctcctctgcctgtgagccaggcgcccctctcagtcgtgtgcagggcgagccgctgtcatggcggctgttttttgcgagcgtgagctccgcccgctgacggtcttggacatcgtggctaggcaccttcatcgtgtggcagattcgtcaagggagcttgcttactaaacagagttatgctgtggcttgtgcgcgcggcgcggggcgaggatggcatcccacatttgatgatgcggcaggcagggcggtacatggcggagtaccaggcgtcggctaaggggaaactcacattcggccatcgggttcggggagctcccagctgcgaggttttgaggtgggattttgacctcaaggtccaaggagatgcttatggcgtcgatgtcagacatcgagacaacaaaacggggtagcatgtggggactggatcagaaccttgatcagcccaaggacaaggatgtcagtcaactgaaggacatgtacagataaaaggtacatcaccattgtatgttttctacgccacatggtattgatgaagacgaggatgtaatttgagctctattgttgatcattttacactcactctcatccctctgatgaagtatgtttttgttgtcttgcaagctaatgataatggtcaaggttggcaagttgtcgactggggatactctggacatgactctctaggatgaggaggtgatactgagaaatggagctacaataaaggatatggagagtcatgtcttacttctcagcatgattcatgtattggtcagcaagaggataatgacccctgcacataaagacacatgctctatttggcagcccaactttgggctgcatcgggtacaagcagcagcagcaggggtggtggtcaaggctcaggattcagagcagaagatgcacataaatactggtgaatgatgccatcgacgatgatgaattgatgaaacgatggatgatgccatcgaatggaatggaactcaaattttggtggtcgcacaagtgtggagacatgatttatatatactttgttaggctcaatgttagcacaaacagttgatgagcaagtttaaaattagagtacacttatgtatgagttatttgacaatgcttatttatgagatattgaatggtatttatct

SEQ ID NO: 22237 - DNA, 736 bp, Zea mays
  Clone ID: LIB3357-048-H4_FLI
ggtgggctggcttctcctccccctcttaccaagtcctcttcgggttagggttacttagggttttgtggaggggcgatggcggcggctgatgtggagtaccgttgcttcgtcggcgggcttgcctgggccaccagcaacgagtcgctggagaatgccttcgcctcctacggcgagatcctcgactccaaggtcatcaccgaccgggagacggggaggtctcgcggcttcggcttcgttaccttctcctccgagaactccatgctcgacgctatcgagaacatgaacggcaaggagctcgacggccgtaacatcaccgttaaccaggcccagtcccgtggcggtggcggtggcggcggtggctacggcggcggtcgcggcggcggcggctatggtggcgggcgccgtgacggcggttatggcggcggtggcggctacggcggtcggcgcgagggtggtggcggcggctacggaggcggtggcggctacggcggtcggcgcgagggtggtggtggcggctacggcggcggcggcggcggctggagggactgatgtgtgggcccatcctggcttcggccgagttatcttatctatctatagtatcgtgttaccgttcgcttctgtcaccgtgttagtgtccgttctacctttggattaggtgttggtacccctgttgttccctttggttgctcccgctatgaaacgagacgagagaagaatgagcaaggtttttgttcgc

SEQ ID NO: 22238 - DNA, 1999 bp, Zea mays
  Clone ID: LIB3357-049-B12_FLI
gaacatccaaagctcctgcactgcacccctgtcagtcaggcctctagctgcagccaaaaaccgctggccttgaacatctccccatccgcctcccgcggcctgccacgcgacatgattgagtcgcgggctgctgcggagctcagctgcccccgcacgccgctggcgacgccttctgcttgcccgcctctgcccgcccgccttccctgatccctcctcccctttgcttccgcacgaagatctgggcgtgtcttcttccgacaaagctgttcaggcaggggagagtgcctgtttcgagggggcgtggagcggagccggagccatggggaagaagggcaagtggttcggcgccgtcaagaaggtcttcagccctgaatccaaggagaagaaagaggagaggctaaggaggaagtcagcaggtagcaacccgacgccggtagatctgaccccgtctacctccttggaagtcaatctttcggtgccaccgcctccagctcctcccccagttcttcaccaggccgaggaggttggggtccctgaagccgagcaggagcagagcaagcatgtcgccgtggaggaggcccctgctgccgccccagcgcaggcgtcggtgctgccacctgctgtgccaacccaagagctcgccgcagtcaagatccagaccgccttccgaggttacctggcaaggagggcactacgagcactgcgaggccttgttcgattgaagtcattggttgagggtaattcagtaaagcgtcaatctgcaagcactctgcgctgcatgcaaactctatcacgggtgcagtcacagatatcttccaggagagcaaagatgtccgaggagaaccaggctctccaacgccagctcctacttaaacaggaactggagaatttcagaatgggtgagaactgggatgacagcacccaatccaaggagcaaatcgaggcaagcctgataagcaggcaagaggcggcgataagaagagaaagagcgcttgcatatgcattttcacaccagtggaagagtacatcgagatctgtcaacccaatgtttgtagacccaaacaacctgcagtggggctggagctggctggagcgctggatggcagcaaaaccatgggaaggccgcaatggggctgacaaggagagcaacattgaccggggatccgttaagagcatgagcttgaaccttggagagggtgagatcacaaaagctttcaaccgccgggactcaaagctagaaaagccatcgccgccaactccaagaccggcccgtccaacttccaggcattcccctttgacgccctctgctagagtggcaccgatacctgcgaggagaaaatctgtcacgcccaagaacgggctttcacaggtggacgatgacgcgaggagcgtgctcagtgtgcagtctgagcggccaaggaggcacagtatagccacctcgactgtgcgggacgacgagagcctcacgagctccccgtcgctcccaagctacatggttcccacagaatctgcaagggccaaatctcgcctccagggttcagcaatggccaatggcgcagagacacctgagaaaggaggctcaactggaccagccaagaagaggttatccttccagggtggaactgcggctgcctcgccaatgcgacgacattctggtcctcccaaggtggagatcgcgccaccacaaccagaggccttggtagtcaatggtggaagcaagtgacacatatgtgatgagtaccaggatgagaaacggattatgaagatattagtttcattttcatccatgaatagaagttaaaagtggtatcatatctatgaatggtttcaattgtttttctgttacaaccacattatttgctatatacgattcacagtacctgccagttgattccattggttgtttctgtaaaacaaatatcaatttgtcactagaatctgtgatgtttgtatgtaaacagatcctctatttatgtgagacatatatttcttttctttc

SEQ ID NO: 22239 - DNA, 841 bp, Zea mays
  Clone ID: LIB3357-049-E8_FLI
gtttgttttaggcaatttatagcttcgtgtcgtggaggcaatgtaagcggtactttggagcatgtgcatttacttctcttaatgtttttttttcgataaatctgtttttttttattcaaaattcagagtgcaagcagaggaaaacttgagtttgtgtgcagctaccttgcggaattgagcttgctggattatgactgcataagctatctaccctcagtagttgctgctgcctgcttgtttgtagccagattcataatccacccaaagactcgtccttggaacttgtcacttgaacaaagcacgggttatagagtctttgatctgcagaaatccatttatgtcatacatgaattgcagttgacaataaggtgcccaaatcaggtagccatcagggagaagtacaaggaccccaagtttgggtgcgtgtcgacaatggtttcaccacgagaaatccctacgtctttccttgaaggttgccataagtgaagtccggacttggacttggagaagggtttttgcagtaatgctgctggcgagtggcgatgcagaaaatagcttgatggtaggataatttaagggtaggtcggaaaatataccatggccagcgttgtagatcgttggtacggtactggtctcacagttggtagaatatgcaattgaaggctttttgtacaggagttaggctagtccgtgacacacacgtgtgcatcctctatggtctgtctttgcgcacattatgccgagcgccgaccatctcgtgctgttggcctgtctcaattaccaccagacatttgacacgtggaatctttttaagattcaatttttaaaaattgtatttctc

SEQ ID NO: 22240 - DNA, 474 bp, Zea mays
  Clone ID: LIB3357-049-E9_FLI
gggtacgggcagcaggaagcagcagcagcagcaggcgcgcgtcggcgtcgccgccgggtcgtcggcttcgccggcggacggcgccgcccaggtggaccggcgcgcggacgagttcatccggcggttctacgagcagctgcgcgcgcagaggagcgccgcgtccacccccgactgctacggctacggcgtgggcggggccagcccctacgccgcgcgcgcgccgcggcccgtcaccgccggcatcgcgtagggccgcagcagcagcactacttgcttcacgtgtggctcactgcgcgcggccccgggctgtcagtggggggtgtgtgagtgtgtcaaccaagctgcatgagccaccctcgcgttccctctcccgggttccgggcccggcgagttgtgcacccaactcgaaacagctaaaatcatgtgctcttattgtctcccataatcttgcttaatctactcagtatttctgtt

SEQ ID NO: 22241 - DNA, 2121 bp, Zea mays
  Clone ID: LIB3357-049-H1_FLI
ctcgccgacgtttcctcctcctgcttcattcactcgtcttccagttcctcgccgcttcagggggcagacgcataatttgattgagctagcgagcgagagagccgatggcgctggacacaggaacggtggcggcgggggcgatcgacgaggcgtacgagttctctgcgcccaggttcttcgatttcatcaccgaggaaacggaggaggccgtacgcgccgccgagagctggttcgaggccgcccgcagccacgccccgtcgccgttcaaccccaggataaaggaatcgagggcggaagccaaggtcgctgtcctctgcgatttcgcggaagccgaggagccggctccagaggcggtacccgtggaggtggcagcaggaagcgtctcggtacacggagcagatgctattgatggtgctccatgtcctgaggcaatatcggaatcgccgccggcttcacatccggctcaagaagagaaggataaatcgccccaatcgttcgagttcctctcggcgacagacctatccgtaaaatcagacggtggtgctgccagcacgcctaagatgcagacgcgtcctccttctccttctaccaaaattgcccctccaatttcgacatgtgacagctcttcagtgaatactggtgcgcgcacgccaaagacgcaggcgaacatgtgcagagcaggtactatggctgcttcgacgaatgccaaggggagcgtgatcaagggtggttgtgatttggttgggactggaaaggcagccactgctggcgctgaaattgcacaagcgaaccaagcggtgaagaggcagaagcttgatgatggaagagccagacagatactcaatgttaagactaaggtcctgcctcataaacggagaactgatttagatgtaagcaatgaagtgaggaggtcccgtgaggatatgtgttctctgaaggaagcaacaacatatgtatcaactgcagaattggttaagaagtttgaatcagggaccagaaagctgagcatcactcacagcagatctcgttctcgtgacgatgctgcattacagggaaggcctaagcttgtgttaactagacctaaggaacctgagttccagacttcccaaagaatccgagcagtaaaagtaaagagctctgcagagatagaggaggaaatgttggcaaagatacccaagttcagggcacggccattcaacaaaaaaattgctgaagccccttcgttccctccacttccaaggaaacccccacagatttctgaattcagtgaattccatcttaaaacaatggagagagcaagtcgatatgcggacacctgttcggaagtatcttgtgcagatactatccggagtcgaaataagccactgaaatcgacacaacgaaagccaccgcaacttcatacagcaaatagagctaggccaccaagtgtgaaaagttctcaggaacttgaactggaggagctggagaaggcccccaagttcagggccaagccactaaacaaaaagattcttgagagtaagggagacattggagtgtttgtccatcctaagtctcaggtcacagctcccaaagaattccgtttttgtaccgatgttcgcttgggtcctccatcagttgctgacttatttgacaagctctctcttcactctgaatgtcttcaaacagtaacaggcaaggtgtgcctagatgcaccataccaaaccctttcagtctacaaacagaggaaagaggtcaattaaaagagaggcagctagaagcacaactcttacaaaagaaggtggaggaggaaaaggccagggttcacaaagctaacccttacccatacaccacagactatccgatggtgccgccgaagcctgaacctaagccctgtacgagaccagaaggctttcaactagagagtttggtgagacacgaattagagcagcaaaggctgatggaagaaaggcagagaatggagagagaagaagctcagaggagaatcgtcaaagctcaacctgtactgaaagaggaccctatcccacttccggagaaagagcggaaacctctcactgaagttcaacaatttgtgttgcatgttgatgagagggctgtgcatagatcagaatttgatagcatgat

SEQ ID NO: 22242 - DNA, 1541 bp, Zea mays
  Clone ID: LIB3357-050-B11_FLI
cggagctctatcgcgtagtacggagtccacagggcgaggaaagatgctagcaggcgcccccaccggcgatgcgggccccagctccggcgctgggagcaacccacccactcggccacggaggttccccggggcggcgcagccggagatcatgcgggcggcggagaaggacgatagctacgcagcccacgtcacggaggcatgccgcgacgcatttcggcacctcttcggtaccagggttgctgttgcttaccagaatgagataaaattgcttggtcagtccctttactacttgctaacaactggttcaggccagcaaacacttggtgaagaatattgtgatatatctcaggttgcaaccttgcatggacttccacctactcctgctaggcggattctattcattttgtaccaaactactgtgccctaccttgctgaacggatcagctccagaattgttgcccgtagtattgtactcaacgaatctcagtttgatgaccatcctgaaagtgataattctagtagtgacattgcacaatccaccacaaatagtgacattccttcaagaagcttaagtgtttctgctctgtcagggttcagaggccgagttcatgccttgtggcaatgggttcttcagaaatggccttcaatgctgccatatgctcaagattttatacagttggctatccggacaaatctaatgttcttctattttgaaggtctgtattatcatttgccaaagcgagcagctggtattcgctatgtattcattggcaagccaatgaatcagagacctaggtatcagatcttgggtatttttctgttgattcagttgtgtattcttggagctgaaagactccgaagaagtaatatatcgtcaatagctagttccattaatcaaatatcatctggaggctatccatcgactacaggtcggggcatccctgttctaaatgaagatggaaatatcatcagtgacatccgcagtggtaaagctgcagatatagcttctcattcagagacctccaatggcaagagcaaatgcaccctttgtctcagcatccggcaaaatcctactgccacaacctgtggacatgttttctgctggaattgcataatggagtggtgcaatgagaagcctgagtgccccctatgcagaactccgattacccattcgagtttgatttgtatatatcattcagatttctagcaaatcatttcgcacagtaggagtccatatcatacttcactggcgtcaaaatttccagaccatatttcggcaagaaaactgcatgccaaaatggtttcgtatacttaagtgggagaagagtacgagaccatttcaagaggttaaagatcagagagttgcatacgataatttgttgtaggttgaaagtttagattgaattagggaccacaggtagtagaaattatttattggcagttcggatagtagataacttgtattggacaccgatgtgaattttattggttagaacaatgtccgactcgaatcatcgagctatttagcaatatgttgtgtc

SEQ ID NO: 22243 - DNA, 1094 bp, Zea mays
  Clone ID: LIB3357-050-B4_FLI
ggctccgctccgttcccccgctgtagttcgagtgttcgacccggcggccggcggcgacgcgctcgtggtttccagcgatgtcggcgcaggcgggtccagggacgtactccccggcggctgccgcaggagacaagcggcgggagaggaaggaggagctgcggcgccacctcgccgaagacgccgactggccgcgggccgacggccgctccttccacgactgccggccagcgtttatgcagacaggaccaactactgctgcatcagggtctgcttatgcagaatttgggaagacaaaggtcattgtatcggtttttggaccaagggaaagtaagaaagcaatgatgtacagtgacgttggtaggctcaattgcaatgtgagctatacaacctttgccactccagtgcgtggacagggagcagacaacaaagagtattcatcgatgcttcataaagctctggaaggcgcagtaatgctgcacactttcccaaagaccactgttgatgtttttgccttggttcttgagtctggtggcagtgatcttcccatcattatatcatgcgctagtcttgcattggcagatgctggaatcatgatgtatgaccttgttacgtctgtatccgtgtcctgtttcagaaagaacatcatcatcgatccaacctcagacgaggaagcatggcaagacggaagccttgtggtggctttcatgccagcccgcaaggagatcacgcagctcacgctcactggagagtggagcgatggcagaataaccaatgcagtagagctctgtatggatgcttgcatcaagctgggtgacatattgcgtgaccgcttgaaagataccgctaccttgacgtgtgaatgacgtgttagagagagcactggcaacaacagatgttcttagctgtacaaattctgtaggcaggggaggctgatcggcctgatgtttgagtgagcatgatgcatggttatgatgatggtctccttcacggcaaaagctgtcaaaccgggaagaaattgcagggcagtgtgtatttggcatgtaacgtacttctgactgacctttgccttcatgtagcatctgtatctttctttt

SEQ ID NO: 22244 - DNA, 1126 bp, Zea mays
  Clone ID: LIB3357-051-E6_FLI
cacctctagtcagcttccactggagcacgccaccccgaattttctcccggagtcgttgccctcctctcctacccccgtacactaaagctggttcgcagatccatccggacttgatcggttccttcttttatttcttgcccatagagcccaaacattattggatggactctgtcacttgctgcgacggcggcaaggaattggaataggacgaggtggggatcacgggctgcgacggcggcaagaaattggaaaaggacggcgtggggatcagggtattcgtcttgggaaaggggatggggggtctctgctcgaaggtctcagctgtagacaagtcaccgagcgacaccgcgcttggccggaaccaggtcgccgatcatgagccaggggcgtcgttggagttggagaagccaccggtgtcccgagagtcagctgcgccggcaaagcggctggacgagcagctgcagtctttctcgttccttgagagcgtcgtccctggggttgcttttcatgccggggctaacacgggcggcgaagcggggtccaggacctcgccgcagctgaccaggtcgctgtcccagagggctggtgtgggcaaggcaaaagccggcgctgccaaggtttcagaagtgagctcaattttaggtagagctagcactgctgggcttgaaaaggcagtggaggttctagatacacttggcagtagcatgacaagtttaaattccagcagtggttttgtgtcaagttctgcagcaaagggaaacaaaatatccatgctggcttttgaggtggcaaatactatagttaaaggctctaatctgatgcgttctctatcggaacctagcataaagcatctgaaggaggtggtgcttcattcagaaggtgttgaaaaccttatatccaaagattttgatgaactgctcaagatggcatctgctgacaaaagggaagagttagaagtattcacaagagaggttgttcgctttggaaaccgttgcaaggatcctcaatggcataacttggaccgctactttgaaaaactggcatctgaacgaaccccacaaagttatctgaaagaaaaggcagaatcagtgatgcagaaactggtcacctgcgttcaaaatacagt

SEQ ID NO: 22245 - DNA, 1045 bp, Zea mays
  Clone ID: LIB3357-052-A10_FLI
tcgatttttggtgaactgctctagtgtcgtgtgtttcgtagatgtacgggcaacaacttggaaccctcgcctggaatgatcaaacaagcaccatcagaaaaccacatggctcggcaaccttggagcaataatggccatagaaattccccttcaaattcatcagatggaggagttcctggacccatgcctctggtccctttccaggaggaacttgcagttggttgtgaagagattcgtagaattgctgctgataatactcttgtgctagaggatattctgggccttaggcaagaattagctgtcattgaagacgagatccatatacttgccaaacaaaccattcccagacttcgtgttgataatgaaatggaatacagggatattatccagggaggcatgaagttagaggaacagatgcatgctcttaaacttatcaaggaagaagtgttggtcctaagttctgaaaagatggagttggaagctttgtgcaaagagctatctgtgaaggttcagtcattgtacagggagctggagcagatccaatccgagaacaagcagatacctgctataagagaagggttgcatgatatacaagaggagatttcgagggccaggatggcatacgagcatgagaaacgtgcaaaagttgagcttcttgaggagagtcaggccatagagagtgattttatcaacataaaaatggaagcacagagattgcggacagagctggagaagaggaggtctggtgtgttcaagcatcatgcatttggctcatactataaaagatagagcatggcattgcatcctccaactgataggtgggcgtcacaaagcgtagctaagggtttggtgtctattagagaaattaatcgaactcaggagtcaagaccaaatgcgtttgtctttcggatgagcagctgacagttatttgcgaacacgttgctattattatatctcattattaagtaggagtacaaattggacgattgaaagaagaatattatcaatttggtctttattgtactcctacttattttttctctcg

SEQ ID NO: 22246 - DNA, 975 bp, Zea mays
  Clone ID: LIB3357-052-A9_FLI
ggacatgccccatggtcgccgccgctccaggcatcctcccgtggcctcacctccctctcccttcctcctcccacccgtctgacgcctctgacgccgccgcagcagcaacagacgccaacacctccgcgtatgacatccagatcttcgagcccacctccatcgaggagcgtcgtcgcctcctgatccagcggcgtcgcctccgactcgccgcctcccatgcctcgcggctcaccgttgcctcgcgcgtctcctccaaactcatcagcgccaccgcctcctgctccagcggcgtcgcatccgatctgccgcctcccctcctcatggctcgtcgttgcctcccgcctcttccccaacctcgcccttgccgcccttggaggatcccaaatccgacgacgagctcagtaggcccacgcagacgcggatgtgctatgaacttcaggctgatgtgcatttctgatatattgagctcaagcgtcagattctgtatcgatggcaatgggttccagaacagtacacaaggcaatttcaagacggttattcaattgctcaaatagttcaaatgtgatttgaagtattcaccttttgacatggataaacatcttctctctgttgcatttgcaggcgaaagaaggctcatgtgctgcttcgaaaatcagttctaagaaggcaaccagggacaacaaacctgataagggaagaaacatgttctggataaatattggcctttgtttcaagactccaagcccgccaccatccagggatcaatcctcaccacgaggaccaggggtgatgccaacaaggtgtacgtgaacctttcctggggtgttgataatttagctctcgcaaacctgttcactgagcaaggaccatctatgacagtgagaacaagtcaagagggtttgatttttgtcatgtatggttccacagaagagcctgagaatgcattatcgaatctcaatggagctatgagttctg

SEQ ID NO: 22247 - DNA, 1411 bp, Zea mays
  Clone ID: LIB3357-052-F11_FLI
gacgttagtcggctcagctgtagtgtagttgcaggtgttcgccggcacacgcgcgtggccgcgaaccctagatgacgccggcgaacggcgccccagcgcgggcagcggaggcgggcccccacgaggtggagtcggaggccgacgcgttccggcgccaggtcgacgacctcgtctcgaagaccgacgtgctggagcggcgggtgaaagaggtggcggacttctacgatggcaaaaagcacggaagcggcgggaggaagggtggtggtggtggcaggtatggggcatcctcgaggggaatgccggaccttatgcgccagttcggcgtgcttttgaaagagatcacctctcataaagatgcatggccatttctggagccggtggatgttgtaactctacagcttcctgactatcacaacattattacccaacctatggacttctctaccatccaaaagaaaatggaaaggaaggatggtacttgttacaccaatgttagagaaatatgttctgatgttcgattaatttttgccaatgcgatgaagtacaatgatgatcaaaatgtcatccacttgatggctaaatcattgcttgagaaatttgaagagaagtggctccattttcttcctaaagttgagagtgaggaaaaaagacaaaaggaggaggaatcaaagggtgttgcagccacaaatacttctcgagaagttgcaattgtaaaattagcaaaagacactgatgatgagctaaatcagatcaacaggaagctggaggagctccggaaaatggtggttcacagatgcaggaaaatgacgacagatgagaagaggaagctgggtgcaggtatctgtcacttgtctccagatgatcttagcaaggcgctagagattgtcgcacaagacaatcctagcttccagactaaagcagaagaagtggatcttgatatggatgcccagagcgagacaactctatggaggctgaaattctttgtgagggaagcgctggaacgacaggccaacgttgcctctgggaagatggacgaaaacgccaagagaaagagggagatatgcaatgctctggccaaaaccacctcgagacggatcaagaagcagccctagccatcttccatatatttcactcgcgtcctctgattgtttagaagttctttttttgatactagccaccagctttgtgaaacgttttcctgcatttttttgtggagatgtgtatatagtagtatagtgcactgtccagtccagtaacaagtgatttcgtgtgtaaccatgagctggtcgcattcgcgtcccctctgatccaacaacaaacattgtctcacaatgtgattgattgtagaagcaagcttttgtcacagggcgatgttgctcacttgtggaatcagatgatgcatacatttcgt

SEQ ID NO: 22248 - DNA, 938 bp, Zea mays
  Clone ID: LIB3357-052-F12_FLI
gcaactgcaaacccctcctccgattcctcccccgcagctcttcgtccccggaggaccaagcccaccaccggagatgtcgtacgcctacctcttcaagtacatcatcatcggcgacacaggcgtcggcaagtcgtgcctgctgctgcagttcaccgacaagcgcttccagcccgtccacgacctcaccatcggcgtcgagttcggggcccggatgatcaccatcgacaacaagcccatcaagctccagatttgggatacggctggtcaagagtcattcagatccataactagatcatactacagaggagctgctggtgctcttttggtttatgatatcactaggagggagactttcaatcaccttgcaagctggctggaggatgcaaggcagcacgcgaatgctaacatgacgataatgcttgttgggaacaagtgtgatctgtctcacaggcgtgcagtgagctatgaggaaggcgagcagttcgcaaaggaacatggtcttatcttcatggaggcctctgcaaagaccgcgcagaatgtcgaggaggcatttgttaagactgctggagcaatctacaagaaaatccaagatggtgttttcgatgtatctaatgagtcttatgggatcaaagttggatatgtagtccctggccaatctggaggtgctggtagctcttctcaaggtggtggctgctgcagctaatctgctaacgcccttatgtacaaaggcatatctgcggtgtagctgcgttatctctatgttgctgagcgtaaaatagttactgctccagggtgctttgttatttgatgcaccaacgggtggcagtgcctgaacgatttgagacattcagttttatttatgtcaggtgttcataaacattctgtaaatcactagattctttactgtcattcgtcattaagcgctcacaaattctgtc

SEQ ID NO: 22249 - DNA, 736 bp, Zea mays
  Clone ID: LIB3357-052-G3_FLI
cgccaccacatgctgggccgtctctcctcgatcatagccaaggagctgctcaatgggcagaaggtggtcgtcgtccgctgcgaggagatctgcatgtcgggcggcctcgtccgtcagaagatgaagtacctccgcttcctccgcaagcggatgaacaccaagccgtcccacgggcccatccacttccgcgcccccgccaagatcctgtggcgcaccatccgcgggatgattccgcacaagaccaagaggggggaggcggctctggcgaggctcaagacgtacgagggcgtcccgccgccgtacgacaagaccaagcgtatggtcatccctgacgctcttaaggttctgaggctacagcctggacacaagtactgcctcctcggcgagctctctaaggaggtcgggtggaactaccatgacaccatcagggaacttgaggagaagaggaaggagaaggccaaggttgcctacgagaggaagaagcaattggccaagctgcgtgtcaaggccgagaaggcagccgaggagaagttggggtctcagttggagattcttgcccctatcaagtactgaggagctgtgctttgtcatcagttttggggaacatctagtctttgttttaagtgttcggtaacagtttgtgacagtataatctggtaaaccgtgttatttttctgccactcctatttgaaaacattttctagctggtgaatgaactgtttggtcgatcttgttc

SEQ ID NO: 22250 - DNA, 1062 bp, Zea mays
  Clone ID: LIB3357-053-E4_FLI
tttcgtcttcgtcctctctttgcccagctgtcggtcgcccgcgccgtcgtctccgctccgccggccggcctgcgaaaccctagcgaggcgagcgagagagaaactagcggccatgttcggctacaggaaggctggcccggacctcgaggccggcgggtcctcgctgctgtacccggggatgacggagagccccgagctgcggtgggcgttcgtccgcaagatctacgtcatcctagccgtccagctcgccatgacggccgcggtctccgccttcgtcgtcaaggtgcccgccgtctccaacttcttcgtctcctccaacgccggggtcgcactctacatcttcctcatcatcctgcctttcctcggtaagcccggctctcccgtcttttgggggattttttccccgtgagctgaaattggttgcaaccttttgcgcgcagtgctgtgccctctgcgctactaccaccagaagcatccggtcaatctgctgctgctcggcctcttcaccgtcgccatcagctttgccgtcggcatgacatgcgctttcactagcggaaaaatcattttggaggctgccattcttacagcagtggtggtgatcagcttaactgcgtacactttctgggctgcaaagaggggccatgacttcaacttcctcggtcccttcttatttgctgctatcatggtgctcatggtgttttcactaatccagatctttttcccgctgggtaagatatctgtgatgatatacggtgggttggcatcgcttatcttctgtggatacatcatctatgacacggacaatgtcatcaagcgctacacctacgatgaatacatatgggctgctgtttcactctacctcgacgtcatcaacctgttcctgtctctgctgcagctgctgagggcagccgatagctgagctcgtcaagctttcacttggatcttgttctcacatacatttgtgtatatcacaaactctgtaatggtcatggatactccaatttataactatactctgtcggtgttaccttggttcaaatggtatgtctggctttaacggat

SEQ ID NO: 22251 - DNA, 661 bp, Zea mays
  Clone ID: LIB3357-053-E7_FLI
ctccaccctccagcgcctccaccctcctcgccgcctcactccctctgcagaggtcgcagatccgtccggttagacgaagccgcccgcacccatggcctccggtgagctcgcctgcacctacgccgccctcatcctcagcgacgacggcatcgccatcaccgtgtgttctctcgcgctgcagttttcttttaatcgagttttctttttttgagcggtcgagttgttatgtggggggtgtttcttgtttgcaggccgagaagatcgccaccatcgtgaaggcggccaacatcaagctcgagtcctactggccggcgcttttcgctaagctcctggagaagcgcagcgttgaggatctaatcctctccgttggatctggtggtggcgctgctccagttgctgcttccgccccagctgggggtgctgcagctgctgctgcccctgctgcagaggagaagaaggaagagcccaaggaggagtctgatgacgacatgggcttcagcctgttcgactgagagtctgagaccctcgctacccagccattagcaaattcgcttatgctgtccaagacttatcttacgttatgtctgtaggcttttgttattacaagtactcaagttttgagtttttgagatgtggctatgacaatgtgatgaagaatcct

SEQ ID NO: 22252 - DNA, 639 bp, Zea mays
  Clone ID: LIB3357-053-G9_FLI
gccaattcactctgcccaaacctttgagcatgccgcactgcctttctttcactttttttgttggcagggtcgtctggctttccatgcgctgttcagtagagaaaagcttccgcaaagcttttctcccccacaagcagaaggctcgaaggaagttggcaaggaggaggaagatgaagtcaccacagtggcagttgacctcaacaagagtaccacaagcattgatcatgacctcgacacaattggtgagccaagggcttcctttcccaatgaactgtcgcccctgaagctgaaattgcgccgaacaggcttcaaaccatacaagagatgttctgtggaagcgaaggagaatagggtgccggctagcgacgaggttggtaccaagaggattcgtcttgatagtgaagcatcaacatgagcgatttctacatggttaccgctcggacttcctctgccgccatgaagtttatgacaaagttgtatttacatctaaactagtataggacttaaagaccttgcaatgcaatgcttcatgaaactgttgtgtgctgtattttagtacttgtgaagcagcccggtagactgcttttaaacctttatctcgtagactctgatttaagcatcaagcaactattgaacttt

SEQ ID NO: 22253 - DNA, 3189 bp, Zea mays
  Clone ID: LIB3357-054-A6_FLI
ccgtctctatctgttcctctctcccaactccagtctaatgttctcataggaggagggcgagagaagcgagcgagcgagcgaggaagctggagcaaaacaagccggtggaccaagtattcggtgacgaagctgaggcgaaggagaggaggaagggaagggccacgatcgaagagtgagcgcgtctcgtttgatctgggaattcatttcgtacagtgctaacgactttgatacagaggcataaacaatctagcctaagagaagaacactggaaccatggtttcaaaatcatactcaaatctgctagacctgacctctggagatggatttgactttcgacaaccttttaagtctcttcctcgtgtcgtaacttctcctggtattatatctgacactgattgggatacaataagtgatggtgattcagttggttcagcatcttctactgagaggaaaataatcgttgccaacttccttccgttgaattgtacaagagatgaaactggggtgctttccttctcattggatcatgatgcgcttctcatgcaacttaaagatagtttttcaaatgagactgatgttgtgtatgtgggcagtttgaaggttcaggtagatcctggtgagcaggaccaagttgcacagaagcttcttagagaatatcgatgcatacctacttttctcccatctgacctacagcagcagttctatcatggcttctgtaaacaacaattatggccactttttcattatatgcttccaatttgccttgacaagggtgagctatttgatcgcagcctgtttcaagcttatgtccgagccaacaaactttttgcagataaagttatggaagcaatcaatgcagatgatgacttcgtttgggttcatgattatcatctcatgttgctccctacattcttgaggaagaggttacaccgaataaagattggtttcttccttcacagtccttttccctcctcagaaatctataggactctgcctgtaagggatgaaatcctgaagtcactgcttaatgctgatctcattggtttccaaacatttgactatgcccgccacttcctatcttgctgtagcagattgctaggcctgcattatgagtcaaaacgtggttacattggaatagagtattttggccgaacagtgagcctgaagatcctttccgtgggtgtccatattggtcggcttgaatctgtcttaaaattgcctgctacagttagtaaggttcaagaaattgaacaaaggtataagggcaagatactgatgttaggtgtagatgacatggacatcttcaaagggataagtctgaaatttcttggactggagcttcttctggacagaaacccaaagcttagagagaaggttgtccttgtacaaatcatcaatccagcaagaagcacagggaaggacgtgcaagaagctattacagaagctgtctctgtggctgaaaggattaatacaaattatggttcttcaagttacaagcctgttgtcctaattgatcaccacataccattttatgaaaagattgcattctatgctgcgtctgattgctgtattgtaaatgctgtgagggatggcatgaacttagtaccatatgagtatactgtttgccgacagggaaatgaggagattgataaactcagaggtcttggcaaagacacccatcacacaagcacacttattgtttcggagtttgtgggttgctccccatctcttagtggtgctttcagggtaaatccttggagtgtcgatgatgtggcggatgccttgtgccgtgcaactgatttgactgaatccgagaaacggctgcggcatgaaaagcattatcgctatgtcagtactcatgatgttgcttactgggcacgcagctttgctcaagatctggaaagagcatgcaaagatcattatagcagaaggtgttgggcgattggattcggtctgaattttagagttattgctctttctcctggcttcagaaagctgtcgtcagagcactttgtttcttcttataacaaggcttctagaagagcaatatttcttgattacgatggcacacttgtgccccagtcatcaatcaacaaagctccaagtgaagaagtcatttccgttcttaacaccttatgtaatgatccaaagaacattgtgtttatagtaagtggacgaggacgtgattcccttgatgagtggttttctccgtgtgagaagcttggtctagcggcagaacatggctattttatcagatggagcaaggaagccgcatgggagtcaagctattcaaggccgcagcaagaatggaagcacattgccgaacctgtgatgcaggtatacacagagacaacagatggatcttcaatcgagtcaaaggaaagcgccctagtatggcactatttggacgcggaccatgatttcggttccttccaagcaaaggagctacaaggtcatcttgagagggtgctatcgaatgagcctgttgttgtgaaatgtggtcattatattgtagaggtgaaaccacagggagttagcaaggggcttgctgtcaacaagctgattcacacactggtcaagaacgggaaggcaccggatttcctgatgtgcgtcggcaacgacagatctgatgaggacatgtttgaaagcatcaacagtatgacctccaacgctgtcttatcacccacaacgccagagctgtttgcctgttcagtcggtcagaagcccagcaaagcaaaatattatgtggacgacaccagcgaagtaatcagattgctcaagaatgtaacccgcatcccctcgcagcggcaggatgtcagtgccagccatgggcgtgtgaccttcagaggcgtgctcgattacgtggactaggcaccaccacttagttactcgaaattattagctgggaagcatgtaaattccaccgtcttctgcctctcaatggttcattctaggagggtgtgttaatccagaattgtagtgtagcctacatgaatcgtcaccattacacaaacagcgtaaatgtgttcgccgtttcagggttcaggtgatgtgtgtaggcaattttggtagggaaggggggagctgctgctggaggttcgcggtgtgaaagggaggcctcttgttcaaacagtaattggttgtctgaatctgttctcctgctgctatattgatgatcgtgttagttct

SEQ ID NO: 22254 - DNA, 1307 bp, Zea mays
  Clone ID: LIB3357-054-B7_FLI
cttgctttgtgccaccaccgtaccgtaccaaacagatcaaatcagagatggcaagtcgtagtagctctgcagaaggtgcaggcaggacgttgcctgtcaatctcaagttgatcaccgtgctgagcatcgatggcggcggcatcagagggatcatcccggccaccatcctcgccttcctggaagcgaagctccaggaactggacgggccagacgctcgtatcgcggactacttcgacgtcgtcgccggcacgagcaccggcggtctcctgacggcgatgctcacggccccggacacgaacgaacggccgctgttcgccgccaaggacctggcgcggttctacatccagcactcgcccaaaatcttccggcagaagaatgctatggggtccaagctcgtcggcaagctgaggatggcttgtgggcccaagtacgacggcaagtacctccatgcgcagctccgacggcttcttggtaatatgaggctggacaggacactgaccaatgttgtcattccgaccttcgacattgcctacatgcaacccatgattttctccagctttgaggttgcagaggacttcaaatgctacccctggtgaaggtaagagcaaatatgcttgggatttggtgtttggtgcagatggcattggtagcagttcttcaatggcactgggtgctggtctgggtgcctttggtgccagtagcagttctgggatggttcctgaactgtcaagaaggacatctgctagtgctttgcttcatgcagcaagcactcctggtatttctggttctgaactagctgcttatctagatagtgacactgttcagaagtttgatgatgaattcaatctcctagattggtggcatgatcacaaacttacttacccagtactttcaatcctagctaaagatatcatttcagttcctgtctctactgtgagttcagaatcagcatttagtcttgcaggtaggctcattgaggagcggcgtcgtcgacttggctctggaatggtggagatgctttccttgctaaaggattgggaggcagcagatgcaagaatgcagcacacaacagaagataagatccttgaagagtccttcagagatttattcattgattagtctgttctggtattctggacatgtaatgtgggttctggacatgtaacttaattctgagatgaactatgtgatgaaataatgaaaatattgagctgggctgtactcttttcctatctagggtttctcacgaggtgtgagttttacctagataggtttttaacgaggcagccattgcaccagctcaaact

SEQ ID NO: 22255 - DNA, 803 bp, Zea mays
  Clone ID: LIB3357-054-H7_FLI
ctcgcttccgctcccggctcccctccggctacccagacatcgtccgtgcgctcgccaagagacaggaccggagaccatggcggaccagctcaccgacgaccagatcgccgagttcaaggaggccttcagcctcttcgacaaggacggcgacggttgcatcacaaccaaggagctcggaactgtcatgcgatcactgggtcagaacccaaccgaggctgagctccaggacatgatcaacgaggtcgatgcggacggcaacggcaccatcgacttcccggagttcctcaacctcatggcccgcaagatgaaggacaccgactccgaggaggagctcaaggaggcgttcagggtgttcgacaaggaccagaacggcttcatctctgcggcggagctccgccacgtgatgaccaacctcggcgagaagctgaccgacgaggaggtcgatgagatgatccgcgaggccgacgtcgatggcgatggccagatcaactacgaggagttcgtcaaggtcatgatggccaagtgagtaaagcctgcggtaacggtatagtaccccgcgggaattgaaggaggaaaccaaaccgtgcatcgcatattagaaaggcagtgcaggtcttgtttccttcgtcttccccatgaagaaaccgtactagctgtagctgctgaacgtttgagtccccctgctgccacccttatctccatttgtgtcatcgaaactccttgcttcccctgctgtgtgaatctgtacggctttgcgtgttctggacactgattgcagttgaatccagtttgtagttctatcc

SEQ ID NO: 22256 - DNA, 1329 bp, Zea mays
  Clone ID: LIB3357-055-B8_FLI
caaaaatttccagccgccactctcttctccttctctcccacgcaccttcttcatccttgcgtagggcggcagcagccaccagcgagccctgctccacgcgccccagccatggcgcccttcttccccagcgcagggagctcggctcccttcctcccagggcgctggcctctctcccatggtcggccctctgctccggcgctcggcatccctgcagcaggcgcccttcttcctccctggctcccacggcagcaagcagccagcagggagcaaggccagcccccatggcgcccttcctcctcggctcaatggtgtggccgagcagcagcctcttctctctgtttcctatgcgtgcgcaggggcagaaactccatggccgccgagctccattcccccaaggagcagctccctccatggcgccatttctcccagccgacgccctcattcctccctgcgcagcgccccttttcttctacctcttgccggcgcccagaaattccagcagcgagcagcgcacgtcctgctgtccatggcgtgcagcaaacgtggagctcagctccacctctccccatggctgcgagctcccttccctagctgctcggctccccctcccatggaaaccagcagcctcatctcctctccccaaccgatgcccttttttttccacctccggcagcaagctgcgaactccatttctccatggccgcgagcttttccttgctgcgactgtctcccaaggacagcgcgcagcagcctccccgtggccatggtctgcaacaagaagtcgcgcgctacatgttcgatgttttgcgcagcagctccgatgtctccgcgcggctcgctgttttgtgttgcgcagtgagcagcacgccgtgatgcccgtcggtggtttgctgtttttgcgcagccccgtcgtcgtcgttgttcacccccggtgaggccacgtaaatccttgttcgattccgcatcggtattaatttcctatgattaattgtgtgtgtgtgctgttttgttgtgtttggtggaggagagaaaccccgtgttttgcgaggagaaggcaagccgctcaacgctcgtcgatggcgaagctatgcacaaatcggaatcaccgtcgttcttgcaaacgccgtttgggtttgtttatggtgagccgatgcaggtcgctctcgatcggctcgattaattattttgaatgcatatgtgtaaaatatttcggttatgcgcattggtaggatcacgtttgcggttagagagcaagaggttgttgatgtgagcgatttgtagtttgtctaattacgttttggtcgatgtggtgtatagtggtgtttgatt

SEQ ID NO: 22257 - DNA, 1698 bp, Zea mays
  Clone ID: LIB3357-055-E1_FLI
tataatcaccatttctgttcacgcgatcgagaggcaaaattaagcatggtgtcccgaaggttcaagccgatcgagctgtgcgactccgaggggcggtcgcgccagacggtcgccgccgacctcgacggcacgctcctcctgtcccgcagcgcgttcccgtactacctcctcatcgcgctggaggccggtagcctccttcgcgcggtggcgcttctcttgtccgtgcccctcgtgtacctcacctacgtgaccgtgtccgagaccctggccgtgcgcgcgttcatctacgtcgccatggccgggctggaggcgagggacatcgaggccgtcgcccggtccgtgctccccagcttctacgccggcgacgtccacccggagggctggcgcgtgttccgctcgttcggcaggaggtgcgtcgtcaccgccagcccgcgcctcatggtggagccgttcgccaaggcgtttcttggcgcggacgtggtgatcgggacggaggtggaggtggcccagtccgggaaggccacggggttcgttgccgggcccggggtgctcgtcggcgagcacaagaggcgggcggtggcgagggagttcggcgactcgctgccggacgtcggcatgggggatcgcgagagcgacttcgacttcatgtccatctgcaaggaagcgtacaccgtaacacgacagaagtaccgcgcgctgccccgggatcagctgcagggccgggccatcctccacgacggccgcctggcccgccgcccgacggcgaccaacgcgcttctcactttcctgtggatgccgctcggcttcgcgctcgcgctggtgcgcgcgcatctgcacctgctcctcccggtgcgcgccctcgcctacgcctacaagcttacgggcgtcaagctggtggtgcgcggcaacaggccgccgccgtccaagaagaagaagggcgaccagctaggggttctcttcgtgtgcaaccaccgtagcacgctcgacgccgtcgcggtgggcgtcgcgctgggccgcaaggtgagatgggtcgtcacagacggcggtgcgggtgcctccaggttctcggagcccgtagtgtcgcctatcatgacaggcgtgccgctgcccgtgcccaccagcctcgagggcgacgccgacgcggacgccgccccccgcatccggcggctgctcgaggagggagacgacgtcgtcgtcttccccgagggcgccatctgccgcgagccgttcctgctgcggttcggcgcgctcttcgctgaggtcaccgaccgcatcgtgcccgtggccatcgaacctagggagagcatgtttcacgggtccacggcgcgcgggctcagagggatggatccctacttctttttcatgaacccacggccgacgtacgaggtcacgttcctgaaccagcttccaggggagctcacctgcggcggcgggaggtcgccggtcgaggtggccagctacgtccaggaggtcctggccgcgcagcttggattcgagtgcacctgatgaagcagcaagtgcaaaagtggcatggtgacggttgcgtggcgttcaaaggtggactagggaacacagagcatgcaaccaactgtcaattgccgtgtgttgagagtggtgatcagttcatggtttcacgtttgctgttgatgtctgtgataagaaccatatgtatctctacaactattaagagcgttgtgt

SEQ ID NO: 22258 - DNA, 1378 bp, Zea mays
  Clone ID: LIB3357-055-F7_FLI
gaaaaacggagaaatttcctctcacaaaaccctcgccagcttatcccccttccctccctcacacgatctctcctcgacggctaacccggattgccgtctcaggctcgggatccgggcgctcgcggcgatggacggcggcggcggcggcgctggcggcgcggagggggagctcacggcgcaggagacagcgctctacgaccgccagatccgcgtctggggcgtcgatgcccagaagagactaagtaaggcgcacgtgcttgtgtgtggcatgaacggaaccaccatcgagttctgcaagaatattgttctagctggagttggaagtttatccttgatggatgataatgtagtcacagaggaggatctgaatgcaaatttcctaattcctcctgatgagagcatatatggtggtagatctcgagcccaagtttgctgcgagtctttgatagatttcaatcctatggttcgagtttctgttgaaaagggtgatccatcattaattgatggagaattccttgacaagtttgacattgttgtacttagccgtgcatctcttaaaacaaagttgttgattaatgaaaactgtcgaaagagaagcaaacacattgcattttatactatagattgcaaggattcatgtggtgaaatatttgttgacttacagaagcatagctatgttcagaaaaagcctggaggagcaactgaacaacaggagttgacatattctagtcttcaggaagctatctctgtgccttggaatagtctaccgaagaagacggcaaaattatactttgctatgagagtactggaggattatgaattatctgaagggcgcagccctggcgaaacaacactttctgacatagatgcagttctggctcgaaggaaggatatgtgtgataaaatgtctttgaatgagtctcgtattcctactactctcgtggaacgactgctagcagctggaaagaaggagcatcctcctgtatgtgctatccttggtggtattcttggtcaggaggtgatcaaatcgatatcctgcaagggcgatccagtcaagaatttcttctatttcgatgtggctgacggtaaaggtgtcatcgaggatatcccaccaccaccacctgcaaaataaagcactcagctgtgtaactctcgactcgacttggttcactaatcgttttctgtacccactcagcttcgaacatgtagcaacttttagatctagagccatgtgaaaaaaggcaagtttgactttaacccagatgtttagggattgttcgagcagcaaactgtgacagtatgtatgcatcgacaatttaaagctgaagtctggacggtttccatgcttttgggggcggatttcctttgttgtcccttt

SEQ ID NO: 22259 - DNA, 1275 bp, Zea mays
  Clone ID: LIB3357-056-A10_FLI
caaacctctctgtttcgggctctccgtccccggcgtccaacacccatactctccccaggttgtgtgccacacccacactcaactatatacgaaaaccgccggcgcctggcccctaggccctagtcacagacccttgttctttcttcgacgcgcccccgggcatggcgaaccgcagtgttgccatgggcgtggccctcgcgttcgtggccatgaccgcgctctgttgcgcgccgggcgccgcggagttgcccaggctggaccacccggccaggagcgacggatcgctgaagctgctcgtcgtcggggactggggacgcaaggggactcacaaccagtcccgggtcgccgaccagatgggaagggtcggggagaagctcgatatcgactttgttatatccaccggggacaacttctacaaggacggcctcaagggcgtgcgcgaccaggcatttgaagaatcgttcgtggatatctacacagctcaaagcttacagaagccatggtactcagttctaggaaatcatgattacaggggcaatgcgctcgcacagcttagcccagtcttgaggaagatcgacgaccgattcatttgcatgagatcgttcatcgttaacgcagaacttgtggacttcttctttgtcgacaccactccgttccaactggagtattggactcaccctggcaaggatcgttatgactggagaggggtggcgcctcgaggcaagtacatagccaatttgctgaaggatctggatgtggctatgaagaaatcaactgcaaggtggaagattgtggctgggcatcacaccatgaggagtgtgagtgagcacggggacactaaggagcttctggaattactacttccagtcctcaaggacaatggcgtcgacttctacatcaatggacacgatcactgcctggagcacattagcagcagagacagtccactccagtatttcacgagcggaggcggttccaaggcatggagaggagtcttccatccaaacaaggacaaactccggttcttctacgacgggcaagggttcatgtccctccagctgaaccaagaccaggcgcacttcatcttttacgacgttttcgggaacatactgtaccgatggagctcgagacatccccagccctccacctatctcgatgaggaataaattggattgattttgcgccattgatatgtacaaaacaccgcctgccaactgtcatgtatgtgaaatgatgagtgttagacgcaaagaaggttatacaccagttagggtt

SEQ ID NO: 22260 - DNA, 626 bp, Zea mays
  Clone ID: LIB3357-056-B4_FLI
ccactctgcctctggttggggcgaggtccgtcgggcgccgcaaaacgcaagtgcatgcgtcgtcgcccaaggccagcctgtgtgtgcgttcgattcgcttctgctgcagctagggtttagaggttttctgggcgcggagcggacggcggcggcggcggcggctatggctgcggcggaggaggagatcgcggtgaaggagccgctggatctgatacgcctcagcctcgacgagcgcatctacgtcaagctccgatccgaccgcgagctgcgcggcaagctccatgcgtatgatcaacatttaaacatgatacttggagatgttgaagaggtcgtgacaactgttgagatagatgatgaaacatatgaagaaattgtgcgcaccacgaaacgcactatccccttcctttttgtccgaggtgatggtgtcatattggtttctccaccccttcgtacggcatgaagtttgaagttagatcatgctgattgttaattatgataactggtgtatttggccacttgatggcgttgcatggagtgtatgttatgggcctagccgctactttttctgatgggatgtaggtttaacatgtgatacaatcgtgtaaacaactgcttgtgcttggatt

SEQ ID NO: 22261 - DNA, 589 bp, Zea mays
  Clone ID: LIB3357-056-B7_FLI
caagaagctcctccccgctgtcgccccctctcctccccgtcctcctgccacgatggcaggctctgctaccgccgccgccattaaggactcataccggtcctactactttgcggtggcgaggcggcggagcaggcgcctgaggagggcgagagtctggggtgccctggcgcgcgcgttgtggcagagggcggcggcggccggggccctggtgcgcgcgtcgggcgccagggtggcgtgctggctgaggaacgctcggccctacgtcggtgacctcttcgtcgggaactacatgttcctgcaggtggcgccgtcgccgatgacgatcacgggcggcggcaccgtggtgcccttcgcgcagtacaactacggctgtaaggccagggccgtgcatctgcaccgctaccctactggggcggtgctctacgagacatagcgacgtgccactacagctccgttgttcagccaacgatggatgacttcgtcgctggcctgtgttgtgttgaaatatgggtaaataaatgttgttattcagtttggatttggaattttgtctttttggcgaaattttccttcgcaattgcttgtttcc

SEQ ID NO: 22262 - DNA, 1485 bp, Zea mays
  Clone ID: LIB3357-056-D12_FLI
gtccgtcctccggtaacgcgctcgcctgctccgcttggctcatggattttcctccagggagcctccaatcgtggggtccaggtcgatgaggcggccctctccgctgaatctggcgatggtccgcggcggcagtcgccgatcaaacaccgtcaaaactttgcaggcccctggggcgtccacttccggtgccgagagcagcgccgtggagatgggcaccgagaagtccgaagtgtacagcactaacatgacgcaggctatgggagcagcgttgacatatagacatgaactcgggatgaactacaatttcatacgcccagacttgattgtaggatcctgcttacagagtccacttgatgttgataagcttcggaagattggtgtcaaaactgtattctgcttgcagcaagattcagatcttgaatattttggagtcgacatccgtgccattcaagattattctctacaattcaaagatattgtgcactgccgtgcggaaattagggattttgatgcttttgatttgcgattgaggcttcctgctgtggttagcaaattgcacaaacttatcaactgtaatggtggtgtaacatatatacattgtactgctggacttggaagagctcctgctgttgcattggcttatatgttctggattcttgggtacagtctcaatgaaggacatcggctgctacagagtaaaagggcttgctttccgaagttggaagccattaagttggcaactgctgacattctgacaggattatccaaaaacacaatcactttgaagtgggaagctgatggttcttcctctgttgaaatttctgggctcgacattggctggggtcagagaattcctttgacatatgatgaggagaaaggagcttggtttcttgagaaagagttgcctgaaggacggtatgaatacaaatacgtagtggatggcaaatggctatgcaacgagcatgagctgataacgaaaccgaatgctgacggccacgtgaacaactatgttcaggtctccagagacggcacgagcgatgaagagaaggagcttagggagcggttgactggtccggaccctgatctcacggaccaggagaggctgatgatcagagagtacttggaacagtacgcggatgccgccgagcgctaggagaagaatgatgatgactgaggaagagaagagacacaccatgagacgacggaccgaagccgacctgaccgcaccttcctttacggagaggtcgggcttcccctctcttgtcaatcaaatactcgtagcttaaccgtgcaaaagggcacgttctgctcgcatacttggagaatgatgatgaaggagcaaactgtacgtattgttgaacagcagctgtgcagaaataacaaaggtagtagcgtaaaactactgtactgaccataatgttactactgtatgctccttcttggctatgaataataataataataataaaagagtaaataaacctc

SEQ ID NO: 22263 - DNA, 988 bp, Zea mays; identical to SEQ ID NO: 20406
  Clone ID: LIB3357-056-E5_FLI

SEQ ID NO: 22264 - DNA, 1356 bp, Zea mays
  Clone ID: LIB3357-056-F12_FLI
ggcttccggccttctatggagaagcttccttcagtgagtcctccctttccgtttaaggcagcaagcaggagcagacaggaggcgccgagagcccagcgtcggagatctccgccgccatggagacgctggccagcgccatgcggcgcgagaaccgccggtccaaggccccgccctcctcctctgcttcctccgccctcgcctcgggcagggtccctctcgtcatggccttcctctcctgcctcgcctggctctacgtcgccggccgtttgtggcaggacgcgcagacccgggcgatcctgtccggcctcctcgagaagagctctaccagcgtcccgaaggtgctctcggtggaggacaagcttaggaaccttgggtgcaaggcgattggaaggaaaattgttgaggcggagatggacctgaccaaggccaagagcgaggggtacctgtgggggaacaggactgcagctgtggactccgacaagaagcagcagcttcttgccgtcattggagtttacactgggtttggctcccgtctcaagaggaacgtcttccgtggctcctggatgccaagaggtgatgctctgaagaagcttgaggaaaagggtgtagctattcgttttgttattggtcggagtgcaaatcgaggtgatagcttggaccgtaatattgatgatgaaaatcggcagacaaaggacttcttgattcttgaaagtcatgaagaggctgcagaagaattaccgagcaaagcaaaaattttcttcagtgctgcagttgaagcctgggatgcagaattttatgtcaaagttgaagataacattaatcttgacttagctgggttaattgagatgctcgaaggccgtcgaggtagccaaggattgtacatgggttgtatgaaatcagggatggtcataagtgaagagggccaacaatggtatgaacctgagtggtggaaatttggagattcaaaaacgtattttcgacacgcttctggttctttgtttatcctctcaaaaaatttggctcgctacatcaacataaatagtgcgtcactgcagagttatgcacacgatgatatatcagtaggttcatggatgatgggactgaatgcaacttacgtggatgatgaccggttgtgctgcagcagttccagacaagagaaaatctgttccaatgcttgagcggaaggcgtggctgctggcctgttgctgtacatcctgatgaagattttgcacacctgtcattttgtatacactgctttcgtgaaccggaaaaggctactatccagatagaaacggcttgcaccaaaatttaggaacttccatcaaaaagaaaaaaaaagaacaattttttccatcc

SEQ ID NO: 22265 - DNA, 886 bp, Zea mays
  Clone ID: LIB3357-056-G11_FLI
cctcgggtcaaaccctaagcagggagttgatttatccgctgcagccatgagtaagttgcagtctgagtctgtcaaggatgccatctcccagattgttggggatgccaaggagaagaataggaagttcactgagactgtggaacttcagattggtctgaagaattatgatccacagaaggacaagcgtttcagtggctctgttaagttgccccatatccctcgtcccaagatgaaggtgtgcatgcttggtgatgcccagcatgttgaggaggccgagaagatgggacttgactacatggatgttgaggctctcaagaaaatgaacaagaacaagaagcttgttaagaggcttgccaagaagtaccatgctttcttggcatcagaggccatcatcaagcagattccccgtctccttggtcctggtctcaacaaggcaggcaagttcccgaccctggttactcaccaggaatccctcgaatccaaggtgaacgagactaaggcaaccgtcaagttccagctcaagaaggtcctttgcatgggcgtcgccgtcggcaacttggcgatggaggagaagcagatccagcagaacatccagatgagcgtgaacttccttgtttcccttctgaagaagaactggcagaatgtgagatgcctctacgtcaagagcaccatggggaagccatacagggtgttctaagtatgctcttttgtgaagtctgctaggttctggcaccgaggttttattgaattaaactcttgttaaggatatgtttttggacgatcctatatttcgtcctggcgctactatgtttcagaatggtggtactactataagtatcctggcgctctaagtattgcttgaaaggatcaatataatttgcgtgtc

SEQ ID NO: 22266 - DNA, 1036 bp, Zea mays
  Clone ID: LIB3357-056-H3_FLI
cttggtagagtgacccagttatttgtttctgtagtctattcttgatatcagttaatgtaattcccctgattgactgcactctgcagggatctggggcggaaaaggccaagggaaaacattccagactgaacttatatttagagcaatgggtgtggagccagtaattatgtctgcaggcgaactagaatctgaaaaagcaggtgaacccgggaggctaatacgtgatagatacagaactgcctcccaagtaatccaaaaccaagggaaaatgagctgcttgatgatcaacgatctagatgctggtgttggaagatttggaaacacgcagatgacggtcaataatcaaatagctgttggaactttgatgaatttggcagataatcctactagggtgagcatcggccagaaatggagagagtctgatgttacacacagggtgccaataatagttactggaaatgatttttcaactctatatgcacccttaattcgtgatgggagaatggaaaaattctactggcagcccaaccgtgaagatataattagtattgttcatggcatgtatataaaggatggattatctgttgaagaagtatcaagaattgtagacgcatttccgaaccaagctctggacttctatggagctttgagatccaggacatatgatcaggctatcttggagtgggtcgaagaaatcggtgggcatgaacagctaaatgagaagcttcttaagcgaaagaaaggcgaggagcttccaacgtttatacccccaaagccaacactggaagcattgattgagtcagggtactcgctggtgaaggagcaggaactaataatgagctccaagctttcaagagagtatatgaagaacttagaatagtttgatacacgagagggggtaacttcttgttttcagtttatttggagcaatagtacaccaccagagtcgaatcgctgcttcgattgtcccagaaatcgtggtgggttcagatatgaactgctgaaaggaacgcgtatcgtcattgtccttactctc

SEQ ID NO: 22267 - DNA, 887 bp, Zea mays
  Clone ID: LIB3357-058-B3_FLI
ccaggaccggtcaacgctacgatacctgtgcactgcgcagcccccgccgctgcactagccgttgcttctcccttccgttcgcgttcccattcccaaggagttgtcctcgccggcggatccggggcgccgtcgcaagacgaggaaggcggaggagaggataccagaatggcgtcgcgaacggcgtccaaggatatcatcgctctgcgaggctccgccgccatcgtcagcgagttcttcggctacgcggcgaacagcatcctctacaaccgcgccgtgtacccgggggagagcttcgccaaggtgaagaagtacgggctcaccatgccgctcacgcaggacgagtgggttaacttcatcactagcgccacctccaagaactcagagtggctgggggcaggaaagctgcaggggatcgtgatggtcataatgagcaaggccaccagcgaggtgatcgagcgctggaacttcaacatcgacacctaccccgaggtcgtcgagaaggggtctatcaaggagaagagcgacaaaaagatcatgagggagattcgggccatcaagcgccagatcgactcttgcatcaccgacctcccctgcctcgacgagccatgcgtgtttgatatgctggcctacacggacacggacgttgacgctccggacacctggatcgaaagcgacaccaagctcatccacaacacgcagatggttaagctgcactcgttcgacacgaaggtccacaaggtcgacacggtggtgtcgtacaagaagaatgaggacgacacctcttcgtcgtcaagctcagtaataagagaagcaagaatagagcttcttgaagctgaacttggaagatttgtgatgcttgctaatgagtcagctgaagagatgtatac

SEQ ID NO: 22268 - DNA, 1376 bp, Zea mays
  Clone ID: LIB3357-058-F2_FLI
catacgtgtatcctttcctttcttgctagctccatccactccactccactctgctactccacctacctcccggctcccggatccggcgatggagaagatgctccactcagccccggcccacggcaggctcccggagtgcttcatcttcccggccgacaagctcccgcaggccaaggccacctcagcgacggtctccctgcccatcgtggacctctccctcggccgcgacgaggtgcggcgcgccatcctcgaggccggcaaggagatcggcttcttccaggtggtgaaccacggcgtctccctggaggcgatgcaggacatggagacggtgtgccaggagttcttccggctgccggcggaggacaaggccgggctgtactcggaggacacggggagggcgacccggatctactccagcaccatgttcgacacgggcggcgagaagtactggcgcgactgcctccgcctggcctgctccttccccgccgtcggcgacagcgccgcggcctggcccgacaagccccggaggctccgggaggtggtggagaggttcacggtgcagacgcggggcctggggatggagatcctgcgcctgctgtgcgagggcctcggcctccgccccgactacctggaaggggacatcagcggcggcgacgtcgtcctccacgtcaaccactacccgccctgccccgaccccaacgccacgctcggcctgccgccgcactgtgaccgcaacctcctcaccttgctcctccccagcatggtacctggcctcgaggtcgcctacaggggcgactggatccgggtggagcctgtgcccggcgccttcgtcgtcaacttcggatgccagcttgaggttgtgacgaacgggatcttgaagagcatcgagcaccgggtgatgaccaacctgggagtggcgcggacaacggtggccacgttcatcatgcccaccacggactgcctcatcggccccgccgccgagttcctcagcgacgacaacccgccgtgctaccgcaccctcaccttcggcgacttcaagcgcatctacagcgttgtcaagctgggctcgtcgctcaacctcaccacaaatctcaagaccgttcagaaggagctctgattatccatcaaactttgtagcctccctcgaattggcggcgaggaactagctagctagctggcaagatgtagtctgtgtcatcactgtcatgttactgcccggacgtcatgctgatgatagaaatgacggaataaaaatgaaatgccaaatatgcgtgtatggcgcacgcatattcttgctaagccgccactaaagaacaggctattttcaagccaccaaaataagcattttcaacaaaaataacttatttttcgatagc

SEQ ID NO: 22269 - DNA, 1025 bp, Zea mays
  Clone ID: LIB3357-058-H12_FLI
gtccccgccgcgggccgcatcgcgttccggcgcccgtggaacacgccacagccggaagcgctgcgcctgcgcctccgcctgcgcgcgcggggcgtccggcgtgaggacggcggcggcgtgcgcacggaggagcaggagcagacagcaccgcggacgttctacgacctgctcgggatctcagcggatgggagccccgatgatgttcgggcgtcctacaggcggctggcgctaaagtaccacccagacgtgtcccctccgggcgccgcggccgagaacacgcgccgcttcatcgaggtgcaggaggcctacgagacgctctccgacccaagccgccgctccagctacgaccgtgcactcgcccgcggcgtctgccgcctcgccttctccgggcgccgttcccaatcccaccacgcctactaccaccaccaggagcagggagagagatctgggtggagaaggtcctgggaggaccagatcgcagagctgaagaggaggagcgtggcgaaggattcagaagagaacctgtcgtggggcgctcgcatgcggagaagggccgaggcgtcagcagcggagtagctgcgacaagcgaccctgccaaatgcagctgtactcgtacgtagcatgtggagcgaagcgaaacggaatatattttctggtgggtacaatttggtctgcaaggtttttaaggcgtggatctaaagatgtccagatggaaaccttcagagacagacctgttacgagaattggacgtgtagcagtagtagctgtagcggtggcatctggccagtattgaggaggaacagcagcacctggatggagtgtggtggctgctggctgcagaccaacacccttggccctggctacataatagttgagttcctgcctggccacctgggcctggctggctgtatgtaaacgactcaactatgttactccttgagactcctgttacatctgtggcaggtccagtgtaaatgtaaatactacaagcatcaataacgaaggagcaagccagttgttcttcc

SEQ ID NO: 22270 - DNA, 670 bp, Zea mays
  Clone ID: LIB3357-059-A1_FLI
ctccctagcaatctctagcagcagatcctcgtgcgaagcaaagcgctagcccccttcgtactgtcccgatggcccgcacgaagcagacggcgaggaagtccactggcggcaaggcgccaaggaagcagctggccaccaaggcggcgcgcaagtctgccccggcgaccggcggagtgaagaagccccaccgtttccgccccggcaccgtcgcgctccgggagatccgcaagtaccagaagagcacggagctgctgatccgcaagctgccgttccagcgcctggtgcgtgagatcgcccaggacttcaagaccgacctccgcttccagagctccgccgtcgccgcgctgcaggaggcgtccgaggcctacctcgtcgggctcttcgaggacaccaacctctgcgccattcacgccaagcgcgtcaccatcatgcccaaggacatccagctcgcccgccgtatccgtggggagagggcctaggcgtcgtcccggtggaggtggaagtagtagtcgccgtttctgtcatcactgtctggctagaaggtgtagagatgtgccgggttctgtagtttgggttatcggtcaaatcatgatgtagttgggtcttccctgctgtaatttaactatgactatgcaatgacaatgaagttctcggttatcagttcccgaat

SEQ ID NO: 22271 - DNA, 288 bp, Zea mays
  Clone ID: LIB3357-059-A4_FLI
gaaatgtacaagcacatgggatcacaatttcatgaagcattgcagcgccataatctgccttcatacatgctaaaaaaaattcaaggttggataaaatagaaccaaaggttcgatcatctgatacaacaattaggacgggactccacgaaagcatcaaggaagaaggcaattgtttgagaacagtagcttggtttttcaacattgtttattttcagaatattgattttcagaataaggttgtttcatacatgacaacacgattggcaacatgactaacgtatttatact

SEQ ID NO: 22272 - DNA, 1086 bp, Zea mays; identical to SEQ ID NO: 17370
  Clone ID: LIB3357-059-A8_FLI

SEQ ID NO: 22273 - DNA, 903 bp, Zea mays
  Clone ID: LIB3357-059-D1_FLI
ggccacagcccacaggcataagtaatcatccagtaccagaacagaaccatcgatcgagcttggttgctcggcagcagctagcaatggccgccaagggaggtgatgagctgaagctgctgggcgtgtgggacagcccgtacgtcaacagggtccagatcgtgctcaacctcaagggcctcagctacgagtacgtggaggaggacctcctcaacaagagcgagctcctcctcaattccaacccggtgcacaagaaagtgcccgtgctcatccacgccggcaagccggtcgccgagtcgcaggccatcgttcagtacctcgacgaggctttccccggcggcacgtgcccgtcggtcctcccagccgacccctacgcacgcgccaccgcccgcttctgggccgccttcgtcgacgacaaggtcgggtctccatggcacacggtcctgttcgcgcgggagcacgggaagaaggcggacgcggcgtcgcggatcgtcgcggcgctggagacgctggagggcgcgttcaaggactgctccggcgggagggactacttcggcggcggcgccatcggcttcgtggacgtggtcctcggcagctacctgggctggttcaaggtgttcgagaagatggtcggcgtcagggtcctggacgtggcgaggacgccgctcctcgccgcgtggggggagcgtttcgcggcggcggaagcggccaaggacgtcctgccggatgacgttgataaggtgctcgagttccttcagaagttcctggactagactaggtgcgcgccaccatgtgctcggtgctctggtgtccaacccgatgtttgtttgctttggtcattttccgtgcgctgttaatgggcctcggatgtttgccagttgattttatagaatcttaatctctact

SEQ ID NO: 22274 - DNA, 1388 bp, Oryza sativa nipponbare
  Clone ID: LIB3431-025-E6_FLI
tcgagctgagagtgatcgatctttgttagctagagtgttgagcaatggcgtccaagctgggtatggttgtgctactgatctcgggcctctttgctgcccgttgcgcggccgtggtgaccaccggcgaacccgtcgtcgccggcctctcctgggggttctatgacacgtcgtgcccgtcggtggagggcatcgtgaggtggcacgtcaccgaggccctccgccgcgacatcggcatcgccgccggcctcgtccgcatcttcttccacgactgcttcccgcaggggtgcgacgcgtcggtcctcctgacgggttcccaaagcgagctgggtgagatacccaaccagacgctgcggccgtcggcgctgaagctcatcgaggacatccgcgccgccgtacactccgcctgcggcgccaaggtgtcctgcgccgacatcaccacgctcgccacgcgtgacgccatcgtcgcctccggcgggccctacttcgacgtgcctctggggcggcgcgacgggctggcaccggcgtcgagcgacaaggtgggcctcctgccggcgcccttcttcgacgtgcccacgctcatccaggcgttcaaggaccgaaacctggacaagacggacctggtggcgctgtccggcgcgcacaccatcggactaggccactgcggcagcttcaacgaccgcttcgatggctccaagcccatcatggaccctgtgctggtgaagaagctgcaggccaagtgcgccaaggacgtgccggtgaactcggtcacgcaggagctggacgtccgcacgcccaacgccttcgacaacaagtactacttcgacctcatcgccaagcaggggatcttcaagtccgaccagggcctcatcgaggacgcgcagaccaaccgcaccgccgtccgcttcgccctcaaccaggccgccttcttcgaccagttcgcacgctccatggtcaagatgagccagatggacgtcctcaccggcaacgccggcgagatccgcaacaactgcgccgctcccaaccgccgctcctccgacctcctcaacgctgccgacgacgaccaaggcttcgccgccgacgcctaattaacttatggagtaattagtgatcgttttatgtttatgttttgtgctagtaataataattaagaggatgccatctgcgcgtggtgtttggtttccatgcattctctgcttagttagaatggttttgcttcataaaaagtaaagttactactcgattcctcggtcgggacagagtaactgcatgtcaaatgtatcatcatcatcagttagtgctacatcatcacaactgtctttgtcacagcataaacccaaaattaatgtttccatcgttcggcatagcacgacacttaatcagataaaaac

SEQ ID NO: 22275 - DNA, 2669 bp, Homo sapiens
  Clone ID: LIB3547-006-G1_FLI
gttaagtttctataaatgaatgaaccagttctctcttgtttggagcaatgctgaaattccaagaggcagctaagtgtgtgagtggatcaacagccatttccacttatccaaagaccttgattgcaagaagatacgtgcttcaacaaaaacttggcagtggaagttttggaactgtctatctggtttcagacaagaaagccaaacgaggagaggaattaaaggtacttaaggaaatatctgttggagaactaaatccaaatgaaactgtacaggccaatttggaagcccaactcctctccaagctggaccacccagccattgtcaagttccatgcaagttttgtggagcaagataatttctgcattatcacggagtactgtgagggccgagatctggacgataaaattcaggaatataaacaagctggaaaaatctttccagaaaatcaaataatagaatggtttatccagctgctgctgggagttgactacatgcatgagaggaggatacttcatcgagacttaaagtcaaagaatgtatttctgaaaaataatctccttaaaattggagattttggagtttctcgacttctaatgggatcctgtgacctggccacaactttaactggaactccccattatatgagtcctgaggctctgaaacaccaaggctatgacacaaagtcggacatctggtcactggcatgcattttgtatgagatgtgctgcatgaatcatgcattcgctggctccaatttcttatccattgttttaaaaattgttgaaggtgacacaccttctctccctgagagatatccaaaagaactaaatgccatcatggaaagcatgttgaacaagaatccttcattaagaccatctgctatcgaaattttaaaaatcccttaccttgatgagcagctacagaacctaatgtgtagatattcagaaatgactctggaagacaaaaatttggattgtcagaaggaggctgctcatataattaatgccatgcaaaaaaggatccacctgcagactctgagggcactgtcagaagtacagaaaatgacgccaagagaaaggatgcggctgaggaagctccaggcggctgatgagaaagccaggaagctgaaaaagattgtggaagaaaaatatgaagaaaatagcaaacgaatgcaagaattgagatctcggaactttcagcagctgagtgttgatgtactccatgaaaaaacacatttaaaaggaatggaagaaaaggaggagcaacctgagggaagactttcttgttcaccccaggacgaggatgaagagaggtggcaaggcagggaagaggaatctgatgaaccaactttagagaacctgcctgagtctcagcctattccttccatggacctccacgaacttgaatcaattgtagaggatgccacatctgaccttggataccatgagatcccagaagacccacttgtggctgaagagtactacgctgatgcatttgattcctattgtgaagagagtgatgaggaggaagaagaaatagcgttagaaagaccagagaaagaaatcaggaatgagggatcccagcctgcttacagaacaaaccaacaggacagtgatatcgaagcgttggccaggtgtttggaaaatgtcctgggttgcacttctctagacacaaagaccatcaccaccatggctgaagacatgtccccaggaccaccaattttcaacagtgtgatggccaggaccaagatgaaacgcatgagggaatcagccatgcagaagctggggacagaagtatttgaagaggtctataattacctcaagagagcaaggcatcagaatgctagcgaagcagagatccgcgagtgtttggaaaaagtggtgcctcaagccagcgactgttttgaagtggaccagctcctgtactttgaagagcagttgctgatcacgatgggaaaagaacctactctccagaaccatctctaggcaactatcaaaaagaagcagaagttcaagtggacaaatttatgtgaaaattcatttaacatataagctgaactctattatggggaatggatacaaaagcagagctcccatcttgactttcaattcctcatcagaagtactggcttctttagagagtagtaagcatggctgcctatgcttggagtcataagtgttatttggactataccctgagataagcttatagatcaagtttggctcccttgaaaagcatttctctcatgtgcgccctcagggcttccagcaggattgagtcaccctgacgatgaccggggagaagccgtgtgctcttcattattttcagctggaggacagagctcagtgcctgactgcctagggtctcatggactgtaggcagcctgccagtgaaggtcactggactctagcctacaacatgctgagctacagcccagaagccagacatgcctgtcttagctgacctgtttttggtccacttttgcccttccatgactaataaggaagatatgtgtgtatttcatacacacacaaggacctggattaaaaatccaaaaagtgattctcttctatgatttatttcaaactcatccatagataattcaagatttgtattcaaaataaacatagttttcacagttacaaaataaatcacctattttatctttt

SEQ ID NO: 22276 - DNA, 1224 bp, Homo sapiens
  Clone ID: LIB3547-007-A6_FLI
gatgctgaggatgatcatgagcggcaactaccagtttggctcgcccgagtgggatgattactcggacaccgtgaaggacctggtctcccgattcctggtggtgcaaccccagaaccgctacacagcggaagaggccttggcacaccccttcttccagcagtacttggtggaggaagtgcggcacttcagcccccgggggaagttcaaggtgatcgctctgaccgtgctggcttcagtgcggatctactaccagtaccgccgggtgaagcctgtgacccgggagatcgtcatccgagacccctatgccctccggcctctgcgccggctcatcgacgcctacgctttccgaatctatggccactgggtgaagaaggggcagcagcagaaccgggcagcccttttcgagaacacacccaaggccgtgctcctctccctggccgaggaggactactgaggggctggccagtcagggagggctagggggcaggtggggaggggaagccatggaaatacaagtcaaaggggtgagatgcgtgcaggcctctgcagaaggagcacttggccctggccaggaacccctggaactgaggccacgatcccctctcaaaggctgtgcacaagggaagtgggtgttcccaccacacagcaatacctgcaggctggggcaggccctgggtgggcagagatcacacgtggcctgagaaccaggaaccccctgctcctctacttcctagatgagccaccatctccatttctctttaggggaggcccagagttactgacactcaggctttcttcccttagggtcacagggtgaggatcaaagacacaaatgtctgagatacacaattgcaggagattttattggccccatgacatccagtgacagtgtgggagcaggctactctccagggacatgtttttggaggcatatggagaagggggcccaggcgaggtggctcacacctgtaatcccagcactttgggaggtcgaggtgggaggatcgcttgaggccaggagttcgagaccaccctgggcaacagagcgagatcccatcactacaaaaattcaaaaaattagccaggcatggtggtgcacacttgtagtcccagctactcaggaggctgaggtgggagaattgcttgggcccaggaattcaaggctagagtgagccgtgatcaccagtgcactctagcctgggcaacagagaaagaccctgtctc

SEQ ID NO: 22277 - DNA, 1204 bp, Zea mays
  Clone ID: LIB3587-215-D9_FLI
ccgggagagaagagaacacgcgcgtcaggagcgcacaccgcacggcgcacacacacacgcctcccgcggcaagcagcgcaggacaccgacgacgaagcgaggagaggggaggaggcggagccgagcgcccgagcccaaccccgcaaccacgacccacttccccgtcgcgattcgcattgcccttccctcgggttctacccccagcctcgcgccgccgccgccgccgccgcccttgccagagagatcaccccccattcccacaatcccgtccctccctccgtccctcgaggagccgagccctccgcgcggccgtgggatggggcagtgaccggtgagtggcgtggggagccggtgggcggtggcgagggcatatcatggtgcagtgcctggacggggtgaggcagctgctcgcggtcctgctcaattgctgcgacgtcgagctcaagcagccgcgggggctccaagacccccaggtcctcgcgagggagaccgtcttcagcgtgagtgaggtcgaggcgctgtacgagctgtttaagaggatcagcagcgccgtcattgatgatgggctgattaacaaggaggaatttcagttggcgctatttaagaccaacaagaaggagagcctgttcgcggatcgcgtatttgatttatttgacacaaagcacagtggaattttgggatttgaagaatttgctcgtgctctctcagtatttcatcctaatgctccccttgatgagaaaattgatttttcattccggctgtatgatctcaagcagcaaggctatattgagagacaagaggttaagcagatggttgttgcaacacttgccgagtcaggaatgaatctttcggatgaaattgtagagagtataattgacaagacatttgaggaggcagacacaaagcatgatggaagaattgacaaggaagagtggcgcaatctagtcattcggcatccttctttgctgaagaacatgactcttcagtacctcaaggacatcaccactacatttccaagctttgtctttcactctcaggttgatgataactgaaattgatggggttactttgaaaagaaacattagaagatattctcatgggttctgatatggttttcatttttcaaaattgggttgttggattgaaagattgtagtgttgtgaagtacgtgcatgttggattcgaggactcgattttttttgtc

SEQ ID NO: 22278 - DNA, 1133 bp, Zea mays
  Clone ID: LIB3587-215-G5_FLI
gacgcggtggagctcatgttcgagcccgacgccttgcggtggctcgccagggccggcgtgtcacgggcaaccgctgtgctccaggtttgctcctctattgcgttcgacaaaggagtcgaatcatgtttgaagtacatcgaggcagttccatggagcgagagcgaggaagagaagctgaaacacgtttttgccagatgcactttcggcgaatcagttagtaaagatgtgctggcaagattgcagcagcagtgcgcgagcggctcggaggacctggcggtgcagctcgtggaatctatcacgagcggagccaacaacggcgcgaggaaagaaatgcagtctttggtgagcggtctcctaagcagaagctcagtctaccataaggacctgtccggggtgaacaaggggggcctttaccgaatctgccgttcctgcttgagctcacttgtggaacttttcatggaggactcagatggcggccaagctatggcaccttcaggcagaaggcctatggttgaaaggatcagtcagcaaactgagaatctcaactggctcttggacatccttctgaacaacgacatggcagaagaatacgttgagctgtggggtacgcaggaggagctcatcagaatgcacgagcgagcatcgccgatgttcaggtacgagctcagccgggtatcggcgagcgtgttcatggctctggggagagggagaatccagtgccccagcgacacgaggagccagctgttccgtggatggttcaggcccatgcttgtggacttcggctggctgcagaggtgctccaaggggctggatgtgagagtcctggaggagaacctggggcaggccctgctcacccttccgctccacctacaacagagcttgttcgtagaatggtttcagtgctttgcgtctagaggcacaggaggatgccctaatctcagcagagctttccaggtatggtggaggaggtcatttgttaattagatcagctggttcttcttcccattctgtgccctagatgcttgctatacaaacatgagccagtataaatgtaaagcgtcatcataagtatgtttattttttgccctaaagttggcatgaccttattcatcatcgtatgttcagtagtatgc

SEQ ID NO: 22279 - DNA, 727 bp, Zea mays
  Clone ID: LIB3587-215-H12_FLI
cttcctcccgtctccctcactaatcgctactgacttttctcttgcctgatccagatctcccttcgcagccgccgaggaaccccttcacagcgcggaagatggctgaacaggaggccccagtcgtggttgaggcaccaaccccagttcttggggagcctatggacttgatgactgctctgcagctcgtgatgaagaagtcaagtgctcatgatggacttgtgaagggtctccgtgaggctgccaaggccatcgagaagcacgccgctcagctttgcgtgcttgctgaggactgtgaccagccagattatgtcaagctggtgaaggcactctgcgcggagcacaatgttcacctggtcactgttcctgccgctaagacccttggcgagtgggctgggctttgcaagattgactctgagggcaaggcaaggaaggttgtaggctgctcctgtgtcgtcgtcaaggactacggtgaagaatctgagggccttaacatagtgcaggagtatgtcaagtcgcactagatgtgtgacatgtttcagtgatactcttgatttggacctgggcttaaaattatgcttttgcatctggggcttgcctaggagattagaacattttactagaagagccgaagaggatatgtatgaacaatttggacatctgaattttttttttgtttatggtgctgtcgtctggttttaatgcaaatcatgaagagccgagtttattc

SEQ ID NO: 22280 - DNA, 762 bp, Zea mays
  Clone ID: LIB3587-284-D9_FLI
tcgacctccgccccagtccgcgtacggtggggccggggacgcctacggccacagcggccaaggctacgcgcccccagctcgtgttccgcttcttgcagccgtcgccgcgaagcgctccagagaacttccgtcaacatggggaagacacgtggtatgggagccgggcgcaagctcaagacccaccgcaggaaccagcggtgggctgacaaggcatacaagaagagccatttgggcaatgagtggaagaaacccttcgctgggtcatcccatgccaagggcattgtcctggagaagattggtattgaggccaagcagcccaactccgctatccgtaagtgtgctcgtgttcagcttgttaagaatggcaagaagattgctgccttcgtgccaaatgacggttgtttgaactacattgaggaaaatgatgaggtcttgattgctggatttggtcgtaaggggcacgctgtgggagatattcctggtgtccggttcaaggtcgtcaaggtttccggtgtgtctctgcttgcccttttcaaggagaagaaagagaagccaaggtcttagattgctcttgctaccaaaatcagcaagcgtggagttgaaacgggagggcgttagatgattaagaagaatggttgcttgctatgtttgcagtgcattcgtgcaattgttaacctaagattttgttggtgaaaacgatttcttttcagacttgcttctgttgagtgctatcattccatatcaatgtacttcctcttctag

SEQ ID NO: 22281 - DNA, 932 bp, Zea mays
  Clone ID: LIB3587-284-E1_FLI
accataccaccaatctcccacattaagccatccgtcaccactcaccagccacccaaccagcactcactcactcactagctccgtctccgctccgtccaactcgtacacaacccctctttctctctatcttctctccatccatccatcctctcgcccttccacagctagctaagcagtacgacgtagtactagcatttagcagttcatcaacgcgctcaacctagcacgacctacggcgatgaggcgccgcggcagcaactcctcgccgcttgcggctgctgcccagctgctccttctcctcctcctcctcgtcgccggctgcatccacagcgcagcagcggcggctcgccacctgccttctcctggcgccccagtccaagcgctggatcaccaagccgagaccggtggcaaggctgcatcagctggtgcagacggcgccggcggccttgtgctccaggaaggtggcacgggcaacggcgacgagctctcttcctccaccctcctcgagacgacgacgacgacgatgggagcggaggcgtgcgaggaagggaacgacaaggacgagtgcttgctgactaggcggctgctcgtcgacgcgcacctcgactacatctacacgcagcacaagggcaagccgtgaccgtcagcgacgaggacggtgccgcggctgcagctgcagaaagtgaggagcgagaaattgaccacctcattcctcaaactaaacatcttataaattcataccaagggcgatggtaatctcatctgctgctactagctaccagtacatgcatcgatccaccttctgcgtgtgctgtatatttctgccactgtctattagcatgcatcatcatctaggactaggactaggactatgatggtttcctgtatttgtaaacactgatgaacagttcctctccctctctgcttcctgt

SEQ ID NO: 22282 - DNA, 744 bp, Zea mays
  Clone ID: LIB3587-284-E5_FLI
ctccttatacatacttatcactcataccccctgcccttctctctagtttgtgcaagtctaaagccgacccttctttacatcctaactaagatctcgtacgtccaccctctatttccatactcgaagaagctcaactttgtcaaacatcgtcattctctcgacaagatccggacgacaatgctggacaaggaagacaggacgagaatggtccccaagagctcaagccagacgaagacgctcctggccgccatggaggaggagagggcgagtacagccaaccggcgcttcctctgcaaggacgacgcctcctccgtctccaacccctccttccgcgtctactacggcgtcgcctccgcggggtcggtgccattcatgtgggagtccgcgccgggcactcccaagcacgccatgtccagcgccaccctcccgcccctcaccccgccgccgtcctactacaagggcgcggccaagaccaagttcgccaaatcccagtcctccaagaagctgctctcgtccaagccgcctagcagcttcgtgcagagcatcctccccaagctgcgcaggagccataccatgcccgtgccgtcgcggtcaccgtcggcgccggcgccggcgccgcccagagagagcgcgcaggtgcagtgtgcccggagccgggggaacaggctgctgctcgcgagcccgcggtcgtccttctcgtccaactcaaggggagacgacgacaacgacgacgaagatgctggt

SEQ ID NO: 22283 - DNA, 1423 bp, Zea mays
  Clone ID: LIB3587-284-F3_FLI
tcccaccgtcgcaagccagccacctccctgagaggcctgaccgtgatttcggcgtggcatccaaaggcggtcaagattcgagaggccggaggaaccaagcgtagggcctccgaccccacgtcgtcgtccgcgcgcgccgcccgccgtcgcagggagatgggggccgattactacaaggtcctcggcgtcgaccgcggcgccagcgacgacgacctcaagaaggcctatcggaagctcgccatgcgatggcaccccgacaagaactccaccaataagaaggaggcagaaaccaagttcaaggagatctctgtggcatacgaggtccttagtgatcccaagaaacgtgcaatctatgatcagctaggggaagaagggctcaaggggcagccgcccccaggagcaggaggtcctggcacatctcccttcttccctggcggggttcattccaccgctcaccattttaatccgaggagcgcggacgatatatttaaagagttctttggatcccctggcatgggtggcatgagaacggaaccaggatttcaaagtcggccttgcagatctctacaagggtgtgacaaaaaagatgaaaatctcaagagagactattgatgccagcgggagaatctcaaacacagaggatattctgacaatacaagtaaaggctggttggaagaagggaacaaggattacatttcctgacaagggaaatgaagctccaaatatgaaacctgctgatattgttttcatcattgatgagaagccccatgatgttttcactcgggaggggaatgatcttgtcgtgactgagaagatctcactggtggaagcactgactggctataccgcacgtgtcactacgcttgacgggcggagcctatcactgcacatcaactcaataatccatccaaagtacgaagaggtgatgcctggagagggcatgccaatgcccaaggaccccacaaagaagggaaatctgcggattaagttcaacataatgttcccctctaggctgacttctgatcagaaggccgggatcaagaggctattgggttcttaggccgccgcctcaaatgacatcttctttatgatgaaagttgtttgtaaatattgccagtgatttgtttgtaacgggatggtcacaatttagtttttttttaaggtggtgcccttggttttgctgttgttctcatttttaaccttagtcgtatttttttggctcaattttgcctttccagtgctatacagcagaatggtaaaactgataaaaaaatacgactaagggtaaaaataaagaagatggtaaaactaagggtatgaatttaaataggttttctggtgggtgggtagttgatgaattgtaaatcccaaacaaaccggccggcccttagcaaccacaacaaggctgaaccttcaccatttt

SEQ ID NO: 22284 - DNA, 2207 bp, Zea mays
  Clone ID: LIB3591-002-D10_FLI
ctagtcctctgttacttctcccgccgccgccaatcccctcccgttctccgccaccgccaatcccctcccgtcctccgccacctctgctgagagcgagaagagatggccggcaagggtgatgggccggcaatcggcatcgatctcggcacgacctactcttgcgtcggtgtgtggcagcacgaccgtgtcgagatcatcgccaacgaccagggtaaccgcaccacaccctcgtacgtcgccttcaccgactccgagcgcctcatcggagatgcggccaagaaccaggtcgccatgaaccccatcaacaccgtctttgatgccaagcgtctcattggcaggaggtttagtgatgcctctgtccagagtgatattaagctgtggcccttcaaggtcattcctgggcccggtgagaagccaatgatagttgttcagcacaagggggaggagaaacagtttgcagccgaagagatctcctccatggttctcatcaagatgcgtgagatcgctgaagcttaccttggcagcacgatcaagaatgctgttgtcacggtccctgcctacttcaacgactcacagaggcaggccacgaaggatgctggggtgattgctggcctcaatgtgctgcgtatcatcaatgagccaaccgctgctgctattgcctatggtcttgacaagaaggcaaccagcgtcggtgagaagaatgtcctcatctttgaccttggaggtggtaccttcgatgtctccctccttactattgaggaaggtatctttgaggtcaaggccacagctggcgacacccatcttgggggtgaggactttgacaacaggatggtcaaccactttgtccaggagttcaagaggaagaacaagaaggatatcactggcaacccgagggctctccggaggctgaggacctcttgtgagagggccaagagaactctgtcttccactgcccagaccaccattgagattgactcgctgtacgagggcattgacttctactccaccatcacccgtgccaggtttgaggagctcaacatggacctgttcaggaagtgcatggagcctgttgagaaatgcctgagggatgccaagatggacaagagcagcgtccatgatgttgtccttgttggtggctccactaggatccccagggtgcagcagctgctccaggacttcttcaacggcaaggagctgtgcaagaacatcaatcctgatgaggccgttgcctatggtgctgctgtccaggctgctatcctcagtggtgagggcaacgagaaggtgcaggacctgcttctgcttgacgtcactcctctctctctgggtctggagactgccggaggagtgatgaccgtccttatcccgaggaacaccaccatccccaccaagaaggagcaggtgttctccacctactcggacaaccagcctggtgtgttgatccaggtgtacgagggcgagaggacccggacccgcgacaacaacctgcttgggaagttcgagctctccggcatcccaccggctccccgtggtgtcccccagatcacggtctgcttcgacatcgacgccaacggcatcctgaacgtgtctgccgaggacaagacgacggggcagaagaacaagattaccatcaccaacgacaagggccgtctgtccaaggaggagatcgagaagatggtgcaggacgcggagaagtacaagtccgaggacgaggagcacaagaagaaggtggagtccaagaactcgctggagaactacgcctacaacatgcgcaacacgatcaaggacgagaagatcgcgtccaagctggctgccgacgacaagaagaagatcgaggacgccatcgacgcggccatcagctggctggacgccaaccagctcgccgaggcggacgagttcgatgacaagatgaaggagctggagagcctttgcaaccccatcatcgccaagatgtaccagggcgcgggtgccgacatgggaggctccggcggcatggacgaggacgctccggctggaagcggtggccctggccccaagatcgaggaggtggactaagcggtttgtgtcagtctcgtgtgtctgctgcagtggctggctggcccagtcgctgctcgatttatcgtcgtcgtcgcggtgtatccgcgttagaaccttttgttggtgaacaatattatcgtggcacgcgttttaagtaatacggtattctggtt

SEQ ID NO: 22285 - DNA, 1738 bp, Zea mays
  Clone ID: LIB3591-068-F4_FLI
tgcgccgcctgttgggcctccccgtcgacgggctcaacggcacggagtgcaaccccaattccaactccacatcctccatctgcgtgtccgccgacgccgacctcgtcgtccccgacgacccgggccactccttcgaggacgtcctggagcaggtgttcggcaacgtctccgccgccgctgcgcagccgcagccctccatgtcgggcttcgtccgcagcgcgctctccgtcaacgcggtcctctcctccgccgtgatgcgcgccttccgcccctccctcctcccggccttctccgcgctcgcgccccaattcgccgtcttcgaccgctggttctcctccatcccggggcccacgcagcccaaccggctgttcctctactccgccacctcccgcggcgccgtcgcgcacgacaagctcgacctcctcctcggctacccgcagcgcaccatcttcgagtccctcgccgccgacggccacgacttcgccgtctacttcaagaccatccccaccgttctcttctaccgccgcctccgcgcgctccgctacgccgcccgcgccttccaccgctacgacgccgccttcaaggaacacgcccgacgcggcgtcctcccggcgctctccgtcatcgagcccaggtacttcgacctcacggggacccccgccgacgacgaccacccggcgcacgacgtcgccaacgggcagcgtctcgtcaaggacgtgtacgaggcgctccgggccagcccgcagtggaaccagacgctgctcatcgtcacctacgacgagcacggtggcttctacgaccacgtcgccacgcccaccgccggcgtgcccagccccgacggcatccggggcccgccgcccttcttcttcaagttcgaccgcctcggcgtcagggtgcccaccatcatggtctcgccgtggatcaagaagggcaccgtcgtcggccgcgccctcgggcccacggacacctccgagttcgaacactcctccattccggccaccatcaagaagatcttcaacctctcgtccgatttcctcaccaagagagacgcgtgggccggtaccttcgaccacatcttcaccgagctcgaccaaccaagaacagattgcccagagacattaccggaggtgccatttgagagaccaactccacccaaagaacacggctggctctcagatttccagcgggagctcgtcgagctcgcgagcttcctaaacggcgactacatgctgacgagccttgcgcaggagaaccgtaagaagaagatgacagtcaaacaggccgatgcgtacgtgcggcgagccatcacgagctttctgcaggcgagcaagcaggcggtgcggttggccgcaaacgaatctgccattgtgacaatgaggtcgtctctgacaagcaagagcacacgctcatcaagcccttgagttgattcagtctgctaatacatatagctagtgaacagatggatttgagtccacggtctaatgtatattgcctctgaaatgtttatagctgaatagggagctagcagagcctttttaaatataacttttgtttctcttgtcacatattaccaatgtagtataagagttttctgttgacctcaaatgtagatctgcaacctcattttgatcttggattcacgttttggagggacacacgtaagtgttacatatatgtttttttagataatgaaatggaacatggagtgttatatatcacaaattgaatacctttggtc

SEQ ID NO: 22286 - DNA, 836 bp, Zea mays
  Clone ID: LIB3591-072-B11_FLI
ctctccctttctttcccgcggcgacggtgacgacgaccgcgcgagcgccgccgactccctactgcatcaggtgcctcggccttcgtcgtgctctccgccggcaacgagtatagacgggcgcgcatggccaccttcgagctgtaccggaggtccaccatcggcatgtgcctcaccgagacgctcgacgagatggtctccaacggcaccctcagcccggagctcgctatccaggtcctcgtccagttcgacaagtccatgacggatgctctggagaaccaagtgaagagcaaggttactgtcaagggtcacctgcacacctacaggttctgtgacaatgtgtggaccttcatcttgacagacgcaagcttcaagaacgaggaggccacggagcaggtgggcaaggtgaagattgtggcatgtgattccaaattgctcggacaataggcctgtgtaccctcgaggtcaaggaaggaagcttttaagtgcggcgaggcggggtctgtctgcgcgtcagctgtacacgcctaggctaccgcgaggcggggtctgtctgcgtcagctgtacacgcctaggctaccgcccgaacggcatttcatttgccttcttcgtactgtatgtgtatcttcttttttccccttgtatacaatctgctgcagctataccggccaagagtatggcatggtatggcggcaggcagccgcaaacttgtttttacctacttggtgtagcgcctgtgtaacagttttcgatcgatcttgcttgttgtgttgtcgatgctaataccgcagtgtaattgacgaaatgactaaaatgaagagtagtgtagtagatgtcc

SEQ ID NO: 22287 - DNA, 726 bp, Zea mays
  Clone ID: LIB3591-072-D11_FLI
cctccccctcttaccaagtcctcctcgggttagggttccttagggttttgtggaggggcgatggcggcggctgatgtggagtaccgttgcttcgtcggcgggcttgcctgggccaccagcaacgagtcgctggagaatgccttcgcctcctacggcgagatcctcgactccaaggtcatcaccgaccgggagacggggaggtcccgcggcttcggcttcgttaccttctcctccgagaactccatgctcgacgctatcgagaacatgaacggcaaggagctcgacggccgtaacatcaccgttaaccaggcccagtcccgtggcggtggcggtggcggcggtggctacggcggcggtcgcggcggcggcggcggttatggtggcgggcgccgtgacggcggttatggcggcggtggcggctacggcggtcggcgcgaaggtggcggcggcggctacggaggcggtggcggctacggcggtcggcgcgagggtggcggtggcggctacggcggcggtggcggcggcggctggagggactgatgtgtgggcccatcctggcttcggccgagttatcttatctatctatagtatcgtgttaccgttcgcttctgtcaccgtgttagtgtccgttctacctttggattaggtgttggtaccctgttgttcgctttggttgctcccgctatgaaacgagacgagagaagaatgagcaaggtttttgttcgc

SEQ ID NO: 22288 - DNA, 582 bp, Zea mays
  Clone ID: LIB3357-059-H11_FLI
ggctgaccccaccaacagcaagcgaaaatctcccgatcccctctagtctccgcggcgaagatgtcggggcgcggcaagggcgggaagggcctgggcaagggcggagcgaagcgccaccggaaggtgctccgcgacaacatccaggggatcacgaagccggcgatccggcggctggcgcgcaggggcggcgtgaagcgcatctccgggctcatctacgaggagacccgcggcgtcctcaagatcttcctggagaacgtgatccgcgacgccgtcacctacaccgagcacgcgcgccgcaagaccgtcacagccatggacgtcgtctacgcactcaagcgccagggccgcaccctctacggcttcggcggctaggctaggccggtcgcgcctcgttgtcgtcgctgcggttctattgtttttgcaattcgcaagttgtggctgggtggcgaaaatgctggttactgtaccactagatcaagcatgttgtgcgtgtctgaagaaatgccaattgtgacttgctgtttgttcaaacatgctccacatttcaacacccgtcgtccctgcgatgtagttaatttagcc

SEQ ID NO: 22289 - DNA, 1391 bp, Zea mays
  Clone ID: LIB3357-060-C9_FLI
cgcctccgctgcaatcagcccccgcggcgagcttgccctgcccctgaccctgagtgctagttctcgccgttacgtaaggcttcttggccttgcgtcctccgtctttcgttgctgatacatcgaggtattaaagaagctgcctgattccgggtagcagaggtcgccgccgcctgcagcaatggccgacttctcctggctcacggtgcttggtttcctattcctcacattcaactcaggcatggcgatttatcggtccaacggtgacgccggctccgtcgctttcgtcgtggtatcttatctcgacctggtggccctgttcgcctgcttgcgctactacgagcagttggatcagcagcactcccaaaagcgcgcgagggtcaaggctggggtttggagcctcacgaccctccttactatcatgttcagttacaaggtggctgagattatgcccctgccagtcaaacttgttgtctggtcgatggcagccgctaccacctgtggcggcttctacgctttcttcgtccacagcgagaagcctgtcatgccagcggtggcgccacggcccgccgcggccaaggatgcagcctccaactaggttcgtttgccaccacaaggcgcatactgccggccttggttcggcaccgcgcgttagatcccagggccaactaggttgttctctaattcctaatttcttggccttttctcttccactctccgccatttgagctgtcgcctcggttgttttagcttgccggcgtggacagactggcagatctggagctcggcgcgaccagatccggtgctgctgtgcccgatggcagaggagatctctctggtttactctgctaagagtcaaagaggagctgatgacgacaactaagcttgggttaccgataattgagcctgttctctgcacgagaagaaatttccggcctcacctagtactaataagtatgctggatagtcccccagcacgggagttaattgtatcaagagaagtggagaccaagggcagagtagaactacagaggatatctttgtatatggaggctacatgtgaacaagaaaggagaggaggaagactgtatagatctgaagaacctaaggagaaacaatcagagtacttgctggaacacatatatcttccatgataaaagttagatttcttgtttggtgctcatgcatgggttccatatgttcttcccgtcttattagaacatatctattggactaccatgcataaaaagccgtcgtttcataaactattgggactatacggcaccaatgaagctattgatgctggccggcaagctgacagcgaggtgaaagcttttcaaaacgatattccgagtggaagagaaaagaaaataaaagaaatagcaggttatttt

SEQ ID NO: 22290 - DNA, 1319 bp, Zea mays
  Clone ID: LIB3357-060-E1_FLI
tctgccgtccgtcaccatggggtgttcgtgtcctccgctcgccgacgccgcgtgcctggccctgcttcttctggccttgtcgttggcgtgtcgccaccaccacgggtgcgcggcggccacgctgtcgacggcgtcgcggtgggtgctggacgagagcgggagccgggtgaagctggcgtgcgtgaactggccgtcgcacctggagccggtgctggcggaggggctgggcaagcggcccgtcggcgccatcgccgcggacgtggccgccatggggttcaactgcgtcaggttcacgtggcccacgttcctggtcaccgacgcctcctactccgacaggggctggcccgtcatcctcagcgagttcggggtcgacaaccgcggcgtcaacaccaacgacaaccgctactacggctgcgccgccgccgccgcggccgacctggacctggactgggcgctctgggcgctgcaggggagctactacctccgcgagggcgtcctggggctcgacgaggtctacggcgtcctcgactgggcctggtgcaggccgcgcaacgacaccgcgctgcgcagggtccaggccctccagcgcccgctcagggggcccggcctcgcggaggcggcgccgtacaccgtgctgttccacccggtgtccgggatgtgcgtggtgcgccggtcgccgacgccgtcgctgacgcagccctttcagctgagcctgggcccctgcaacgagacggaggcgtgggagtacagcgcgcagcagcagcgactggcgctgcgggacgctgcgctgctgtgcctccgcgccgagggcgccggcaggcccgcgagcctcgccgtgagctgcggcgacgccatggcaaggtggggcttcgtgtctgactccaagctgcacgtcgccgtcaacgccacgtcgtcggccgggagcgtcggcgacggcttgctctgcctggacgtgggcgcggacggccggagcgtcgtgaccaacccgtgccgctgcctgagcgcggacaacagctgcgacccgcagggacagtggttcaagctcgtgagcagcacgaggagcgtggtcaccaagcagaccatgctcgcgcagctgccgctcaagctcaaagactggaagatcaggtcgttttgagcgtttccccggtagaatatagtgcgtcagctaggctcaacacgtacgtaagctgtagcacgtgacgtcgtgtggaacggcgggaatagaggagcactgacctagaacttgaacaatgttctcgaggagactgatcagcattcagcagcatgtccatacctttctctgcgagactttctaaaag

SEQ ID NO: 22291 - DNA, 959 bp, Zea mays
  Clone ID: LIB3357-061-A2_FLI
tcccactcctaactctctcttcgtctactcttcttcccacccccagcgttcgcttccatccaagctcatatcatcactaggccacgcgccccaatactcagaactagtcttgagttaaagcatggcgtcgtcttctccgtcctgccgtggcagcggcggcaagtcggacgtggaccggatcaagggcccctggagccccgaggaggacgaggccctgcagcgcctggtggcccgccacggcgcccgcaactggtccctcatcagccggtccatcccgggccgctccggcaagtcgtgccgcctccggtggtgcaaccagctgtcgccgcaggtggagcaccggcccttcacggccgaggaggacgacaccatcctccgcgcgcacgccaggttcggcaacaagtgggccaccatcgcgcgcctcctctccggccgcaccgacaacgccatcaagaaccactggaactccacgctgaagcgcaagtactacgccgccagcgacgctgttgttgctgacgctgacgacgagcgcccgctgaagcgcacaagcagcgatggccacccggggctctgcttcagccccggaagcccatccgggtccgacctcagcgactctagcaaccacagccttccctccgtcatgccgtcagccgcttctgctgccgccgtcacctcccaccagcagcagcagcacgtgtaccgccccgtgccgcgcgcgggcggcgtggtcatgctaccggtggcgcctcttgtgccgccgccgccacagcctccggcgacctccttatcactgtccctctccctgcccgggctggacggccagaagcccgaaccatccccagcggttctgacgccggcaccggcaccgcctcaacctcctcttcagatacagcagcagcagcctgctccacctcagatgccgccaccacaagcccaaccgagcttgccgttccagctgc

SEQ ID NO: 22292 - DNA, 1156 bp, Zea mays
  Clone ID: LIB3357-061-C11_FLI
cggaaaggcgaaacccatcgcagctaatccccaaccccaaacctccaatccacccatcccctcctcatccactccgggcggccatggcctgctccttcgccgccgcgaccgtcgtctcttccgcccccaccccggccgccaggcccctcgccgttgccccgcagtccgtctctgtctcccgctccgccgccgccgccgccgccaggccgctccgcctcgtcgcctccagatccgcgcgggccaccagactcgtcgcccgcgccggcggcgtcgatgacttgccgctggtcgggaacaaggcgccagacttcgaagccgaggccgtgttcgaccaagagttcatcaacgtgaagctctctgattacatcgggaagaaatacgtcgttctgttcttctaccccttggatttcacctttgtctgcccgaccgagattactgccttcagtgacagatatgaggaattcgagaagttgaacactgaggttcttggtgtctctattgacagtgtgttctcccaccttgcatgggtgcagacagacaggaagtctggtgggcttggcgatcttaaatacccacttatttctgatgtcaccaaatcaatttcaaaggccttcggtgttctgatccctgaccagggtatcgctctgagaggactgttcatcattgacaaggagggagtgattcagcactctaccattaacaaccttgccattggtcgcagtgtggacgagaccatgaggacccttcaggcattgcagtacgtccaggagaacccagacgaggtctgcccggccggttggaagccaggggagaggtccatgaagcccgaccccaagggaagcaaagagtacttcgcggccgtctagactcgccgtctttgagaagctttgctacgtttttgtcatggtgcccgctaagccccccggcagtaggttggagttttgcggagctcgcgtttttacaaatctctgtgctctgaaacgagcgtcgtagccccctttgctgttgtgcatcccgattgagtgctgttctttgccaccttgtttaatttcgtcacctgacgacataaggttcattttacacgtgattgagagatctcacctctagtcttgtggcgtagtttgtcggaaaaattccctatatgtcatcagatgtt

SEQ ID NO: 22293 - DNA, 1178 bp, Zea mays
  Clone ID: LIB3357-061-C4_FLI
gctagatcatatcgatcgccatatatatagtagggagcggctcgcagggcaagaacgaagcagatggcggtgatgagccgccgccgcgtcatccagctcgtcctcgttggcgtcgtcgtcttcctggtggccccgcggctgtcgtggaaccttccgggcggcctcgagaagctggggctgcagcagagcccggcggcggtggcggtggcctgctgggcggctgcggtggcggcgtgggcgtacgcggtgtcccggccccggcccgtgtacctggtggacctgtccgggtacgtggcgggcgcgtcgcacgaggcgtcccgcgccaagacgatcgcccacttcgggcggtgcgggcggttcagcgacgagagcatggcgttccagaagcggatgctggagcggtcggggctcggggagcagactcacttcccggcgtcgctcatcagcgtgcccgtggacatgtgcctccgcacggcgcgggaggagtcccacgccgtcatcttcggcgtcgtggacgacctcctccgcagggcgcgcgtggccggcggcgacgtcggcgtgctcatcttcaactccagcctgctcagccccacgccgtccttcacgtcgctcatcgccaaccgctacgggatgcggcgcgacgtcgtcagccacaacctcagcggaatgggatgcagcgccggcatcatcgccatcgacctcgccaagcgcctgctccaggtgcactcggacacgtacgcgctggtggtgagcacggagaacatcactctcaacgcctacatgggcaacaaccgccccatgctggtcaccaacacgctcttccgcgtcggcggcgcggccatcctgctgtccaaccgccgcgccgaccgccgccgcgccaagtaccagctcatccacacggtgcgcacgcaccgcggcgcgcacgaccagagcttcggctgcgtcacgcaggaggaggacgacgcggggtgcgtcggcgtctccctggccaaggagctcatggtggtcgccggcgaggccctgcgcaccaacatcaccacgctgggcccgctcgtcctgcccatgtccgagcagctccgcttcctggccaccgtcgtcctcaaccgcgtcttccgcgccagagtgcgcgcctacctgccggacttcaagctcgccttcgaccacttctgcatccacgc

SEQ ID NO: 22294 - DNA, 719 bp, Zea mays
  Clone ID: LIB3357-061-G6_FLI
ctcgcgtcgcggctccgcttccatgtcatttgacagcgcaacacggcgctgcagggtaaagatctcccccgctcgccggtctctctgcccaggccagcaggacgaagaagaagccggccgggaagacccaggcctgaccgcctgagctaggggagaggaggacgacgatggggctgctgtctcagcgggtggagcggtcggagatggagcccggcgaccacatctacacctggcgcgccggctacacctactcccaccacgggatttacgtcggcggcagcaaggtggtgcacttcacgcggaagagggaggcgggcggcgcgggtctggactcggccatcgccgtgtccagcctcctcctctcgcggggctcggacgagtgccccagcttcccggactgcggcttccagctccccgacagcggcgtggtgctgacctgcgtggactgcttcctcggcggcggcgcgctgcaccgcttcgagtacggcgtgcccgccgcggcgttcctggccaaggtccgcgggggcacgtccaccacggcgcgcgccgacccgggcgacgccgccgtgcgccgcgccatgcacctcctccggcacggcttcggcgactacgacgtgttcgagaacaactgcgaggacttcgcgctctactgcaagacggggctcctgctcctccccgccgccgcggctggcggcggggtcgggaggagcgggcaggcc

SEQ ID NO: 22295 - DNA, 963 bp, Zea mays
  Clone ID: LIB3357-061-H7_FLI
caatcaccagacgatgggcttatgagagtgagccagcaccccagcacagcaactgtgttaccggcatcactaccactgcgagagagctcaagaagccagcaggctccaactcccacagtacttgtgagaaccaaagctcagctgctcatccatggacatgtcgccgaaccccgacagcccctcgtcaggagggggcaacggcatcgggccgagcagcggaggcgcatcgccgtcggttggttccatgacgccgcagtcgccgagccggtacgaggcgcagaagcggcgcgactggaacacgttcgggcagtacctgcggaaccaccggccgccgctgagcctggcgcagtgcagcggggctcacgtcctggagttcctccgctacctggaccagttcggcaagaccaaggtgcacggcccggcgtgccccttcttcggccatccgaacccgccggcgccgtgcccctgcccgctccgccaggcctggggcagcctggacgccctggtgggccgcctccgcgccgccttcgaggagaacgggggccgcccggagtccaaccccttcgcggcgcgcgccgtgcgcctctacctccgcgaggtccgcgagcaccaggcccgcgcccgcggcgtcagctacgagaagaagaagcgcaagaagccgcagcagctgcagggcgacagcagcggcggccttcacggccacgcgcaccagccgccgccgccgcccccgccgcccgccggcgccgcctgctgagcctgagatgttccatcgtcgcctcgacggctcgtagcctcgtacgtacgtacgtacgctctcccatttggccggtatgatgccagattgagcttgagcatacatattttatgtatcatctcgcgcgcgtatgcgtgcatgcatgtgcatggcagcagtagtgtatgatgatccgtgtactctacccgtgagaagcactactatctagt

SEQ ID NO: 22296 - DNA, 427 bp, Zea mays
  Clone ID: LIB3357-062-B11_FLI
gaggagggcttcctccggcgccggacatgggggaggtgaagcacctgtgcctggccaagttcaaggagggcgtcgtggtggacgacgtgctcaagggcatgaccgacctcgccgccgggatggacacggtcaagtctttcgagtggggccaggacgtgctgaaccaggagatgctgacgcagggcttcacgcacgtcttctcgctcaccttcgcctccgccgccgacctcgccgcctacatggcccacgacagccacaccgcgttcgccgccaccttcatggccgccatcgacaaggtgctcgtcgtcgacttccccgtcgtcgtcgccaagcctccgccgtcggcatgacccgcttgccgctctcgcatccgccggccactgtacgcctccccttctcaggtcgcgcagcagatccacgtgtgcct

SEQ ID NO: 22297 - DNA, 1460 bp, Zea mays
  Clone ID: LIB3357-062-E6_FLI
tttctttttttcccagcccacctcgctcgctcccttcccttcccagtggaagtggattggttgattgatcgcacagagctcgcctcacatccacacagcccgagctgctgcccgcccacccgcctgtagctcccctcctcacggagcaggcaggcaggcaggctgggattcccgtcgaagcagggcaggagctagggcgggtggaggagcctttgcccgggaacgaggagaggaggtggcagtggcaccccgcggctagggcagcgagagaggggcgaagaggaaggcggcgggcgcgtccgccatggctagcgaggaagtactccacaaggtccagaatcttatagagcgctgccttcagatgtacatgaacaagaaagaagtggttgatgccctctcccaccactccaggatagagccttgtatcactgaacttgtttggcaacaacttgagcaacagaatcctctgtttttcaaagcatacgatatgaggctaatgcttaagaatcaaataatggtcttcaacaggcttctccaggatcagttcgagattatgaataaagagttttcttcagggatcccttctatgtctcttcctaatgactctaattccaacctattgaagcaagattcatgctttttgccagagactgctcctggaaatgcaatgccagatggtataatgcacaatggaagttcaagtggtataataaatgacacaccatctggcgatcagttacttaatgctagtaaagacttgcatggccttcatagtcaaatagatgcttcaactagtctacagtcagaccagaatgcaactgctgtgctgtatggtgtagacaacgagacaagcgcaacaataaagaccgagtcttgctactcgagtaatgctgattttgccttctgtgggaacactttcctggaatcatgccagtcgataggtgatgcatctggtggtggatccttcagcagctcagagttgaatgggcaaccactaaacgattcaattttggatatggagtcatcatcatttagcttcttgaaccaaatgccccaaagcttcatgttttcagacctggcagatgatttcaaccaaaatgcagaaataacaccatttctcactcctgagacaaatttctccgattcaacagggggagaccatacaggttgagcgggtcatgcacagcgtaccaaccatttgtacataggctcatgggcagtcgaatctgcattggtgaagaacttgaggaccttttgatctagcttgtttatttctctagtttttgcgtcttgatattgtggtagtttggggcttcgggtctggtgggttgtctagcccatcagaacgcgtaatgggtattggtcttccagtatgttttcagcgttaatttggctaatttccccgcttggcttgtacaacaaattttatcagtactgactaccatgagttgtactgctgt

SEQ ID NO: 22298 - DNA, 1542 bp, Zea mays
  Clone ID: LIB3357-062-F6_FLI
ctaacctgctggctgctgctgatcgtcggcgcgccgggctcatgatcggaaattcggaaccagatcccctcactttttatcccatctttggctccggcgagctatgcgagcatgcggcaccaccaagcctgcagccgcgctcaccaggtgggcgctctggtcctcgtctctgccaccttcctcctcacccgcctcttcgaccgcttcctcctcgacacatattcctccgcccccataaaccccggccggcccttctcttccgctgacctccgcatctacgtctacgctgaggacgagatccagggcctccgcgccctgctccggggacgcgacggcaccatcaacgccgccacatgcctcaagggccaatggggcacccaggtcaaggtccaccaatttcttctaaagtcaaggttcagaacatttaacaaggatcacgcaaatctcttctttgttccgagctatgtcaagtgtgttcgcatgacaggggcactaagtgacaaagaaatcaatcagacctatgtcaaggttctgagtcagatgccatatttccgtagatcaggtgggcgcgaccacatttttgtcttcccaagtggtgcaggcgctcatctgtttcgttcatgggcaatatttctgaatcgatctattatccttactccagagggtgaccggactgacaaacgtggtacgagtgcatttaatacatggaaagatattattatacctgggaacgtggatgattctatggtgaagtctgatgctcctgctgtccaaccaatcccgctaacaaaaaggaagtacttagccaacttccttggacgtgcccaggggaaagcaggacgccttcaactggtggagcttgcaaagcagtatcctgacaagctggaatctccagaactcaagttatctggccccaacaaattgggaaggatcgagtacttcaagcacctgagaaatgcaaagttctgcttggctccacgtggagagtcatcttggacacttcggttctacgagtccttctttgtggaatgtgtgccagtgattttgtcagatgaagttgagcttcctttccagaatgtgatcgactacagtgaaatctcgataaagtggccgtcgtccaggattggacctgaactccttgagtaccttgaatcaatatcagatgaaaggatcgaggaaatgattggtcatgggcgtgagatgagatgcttgtgggtgtatgcagctgatactgagccgtgctctgccatgagcggtatcctgacggagctgcagaagaaagtgcggcggttccatcaatcgccggaaacgttctggctgcacaacagaacaattgtgaatagagatctgattgagttccacagctggaggacgcctgttccgttgccatgaaccatgtattctgatttcaactatagccggcatctgtttctgtaccatgttagacatttttctagtgaagctgtgtttgttgttgttcttgctaatcttgagaataaacacatacatcgtgttaaggattgacaatagtacgctaaaaac

SEQ ID NO: 22299 - DNA, 1711 bp, Zea mays
  Clone ID: LIB3357-062-F9_FLI
gggagaagaccaggaataaaaaagaggcgtggtagtggacagtgtgagctgacagggacagtgcccaccaatggtccccttctcacggtcacgctagcagcagcagctctcccccatcaccgaggagagagaagcctgtcgccgcgcgaccgccccacatggccaccgcgctcggtggggggcccaaccccaccgccgacgccatggaggtcgaccctccgcgcgcctccgccgacgagaagcatgtcgccactattattgcggggggaagtgatgcagtgacaggccatataatatcgactactattgggggaaagaatggtgaaccaaagaggaccatcagctatatggctgagcgagttgttggaactggatcgtttggggttgtcttccaggcaaaatgcattgagactggtgaaactgttgcaattaagaaggttctacaggacaaaagatacaagaatagggagttacaaataatgcgatcaattgaccattgcaatgtcatttccctgaagcattgtttcttctctaccacaagtagggatgaacttttccttaacttagtcatggagtttgttccagagtcactttatcgcgttctgaaacactacaaagacatgaagcagaggatgccccttatatatgttaaattgtatatgtaccagatattccggggactagcttatattcatactgtgccaggaatttgtcaccgagatattaagcctcagaatatcttggtggatcctctttcccaccaagtcaaggtttgtgacttcgggagtgctaaaatcttgattaaaggtgaagctaatatatcatatatatgctcacgctattatcgtgctcctgagctcatatttggtgcaactgaatacacaacatctattgatatatggtcagctggatgtgttcttgctgagcttcttcttagtcaaccattatttcctggggaaagtgctgtggaccagctggttgagattatcaaggttttgggcaccccaacgcgagaggaaattcgttgtatgaatcccaactatacagaattcaagtttcctcagataaaagcatgtccatggcacaagatcttccacaagagaatgcctccagaagcaatagatcttgtttcccgtcttcttcagtattcgccgaacctgcgttgtagcgcacttgaggcgtgtgctcattcattctttgacgaattacgagaatcacatgcaagactccctaacggacgcccatttcctccactattcaactttaagcaggaactagcaaacgcaccaccggagcttgtcagcaggctattaccagagcatgctcgacggcattcaggattcggttccttatttgggagtggaccgtagcccgtaggaaaatctcgttttaatgttgggctgctgtacgctgtcagagggcaatctgcatatcctaaatctaagttttagaacctgaccatcttgttgaaaagttgccagccttagaaaaacccgaggtggcctcttgtgtccatgctctgccagtagcggcacataatgctggggggatggttaggtgtattgttaagcacagagggtgactgagctaatgtattttcacgtttcatgtctgtatcgaacttgtacctgtgtaccctgtaccaatcgcagctgatgtaatcatgtaaatgcttctaaactacttcaagctatcatgatggccaattcgc

SEQ ID NO: 22300 - DNA, 702 bp, Zea mays
  Clone ID: LIB3357-062-G8_FLI
gttccaactcctgagcactttctcctcgtcccagacaagccaatcgaagccgagatacgaccatggactccaccggcaccggagcagggggtaaggggaagaagggagcggccgggcgcaaggtcggcgggccaaggaagaagtcggtgtcgaggtccgtgaaggccggtctccagttccccgtcggccgcatcgggcgctacttgaagaagggccgctacgcgcagcgtgtcggcaccggcgcccccgtctacctcgccgctgtcctcgaatacctcgccgctgaggttctggagctcgccggtaatgctgccagggacaacaagaagactcgcattattccgcgccacgtgcttctggcgatccggaacgacgaggagcttgggaagctgttgggcggcgtgaccatcgctcacggcggtgtgctccccaatatcaaccctgttctgctgcccaagaagacggcggagaaggcgtccagtggcgggagcaaggaggcaaagtcgcccaagaaggccgccaagtcccctaagaaggcatagactgactgtccggagtgatctgatgtttagcagtaccttgttaccagtatgcggtgatgcgtaggctgcagatgggacgaatgtgcttgtatgtgtatgtgtcctgctgcaagttgtcctttgctatttagaatggaagaagaaatgccttgtttctctg

SEQ ID NO: 22301 - DNA, 739 bp, Zea mays
  Clone ID: LIB3357-063-A4_FLI
gtgggctggcttctcctccccctcttaccaagtcctcctcgggttagggttccttagggttttgtggaggggcgatggcggcggctgatgtggagtaccgttgcttcgtcggcgggcttgcctgggccaccagcaacgagtcgctggagaatgccttcgcctcctacggcgagatcctcgactccaaggtcatcaccgaccgggagacggggaggtctcgcggcttcggcttcgttaccttctcctccgagaactccatgctcgacgctatcgagaacatgaacggcaaggagctcgacggccgtaacatcaccgttaaccaggcccagtcccgtggcggtggcggtggcggcggtggctacggcggcggtcgcggcggcggcggctatggtggcgggcgccgtgacggcggttatggcggcggtggcggctacggcggtcggcgcgagggtggtggcggcggctacggaggcggtggcggctacggcggtcggcgcgagggtggtggtggcggctacggcggcggcggcggcggctggagggactgatgtgtgggcccatcctggcttcggccgagttatcttatctatctatagtatcgtgttaccgttcgcttctgtcaccgtgttagtgtccgttctacctttggattaggtgttggtacccctgttgttccctttgtttgctcccgctatgaaacgagacgagagaagaatgagcaaggtttttgttcgcagct

SEQ ID NO: 22302 - DNA, 1019 bp, Zea mays
  Clone ID: LIB3357-063-A5_FLI
gccctagtgctcctctcctgttgtttcccggccccctccttcctcccacggtcccaccatcccagggccgccgcgctgcttctctttcccgtcgcacctccaacgctgccgccgcggcagattaatccaacaccgggccgggatacgtgacaggtttctgagctcgcagctctacgccagcgatgccggagacggcggcgccgatcggcctgtcatgggcgcccaagcttccttccttcgcaacgaccagcggcggcagcaagagcgaccacgcgccgaacccgagcgctgcgcagggatcgctctggaaccgcgcgagcgacctcgtggacgggctgttcgttgccccgagggaccctaggcagctgaataagctggccaggaagaacgtcaaggacactgccggcaagggctggttcgacatgccagctccgaccatcactcccgagttgaagaaggatctcgagattttgcagctgaggcatgtaattgacccaaaaaggcacttcaagcgggcaggaaaatccaaggcccttcccaagtacttccaagtcggtacggtcgttgagcctgcatctgagttctactcaagtaggctgaaaaatagggaacgcaaggcaacattggttgacgagctgttatcagatcaatctctgaagagctacaggatgcgcaaggtacgtgaaattcaggagatccgtacaccaggaggcaaccaaaagtggaagaacaagggcaagaaaacgctcaagagggccaaggataggaggaaatgagactggcgtgctagccttgtggtccagttgtgagagaacagattggagaagtgaaccaaggagcgccttcaaataccccctctctcgatttgtgcggggtatatagattctggttccagtgtagtgtggtgaacttcagtaacatgatgaattgctttagatacttcaaaaaatgttgctgtaagtctgtaacacacatgtatggttttcagcccgtggttatcaattctgtcggttgggagc

SEQ ID NO: 22303 - DNA, 1898 bp, Zea mays
  Clone ID: LIB3357-063-C9_FLI
cctgcacctgcctgcctccgtctcctcctccttcagttgttgccaccgcccttccctcccttcctctccgcgtcgctcgccgtcccatctttggcctggacacctggcctgcccccccttcgcggacgcgccgggtcgccggccgaatccgccctcccgccgctgccaacgtcgatctgcgcccgcccgcccgcccgccaagtgagattcaaaggtaggacgacgggggggtcgagttcttgtcggtttcattcctggccgccgacttcacatgtcaacaaccccaaggagcagaagccagggtagtaggaccactaggccgtggatcttgtcagggatggactttgctggttccagacggaagcctaatctcacggggaagattgccgtggctgctgccctcacggtcatgtgcataatcgtgttgaaacagtcccctagtttcagcggtaccagcgtgttctctcgccatgaaactggggtgacccatgtgttagtaacagggggtgctgggtatattggctcacatgctactcttcgtctccttagtgacaagtaccgagttaccattgtggataacctatccagagggaacattggagctgttagagttcttcaacggttatttccagaacccggaaggcttcaatttatttatgctgatttaggcgatgccaaagctgtgaacaaaatattttcggagaacgcatttgatgctgttatgcactttgctgctgttgcttatgttggtgagagcacaatggagccactcaggtactaccacaacataacgtcaaacacattgacagttcttgaggcaatggcagcacataatgtaaatactctgatttactcgagtacgtgtgcaacctatggtgaacctgatacaatgccgattgtagaaacaactcctcagaatcctatcaatccatatggtaaggcaaagaagatggcggaggacatcatcttagattttacaaaatcaaagaagcaatcaaatatggctgtcatgatcttaagatacttcaacgtgattggatcagacccagagggacggctaggagaagctccaaggccagagctacgcgagcatggacggatatccggtgcttgctttgatgcagctttgggaatcattccagggctaaaggttcgtggaaccgattactccactgcagatggaacttgcgttagagactacatcgatgtcacagatcttgtagatgctcacgtaaaagctcttggtaaagctcagccaggcaaagttggaatctacaatgtcggaacaggccaaggtagatcagtgactgagtttgtagaagcttgcaagaaggcaacaggagcttctatcaaggtcgaatatcttgcacgtagacccggagattatgccgaggtatacagcgatccgtcgaaaatccacatggaactcaactggacagcccagtacactgatcttggccaaagcctcgcccaggcgtggaaatggcagaaagcgcacccgaacggatatggaccagcctgattcagagttcaaagattgagagagactcgtcacgcagatccaaagggtccatgtgcagtcatgtagccttcagacagttggttcttcatcaccatagaaagatagcaaagagcaacagaagagtcctgattcttttattgcagcgctcgaagaaggaaaaaatatcacagagaaccccctacctgctccttgattagtttcaaatatatatatataggtcctcgttgacattttaatataatttgatgtgtgctgaggcgctatataataacacaaacgaaattttgttgtagacagggtagatcgatctcgtgtatcaacttttgtggtggtagaatgaaaggatataaataagttgatgtaagtttttgtttcc

SEQ ID NO: 22304 - DNA, 1059 bp, Zea mays
  Clone ID: LIB3357-065-E5_FLI
attgcagcagcgttggcgggccttgtggcgaggaggaggaggagaaggagggggcgtggaggcgcggcgattgttcgcgggatgagctacggcggcagcagctccctcgcgcccggtgccaagaggccgttcgagtacgggagaacgcatgtggtgaggcccaagggcacgcacaaggccaccattgtctggctccacggacttggggacaatggaaccagctggtctcaactgctggaaacgcttccccttcctaatataaaatggatatgcccaactgcaccttcaagacctgtgtcattgtttggcgggttcccctgcacagcatggtttgatgttgctgacctttctgaggatgcacccgatgacactgaggggatggatgcctcagcagcacatgttgcaaatttgttgtcaactgaacccgctgacatcaagcttggtgttggtggctttagtatgggtgctgctactgctctgtactctgcaacttgctttgctcatggaaaatatgggaacggcaatccataccctgtgaacctaagtcttgccgttggtcttagtggctggcttccatgtgccaggaccttgaagaacagaattgaagcctcaccagaggctgcacaaagggcttcaacaatacctcttttgctctgtcatggaaaagctgatgatgtagttctctacaagcacgggcagagatctactgatgccttgaaggcaaatggcttttccaatgtgctcttcaagtcatacaatagtcttggtcactacactgttccagaggagatggatgaagtttgcaaatggctcacagcaaatttggggctcggcacttcgtcatcttgatcgcgagaaagactcgcggtgtcggtgtcttctccagggtagtaaatgggctaatagcaaatttgggcttgggtatacggccatgttctagcttttcttcacgcagacgtgtctgcgagtgctgtacgcttataatttctatattctggtctacgtcgatttggttgacacggataatgtttgtttcaaatattctgttttccggtttgg

SEQ ID NO: 22305 - DNA, 668 bp, Zea mays
  Clone ID: LIB3357-065-G9_FLI
cccctctccatttttcatctcattcggcgccgcggcaccccctgctcgtcactcgcgatggcccggatcaaggtgcacgagctgcgcggaaagagcaagacggatctgcaagcgcagctcaaggagcttaaatcggagctctccctcctacgcgtcgccaaggtcaccggcggggctcccaacaagctctccaaaatcaagatcgtgcgcacctccatcgctcgcgtgctcaccgtcatctcgcagaagcagaagtcggcgctgcgtgaggcgtacaagaagaagaagcttctcccgctcgatctccgccccaagaagacccgcgccattcgcaggcgcctcaccaagtaccagctctccttgaagactgagagggaaaagaagcgtgagaagtattttcccatgcggaagtacgctatcaaggcctagattagtgaaagaacagcttttatcctatcaagttctgcccagaagtttcttgagtttgatgtaccgcacatctatcgtcattacaatggaatgatgaaaacgaatatgttttcggcttctactccacacagtctttgttggcgatgctacacgtcttattaatgaattcttgtccatgtgaaaccttcgtcggtgaagtttcatgtctcataagtgaaccgatctcttcgttcgctttg

SEQ ID NO: 22306 - DNA, 1798 bp, Zea mays
  Clone ID: LIB3357-066-B5_FLI
ctccacttcttctccccgtcccatttcttaactccccgagcccccaaaatcacgcacccagagaggggagaggcggagtgacgggggagaggcggaggccacgccccaaacccaaaccctagccacacgcgacgccgatgggatgcgcgcagggcaagtgctgcctgccgcggcacccgaggaggggctccgccgccgtcggcgggcgcggcggcgccacgcttggccgcgccgcggtgcccggggccgggctggtgctggagtacgccgcgttggccgtggcggggctctacccagactccccggccagggagtcccaggacacgcacctcgtcgccacgcgcttcgcgggggatcctgacctccacctcttcgccgtcttcgacggccacggcgctgccggagcctcctgcgccgggttcgcgcgggacgcgctcccgcgcctcctcctcgcctcgctcgccgcgggcccagccgccgcgttccgggacgccatgctggccgccaacgccgagatgcatgcggcgcccggcgtcgacgactccatgagcgggaccaccgccgtggccgccctcgtcgccggcggcgcgctccacgttgccaacgtcggcgactcgcgcgccgtcgccggtgtctggcgcgccggccggctcgtcgccgaggacctctcctgggaccagaccccgttccgcgccgacgagcgcgcgcgcgtcaaagcctgtggcgcccgcgtcatgtccgtcgagcaggtggagggcatgcgcgatcccgaggacgtgggctggacgcccaacgagggggacccgccacgcgtctgggcgcgcgacgcactctacccaggcaccgccttcacccgcagcctcggggacctcgccgccgaggccgtcggggtcatcgccgagccggaggtgaagagcgtcgagatcactccatcgcacctcttcttcgttgtcgccagcgatggcgtgttcgagttcctctccagccaggaagttgttgacagggttgccatgtatcaagatcctcgggatgcctgctcagcaatcgctgctgagtcatacaaactatggcttgagcatgaaaacaggacagatgatataacaataatcattgtgcatattcgagacatggaaaatgcagggagtgacaaagcggactatggtagcatcggagcatcaatagctgggcagacaatacagtcagagatacctgtatttgtacaaccagaagcaagtaacatgaacagatctgctgctaccggaatgcgatcaccgtcttttggctctccaactgaacggagcctctcatgtgttgctccttctcctacggatcctttgttgatacatggcagagtatcagatgcttccaagcctgggcaaagtgagcagcgagctgcatcacaaccaccggtacaaacttggcatcaaatagacggggttactactgagctggagcggtctatgcagcaaagcatccttccaacctcctgctgaaagtagagaatgcgagttgaatgacaaaaagaggcctcgagataacccaccgccatcttggagctactaaccgtaccatggatgcgatgtttgccagcagcaaatctcgtgctgttgctcgtgttttggtagagcacctgctgctgccgacgatgcgaggttcctgatcctgtgtgggatcatctaaccatgggctgagtggaattgagttattctccgtttcatttgtactttgtttacttttcacaagatatagattaattctaagttgatgcctgtcgaggtatcagtatcatttgagacgc

SEQ ID NO: 22307 - DNA, 1145 bp, Zea mays
  Clone ID: LIB3357-066-G8_FLI
ctccaatcatccaccgcgccgccgcagaggcctcgtcctcaccttccccgtaggaagccgaagtacagccagcagcgtcgccatcagcaccgatcatggccggtacgaaccaaatccggaagcccctttttctccgctttgctcttgctgccaaccgcgtctttgcttgtgtatggttatgatgggccgcgtgggaagactacgagcaggagcaggatatggaggtggaggcactgcaggccatcctcatggacgacatcaaggagatcgacccgagtgagagtgggatcgccaccaccgcccggtgcttccagatcctactctctcctcaggatgatgattttgatgagtcagcttatgtcccagttcaactggccctgatttttgcgcacactgagaagtaccccgatgaacctccactactaaatgtgaaaagtgtacgagggattaaaccacatgatcttgcatccctgaaggaaaagcttgagcaagaggcaaaagagaatcttggcatggctatggtctacactcttgtttcatcagccaaagagtggctaagtgagatatatggtcagaatggtggtgatgaggaacctgaagaaactgaagcagaagaggaggttattataccacatggtgaagctgttactgtagagagctttctggcgtggagagaccgatttgaagctgagttggccttacagcgtgctaaacttatgccagattcagctcttacatcctcaaaggaaaagaaactcacaggacggcagtattttgaaagtggaaggcatgcagtgaaaggagcaagcacagttgctgatgaagatgaagaagaggaggaggatattgaattcgatgatgattttgaagacgatgaagaggacatgcttgagcattatctagctcaacaatcagagaactcagcagcttaaccttctaggccaaacaaagtaccttttcgggcgcagctttaccttaggaagccaaatgttgttatatgttgcaactgtagctctagtgcgcactattttttttttatgtttctcatcatttggttgtatttgtggatgctttctagttttatcaagggggctgtgggttctcattaatatatacgctggaggagatagaagatcaagctgcct

SEQ ID NO: 22308 - DNA, 828 bp, Zea mays
  Clone ID: LIB3357-283-C7_FLI
tctctctctctctctctctctctgataagctagctcgcctgctgccgagtgataggaggagcgagatatatacatcgatctgaatccagcagcagcaggtagcatagcatagcatagcatagatggcggcggaggtggaggccgccaaggacatcgccgaggagaaggccgtcgtgccgttgccaccgtcgcccgccaagccggccgacgacgactccaaggccatcgtcgctcttgtcgtcaaggacgctgctgctgggaaaccttctacagctattattggaggttcaactgaaagagatgcttacctcgccaagatcgtgtccgagaagaggctgagtctgatcaccgcctgggaggagagccagaaggcgagagccgacaacagggctgccaagaagcttgccttcatcacgtcctgggagaacgccaagaaagcggagatggaggcggagctcagaaagatcgaggagcaactggagaagaagaaggcggcgtacgaggagaagctcaagaacaagcttgcgatgctgcacaggacggcggaggagaggagggcgcagacggaggccaggcgcggcgaggagaccatcctggcggaggagatggccgccaagtaccgcgccaagggcgagggccccaccaagctctttggcctcttgaaagcgtgatgacctctgtttcgtgtgtgtatttcgtattctcaacaagtgcacttggtgtgtgtgctgtttgttgttttctctcttgtattccaaggcttgcttgacaatatctgttgtattgtatttgtataggagtgcagtgcagtgcagtgctattctttct

SEQ ID NO: 22309 - DNA, 1229 bp, Triticum aestivum
  Clone ID: LIB3399-014-A6_FLI
cgtgacagagccgacggaggtgagtgggatacgggataagcgtatatatagcccgcctgggcgctgggtgaactgaaccgatcgacctcgcgggcggcgatgatcaaggccgagccggagctccgtggccagctacgcggaggcggcggcatgctgcagcagcgctgcgactcgtgccggtcggcgccgtgcgcgttctactgccgcgccgactcggcggcgctctgcgccgcgtgcgacgcggacgtgcactcggccaacacgctggccagccgccaccgccgcgttccgatgggcgccgtggccccggcctcgcctgccggagggcccttcgtcgtccgccccggcggcgtcaactcctcctggcccatccgcgagggccggaggtcctactacgacgacggcgagggagaggaggaggaggaggaggaggcgacgtcgtggctgctgctcgacccgctccggggctcggagggtgacgcgccggctttcggcgacgcgctcgtcgctgacttccttgacctcggacgagcaggcgagaaggacgcgtcgagcaaggagtaccgcggccacggtgtcgagagccacgagggcagccacgagctcgtcgtgcccggcgagccggtggcgcagctgcatgagcggcagggcttcacggcggagatgtcgtacgatgcacaaaattctaaccatgggtacggatttggcgcaacattccaacgcagcctttcaatgtcatcatcaccggacaacagtagcaccgttcaggatgtgaccagctcgtacatgaggagcagcgagagcagcgtcgacctcttctcagcggcggcgcacatgtcgccgcagttcatgggcatggccatggacagggaggccagggtgcaccggtacagggagaagaggaagatgaggcggttcgagaagaccatcaggtacgcgtcgcggaaggcctacgccgagaccaggccacggatcaaggggcggttcgccaagcgcgccgacgccgacctcgaggtggaccagtacttctccgcagccgcactgtccgactccagctgcggcgttgtgcccactttctaggccggctcggtggagagaccatgagcgttcctccttccatggtcgatcgacgcctacatgttggttggctctccttaatctgccaaatattcagaaatttattggaggcgtcaaagcttcacctgtaaatatatggaaagatgccggat

SEQ ID NO: 22310 - DNA, 1561 bp, Triticum aestivum
  Clone ID: LIB3399-042-F1_FLI
gagagagagagagagactccattgttgaagtgtgttcactgaactcctcctcaaacaacaatggcgacgacggttacactcaaatccttcaccggacttcgtcaatcatcaacggagcaaacaaacttcgtctctcatgtaccgtcatcactttctctccctcaacgacggacctctctccgagtaaccgcagccagagccactcccaaactctccaaccgtaaactccgtgtcgccgtcatcggtggtggaccagcaggcggggcagctgcagagactctagcacaaggaggaatcgagacgattctcatcgagcgtaagatggacaattgcaagccttgcggtggcgcgattcctctctgtatggtcggagaattcaacttgccgttggatattattgatcggagagtgacgaagatgaagatgatttcgccgtcgaacattgctgttgatattggtcgtacgcttaaggagcatgagtatataggtatggtgagaagagaagttcttgatgcttatctgagagagagagctgagaagagtggagccactgtgattaacggtctcttccttaagatggatcatccggagaattgggactcgccgtacactttgcattacactgagtacgatggtaaaactggagctacagggacgaagaaaacaatggaggttgatgctgtcattggagctgatggagctaactctagggttgctaaatctattgatgctggtgattacgactacgcaattgcatttcaggagaggattaggattcctgatgagaaaatgacttactatgaggatttagctgagatgtatgttggagatgatgtgtcgccggatttctatggttgggtgttccctaagtgcgaccatgtagctgttggaacaggtactgtgactcacaaaggtgacatcaagaagttccagctcgcgaccagaaacagagctaaggacaagattcttggagggaagatcatccgtgtggaggctcattcgattcctgaacatccgagaccacgtaggctctcgaaacgtgtggctcttgtaggtgatgctgcagggtatgtgactaaatgctctggtgaagggatctactttgctgctaagagtggaagaatgtgtgctgaagccattgtcgaaggttcacagaatggtaagaagatgattgacgaaggggacttgaggaagtacttggagaaatgggataagacatacttgcctacctacagggtacttgatgtgttgcagaaagtgttttacagatcaaatccggctagagaagcgtttgtggagatgtgtaatgatgagtatgttcagaagatgacattcgatagctatctgtacaagcgggttgcgccgggtagtcctttggaggatatcaagttggctgtgaacaccattggaagtttggttagggctaatgctctaaggagagagattgagaagcttagtgtttaagaaacaaataatgaggtctatctcctttcttcatctctatctctctttttttgtctgttagtaatctatctacactaatgttgttactcttcaatgt

SEQ ID NO: 22311 - DNA, 1397 bp, Triticum aestivum
  Clone ID: LIB3399-057-E8_FLI
gcgaatccagtgatacttttttgtcatttctatctcgcaatcttctcgtaggtagctaggatcgctgtgattatacgataccggaagaagcattgctgttgcgctggaggtggtctggtttgtacgttttggaggcggcggagatgggtggctcggaccagaaggcggccggcggggccgtgggcggcaaggcggcgcgcgcgtgcgacgggtgcatgcggcggcgggcccggtggtactgcgcggctgacgacgctttcttgtgccaggcgtgcgacacgtcggtgcactcggcgaacccgctcgccaggcggcacgagcgcctccgcctgcgcgcgacgtccccgctgccggccgagggcgtggccgcggtgaaggggtcgccggcgacgacgtccaagtgccttgacgtcgcgccggcgtggccgaagcggaaggcgcgcactcggcggccgccggtcaagagcgtcgggcagctgctgtcgaggcgcctcgtggtgcccgaggtgggagccggggagtcctccacgtcggacgagcggagggcgcccgaggaggagcagctgctctaccgcgtgccggtctttgaccccgccctcgccgagttctgctcgccgccgccgatcgatgactcacgccacggtgaggacgtcgaaggcgccgtggaggacacgaaggagcacatggccacaccgtcccccgtgcaggagctccccgattgttttgccagtttcggcccgacggacgccgatctcagggagttcgcggccgacatggaagcgctcctcggccaaggcctggacgacggcaacgagctggaggactcgttctacatggaggccctagggctcatatcgccgccgggggaacacggcgggcgggtaaaggtggaggccgacggcagccttgtctcccgaagcaacggcgttctggcgtctggccatgacctgaagcgggagttcaacggcagcccgccgacactggtggatgacgacgacagtttcgagcacaagacgtcgacggcgagcaacggagacgccgttgacgatgcgcagttcttgaagaggagcctggatcttaggctgaactacgaggcggtcatggagagctggggcagctcgccgtggaccgacggccggcggccgtccggccagctcgacgacttgttgctccacgaccacgcgggcatgtggacggccggaggaggaggacggcatggcgatgcggcgtggccgccgaggccaaggacggacgagtggcgggaggcgcgggtgtcgcggtaccgggagaagcggcggacacggctgttcgccaagaaaatacgctacgaggtgcggaagctgaacgcggagaagcggccccggatgaagggccgcttcgtcaagcgcaccggcggc

SEQ ID NO: 22312 - DNA, 1324 bp, Triticum aestivum
  Clone ID: LIB3400-020-G11_FLI
gtgataacacgagaactggaacatctccgtcgcctgtggtggcagtgagcagtggagagccggtgatcggcctgaagcttggcaagagaacttacttcgaggatgtctgtggagggcagaatgtcaagagctcgccatcgggtgctgcgagcgcgccaaacaaatctcctgctttgggcaagaaggcaaaggcggaacaacagaagccacataactcgtactgtcaggttgaaggctgcaaagtcgacctctcttctgttaaagattaccatcgaaagcacagagtctgtgaacttcactctaaggctccgaaagttgttgtcgctggtctggagcgacgcttttgccaacagtgcagccggtttcatgctttagctgagtttgaccagaaaaagcgaagctgccgtaggcgtctcaatgatcataattcccgcaggcggaagccacagccagaagcaatttctttcagttcatcaaggatgtctacgatgttttatgatgcaaggcaacagccaaatttcctatttggtcaggctccttatgttcaaatgagaagctgtggaagttcttcatgggatgacccaggaggcttcaaagttacacacacaaaagctccttggttaaaaccaacaactgctgcaggtgttcatgggatacatttatctagtcagcagatgtcggacaatattatgccacatggtgcacatcatggtttcgatgggttcatggcattcaagggaacttgtacaaagttccctaatcaaggtgtccaagcttctgctgttgcttccgactccagtggagccccggatcttcagcatgctctctctcttctgtcaagcaacccagtgggtgctgccaacctccagccaagtccccagatgcactctggggtggcagccattgccggcgcccccaaccccgcgatgcacgcgctgggatcatcgacggggctctggctagacggcagccagcccctcgatgatcacccgcggttccaggtcttcgagcgcttgggggaccatgacagcgagctccagctcccaaagccttcctacgaccatgcctcgcacttcgaccggatgcactgatgatggctccggtccactgggtgcgtgattttgtcacgcgatcaacgccgtttcttcggcctgaaaatcgtaatgctgaatttactttgctttgacgccgttgcctgtctagaggcctatggttttggcaatgcctagaataaaggcgcacacgaacagacttaggatcaaatcgacccagttgtgttgccatggagaaagattttgatccatcattagccatttgtctgaat

SEQ ID NO: 22313 - DNA, 1224 bp, Triticum aestivum
  Clone ID: LIB3400-026-F7_FLI
cgcgacgcggcggtgaaacggagtagctgctggcttggtgcggaggtgcgcgccagcggctttggttttcatttgatgagctgctcggggaaggcggcggacggcgcgatggggagcaaggcggcgcgggcgtgcgacggctgcctgcggcggcgggcgaggtggtactgcgcggcggacgacgcgttcctgtgccaggggtgcgacacctcggtgcactccgcgaaccctctcgcgcggaggcacgagcgggtgcgcctgcggcccacgtcgccgctgctccctggtgcggccccgcgggagaggcgccgcggcgacgaggtcgtgccggcgtggttcaagcgcaaggcgcggaccccgcgctcgcaggccaagagcgtcgggcgcctgctctcgaggcggctcgtcgtgccgcaggcgtccggcggggactcgccggaggagcagaagtgcgacgtggagaccgacgaggaggagctgccgtaccgcgtgcccatcttcgaccccgccctcgcggagctctgctcgccgctgactctcgaggaagcgacgacggccgtcgcgtcatgctgcaatgaggacggtgccatcgtcgaggacccgacaaagccagctgcgacgccgtctccggtgccggttcagttcttccccgacagcctcgtaaacttgggcccgacggacgccgagctcatggagttcgccgcggacatggaggcccttcttggccggccgggcatggacgacggcgacgaggaggaaccgttctgcatggaggcattgggcctcatcgagccgatggacgtagacggcgggcgagtcaagctggagatcgaccccatgcgagcgtgcggcctcgagcagaagccggaggtgtccggcgatatgttcgacatcgacttcgactacgactcgcccctcgggacaccggacgagaacgcggcaagcagcggtgccagtgcggacgcccagttcaccccgaggagcctcgcgctcaatctaaactacgaggccatcatggagaactgggggagctcgccgtgggccgacggcgagaggccgcacgtcaagctcgatgactgctggccacacgactactactcgctgcaggagggcgcttggatgatgggaggagtggttggccatggcggggaggggttggggacgccgaggctgaggatggacggcggcagggaggcgcgggtgtcgcggtaccgggagaagcgg

SEQ ID NO: 22314 - DNA, 2054 bp, Agrobacterium tumefaciens
  Clone ID: LIB3425-125-D5_FLI
ctaaagattgccgtcttcaaggcgagtccggtcacgctgttgcgccttcggaatcacgaaaaggtttgcctgcattcgtccggcatgccaaagagcgcgcatggacgctcagatgacgaatttcgaaacgcggctgcgcgaaaacgcggcgaaaaccgaagcgctgcttggccacctgctttccggcgaggcgcgcgcggacgagatcacacgcccgcaaaacctgctagaggccatgcgccatggcgtgctgaacggcggcaaacgcctgcggccttttcttgtcatcgagagtgtcgcccttctgggcggagatgccgaagccggcctccacgtcggcgcagcactcgaatgcctccattgttattcgcttgtccatgacgatctgccagccatggacgacgacgacctgcgccgtggccagccgaccgtgcaccgcaaattcgacgaggcaaccgccatcctcgccggtgacagcctgctgacgcttgctttcgacataatcgcctcggatgacaatccgctggcggccgagcgcaaggccgccctcgttatctcgctcgcgcgtgccgccggtattggtggcatggctggcgggcaggcccttgatctcgctgccgaaaagaaagcgcccgacgaggatggcattattacattgcaggctatgaaaaccggtgccttgctgcgtttcgcctgtgaggccggcgcgatcattgccggcagcaatcaagccgaaaggcagcgactgcgcctcttcggcgaaaagattggcctttccttccagcttgccgacgatcttctggatctgaccgccgatgccgccaccatgggcaaggcgaccggcaaggatgccgcacgcggcaagggcacgctggtggccttacgcggcgaagcatgggcacgcgaaaagcttcaggagcaggtggcggaagccagcgaactcctcgccccctacggcgaaaaggccgcgattctcatcgcggccgcaagattcatcgccgaacggaaaagctgacctctcagcttttcatcatccaatcagcccttgagcggcgaaatcagcacttcgacgcggcggttctgcgcacgaccatccgacgtggcattcgaagcaatcggctgagacgggccgaagccgagcgtcgaaatacggcgctggtcgacgccgcgtgcaccgagataattggcgacagaggcagcacgacgctcggagagcgcctggttatgctgcaggctgccggtggaatcggtgtggccgttgatgtcgatcagcgtacggttgaacttgttcagtacgatggcgacagaatcgagtgtctggtagaacggcggaatgacctggtcctgatccgtggcaaaggtgatgttggatggcatgttgaggacgatgctgtcaccgcggcgggtcaccgaaacgccggttccctgaagctgggcgcgaagctcggcttcctgcccgtccatgtagttgccgatggcgccgccagcgagagcaccgatgcccgcaccgatcagcgcggcgttgcggcgaccaaccggcgagccgccgacagccaaaccaccgagagcaccaacgacagcgccgatgccggcaccgccggccgtgttcgacatcttctgctcgcccgtatagggatcagtggtggtgcaggcggaaagataggtgccgcaaagggcgacgatcgcgatttttttgatcatttttctggatgctccgagaggttcaggaggtatgacagtgaaattcaggccgttgcaacttacgcattactccgccgcatctttctggccaaaacgcttttcgatgtaatcgatcacaagcgcttcaaaatcggcggcgatattgggaccacgtagcgtgagagccttttcgccatcgatgaaaacaggtgcagccgggctttcgccggttccgggcagtgaaatgccgatatcggcatgtttgctttcaccggggccgttgacgatgcagcccatgacggcgacgttgagcgcctcgacccctggatatttttcacgccagatcggcatgttcttgcggatgtcctttagag

SEQ ID NO: 22315 - DNA, 900 bp, Oryza sativa nipponbare
  Clone ID: LIB3431-007-B4_FLI
acctgctgtccgtggcgtacaagaacgtcatcggcgcgcgcagggcgtcgtggcgcatcgtgtcctccatcgagcagaaggaggaaggccgcggcgccgcgggccacgccgccgccgcgcgctcctaccgcgcccgcgtcgaggccgagctctccaacatctgcgcggggatactccgcctcctcgacgagcgcctcgtccccgccgccgccgccgtcgacgccaaggtcttctacctcaagatgaagggcgactaccaccgctacctcgccgagttcaagaccggagccgagcgcaaggacgccgccgacgccaccctcgccgcctaccaggccgcgcaggacatagccatgaaggagctgtcgccgacgcaccccatcagactgggccttgcgctcaacttctccgtgttctactacgagatcctcaactcgcccgaccgcgcgtgcacgctcgccaagcaggccttcgatgaagctatttcggaactggatacccttggggaagaatcctacaaggacagcaccctgatcatgcagcttcttcgcgacaatctcactttgtggacttctgatatgcaggacgatggaggtgatgaaatgagggatgcaaccaagcctgaggatgagcactagctaaagatcctagtgacagtcgtctgtctcttaaccgctgggggtagttatgatgcttgtacaaggaccattttcttgtgtcctttcgtcgggtctttgcttaccctttgtttacttatattgctatcgccatcctcatgtattatttgttactttcctgctggaatcctgctcgtgtgtgggagagtgcctcaagcctttaactaggacaaggattgtcaactcttgtttactatgattgaatggctatgcttgttcgatattt

SEQ ID NO: 22316 - DNA, 1095 bp, Oryza sativa nipponbare
  Clone ID: LIB3431-014-G12_FLI
gtggtaagactactctgactggcgttgaggttggagttgacgtcacttcagcccagaagatctggctcgcgttccaagcgctcggtgacatcgcgttcgcctactcctactccatgatccttatagaaattcaggacacggtgaagtctccaccggcggagaacaagacgatgaagaaggcaacgctgctgggggtgtcgaccacgacggcgttctacatgctgtgcgggtgcctggggtacgcggcgttcgggaacgcggcgccggggaacatgctcaccgggttcggcttctacgagccctactggctgatcgacttcgccaacgtctgcatcgtggtccacctggtcggcgcctaccaggtgttctgccagcccatcttcgccgccgtcgagacgttcgccgccaggcggtggccgggctcggagttcatcacccgggagcgccccgtcgtggccggcaggtcgttcagcgtcaacatgttcaggctgacgtggcggacggcgttcgtggtcgtcagcacggtgctcgccatcgtgatgcccttcttcaacgacatcctgggcttcctcggcgccgtcgggttctggccgctgacggtgtactacccggtggagatgtacatccggcagcggcggatacagcggtacacgtccaggtgggtggcgctgcagacgctcagcctcctctgcttcctcgtctcgctcgcctccgccgtcgcctccatcgagggcgtcagcgagtcgctcaagcactacgtccccttcaagaccaagtcgtgatcccgatcacgacggcctttttttttttgcttttgcatcctgatgaaaaaagatttcagaaacatatgcacaacaaatgccggaagttagccaagagtttggtcaccagctcggtgcgttggtcggtcaggaggaggagggttcaacttgtgtaggttaagaaatgctagagagtatggagaccatcttcgattgctgctcatgtatagaaaaaagaggaagcttcgtattcatgtaatgaatcggaatgtttaacaaacaaggcttgttctgaactcttctcagggacaggcatggataacagattaaagat

SEQ ID NO: 22317 - DNA, 992 bp, Oryza sativa nipponbare
  Clone ID: LIB3431-029-E7_FLI
gaagaattctgcatctatatcgggcacagttttgaatcagagtttgcatgaaggaagccaaactgtaaattgtcagccatcatttcagccagtgccatcctccacacctatgtcttcctccacacctggaaagcatcgtttctggccaacggatcactggagcgccgcggacacaaggcactgtttactcccaatccgtcccccctataaagctagcctcaatcccactacttcgatgttgccctgtagaccattatgcaaattttccaaacagtgttagaaaggtcacattgatggattccaaaggtgagaaactccatgttcaaagaaccagtcctgcatgatgccattaagattggtgtgaactttaggaaccaagagctactgcaaccggcagaacaaaataatgctccaagaaaaccagaagtggtgatagttgaagataatgaagtggtgattgagccattgccaaaaaagaagtgcactggcaacaagggataaactatccctctaggagttgaagtcattgtgcgagagaaacatggcaagcagtggcgccgggagagacgagaggtggatcctcgccggcgccaccgcgctagtcaccggccgcagcaaaggcatcggccgcgccatcgtggaggagctcgttgggttcggctcgacggtgcacacctgcgcccgtagcgaggcggagctgagcagatgccaggaggaattgacggccaagggcctcgccgtctccttctctgtctgcgacgtgtcggtgcgcactgacagggaggagctcgtcagcagggtgcgcgagctcttcggcggcaaactcaatatccttgtaagtctcataatctcttgccaccatgatttccagcgatccaacggtatatgtaaaataaggggggctgttcacattgcacccacctaacaagttcaaacaagttcatgtacctctgatgtaatttactctaaaataaatcttatcagattttcac

SEQ ID NO: 22318 - DNA, 654 bp, Oryza sativa nipponbare
  Clone ID: LIB3431-030-F4_FLI
ccagaacctgttccagaaggacatcttcaccagcatcaactggatccccaaggccaagaccatgtcggcgctggaggaggtgttccgcatcgcgcgcgcccagacgctcatcgccctgtgcggcaccgtcccgggctactggttcaccgtcttcctcatcgacatcgtcggccgcttcgccatccagctgctagggtttttcatgatgaccgtgttcatgctcggcctcgccgtgccgtaccaccactggacgacgaaggggaaccacatcggcttcgtcgtcatgtacgccttcaccttcttcttcgccaacttcggccccaactccaccaccttcatcgtgccggcggagatcttcccggcgaggctgcgttccacctgccacggcatctcggcggcggcggggaaggccggcgccatcatcggatcgttcgggttcctgtacgcggcgcaggacccgcacaagcccgacgccgggtacaaacccgggatcggggtgaggaactcgctgttcgtgctcgccggatgcaacctgctcgggttcatctgcacgttcctcgtgccggagtcgaaggggaagtcgctggaggagatgtccggcgaggcggaggacgacgacgacgaggtggccgccgccggcggtggcgccgccgt

SEQ ID NO: 22319 - DNA, 691 bp, Oryza sativa nipponbare
  Clone ID: LIB3431-038-C6_FLI
gccagagagctatagctagccaagattctccagtgagattctcagctgtccccggccgttcgtccgtccaaggaaggagagccatggtgggaacctcctcctggtcatcgtcctcgacgtgcacgtcgtcgctcggctctctcgacgacgacgtcgtcgtcgcgtgcgtcgtcaaggcagcggacgccgcagccgaggggacgttcgtcaagttcctctgcagctacggcgggaggatcctccctcgccacgccgacggcgcgttgcgctacgtcggcggcgacaaccgcgtcgtctccgtcgaccgctccctccctttccacgagttgcaacggaagctgagggagatgtgcgggtgggaggcggtgtgcctgcggtgccagctcccgacggaggacctggacgcgctcgtctccgtcaccggcgacgacgacctcgccaacctgctggaggagtacgacgcggccagccgggaccgcctccagccgctcaagatccgggcgttcctgttcccaaggacgacgacaacgacaccgccgccgccgtccaggacggtaccccatgccctgtaccaccgtcagactggcagcgcgccgtcgtgcgcatcccggtgggcggcgcatcagatgtcgtctcctcccgctcgtgttctgcaccagcagcagcatcacaaccggcacagcggcgaggc

SEQ ID NO: 22320 - DNA, 982 bp, Oryza sativa nipponbare
  Clone ID: LIB3431-040-F8_FLI
cccaattttagccctagaacacgcacatcccggaatcggagcaagaggcctgccttgccggcggaggagaggaattgatcgcgagaagcacggggaagtcgagcatggcgagcgcggatctgctgcggagggaggaggagttctacgcctccttgttcgactccgccaaaggtggagatgccgtcaagtcgcgtgggcagatgattgagaggaagattgaagttcttgaggacatggccgccaaggttagtaatcggagatctcgtaggtggttgaatgaccggttgctcattgaacttgtcccccgtcttcatgtggaagaaatcaaaggcctttttgctcctccaccatggggtgaggaactgcccgtttctgcattctgcaggacaagtgtcggtgaatgggatgccttcaggagtattgacatggatgttgaggcacgattggtgcaacagatgaaacagtcttctacaaaacagaagaaccatttggacagagatgaattggttgctctcaattcttggcatcatatagatcgtcaaacaagagaagccataaagagaaatttcctcccagatcttcttgaaatatacgaagaacgagttaggaccttcatcgaagacactagtggtaaagatatgcttgtactgaatgtccaggacccatttcagagattgcttttgcacggtgtatgcgagttctataatgtatcatctacaaccacgactaccgtaagagatggaaagctgtgtaaaacgacagcaatcaagaagagatcaggcacaggtgctccctccagaatcacattggttagcttcctaaggatgaagaaaaagtcccattaacatgtgccgtgtattggcaaaacatgccgatttaggttctgtttaggatgtacacatgtaaattatcgatattatcatcttaacatatttgaatgcaagattggtcactgcctcactgatcgtgagtcgtgacctcc

SEQ ID NO: 22321 - DNA, 1356 bp, Oryza sativa nipponbare
  Clone ID: LIB3431-041-H12_FLI
atattagcagccagaatagttatgccatatgattggcacagaaaagaatatacctagtgttcgccggtgagtgtacaactacaagatctgcgtttttttctagctagctctagctagcagatgaagtatctggtgttcagcgctgctccaagcaaattaggcaaaaaccatggcatccaaacagatggtacatatgaatcgaggccaaggggaaacaagctatgctcgaaactccattcttcagaacgctgaacagaacaggatgaggccgctgatagaagacgccatcgccgacctcgtatgcagcagaagcatggtgatcgccgacctgggctgctcatccggcccgaacgcgctcgcgctcgcgtcgatcgccgtcgacgccttccgccgccggtgcctcgcgctccggcggccaccgccaccggcggagctctgcgtactcctcaacgatctccccgacaacgacttcgccacggtggtgaagagcctcgtggagttcaggcgaaacaacggcgacgagcctgtcctcctgaccggcgtcgtgcctggctccttctacgggaggctcttcgccgctgaatccctgcatctcgtctgctcgtccaacagcctccactggctctccgaggctcctgaagatctgaagatgaacggaattccggcatacgacgttgacgcgaacgtgaggagagagagacgagccgtggtcgttggggcttatgcacggcagttcaggaaggatttcatggcgtttctgaagatgagggctgtagaactggtcccaggaggccgaatggtactctcacttgcaggcaggcgatctgttgatctcgcctccgaactcacgcacgcatgggaatccacagccatgaccctaagtgacatggtcactatgggtgtgattgacaaagaaaagtttgaaacattctacatgccgatttacggaccttccgatgaagagatcagacagatcatccaagaagaagggtccttcttgatacgggagatgcaggtacctgaactcacgagtggtgcgtacagcgcgctgatcacctcggcaagggtagcaagtatgctgagagccgcattcgagcccataattgttcagcattttggaccgaccggatgcgatggaaaagaagggatcatggatgagttcgtgaggacggcggagcgtcggtggagcttggagggcagcttgcaagacgagcttgcacaaaaccctcgaggcgttctgcttgtgtccctcgagaagaagccgtcatgaccatccggtagattataattataattatgtaactgctaccttctgtcgacagtaaatccattcttaaatctggtagattttatacc

SEQ ID NO: 22322 - DNA, 1356 bp, Oryza sativa nipponbare; identical to SEQ ID NO: 22321
  Clone ID: LIB3431-041-H4_FLI

SEQ ID NO: 22323 - DNA, 1836 bp, Oryza sativa nipponbare
  Clone ID: LIB3431-054-B3_FLI
ctgctttcctctcaccccaccgcgccaccggcgagcggcccgcgagggaggaggcgctgccgccgcctctgctgatgctgatgatgctaggggcggcctcccagtggatcctggccgccgccgcggcggcggccgtggcggcgctgctgtggctggccgtgtcgacgctggagtgggcctggtggacgccgcggcggctggagcgcgccctccgggcgcagggcatccggggcaaccggtaccgcctcttcaccggcgacgtgccggagaacgtccggctcaaccgggaggcccggaagaagccgctgccgctcggctgccacgacatcatcccgcgcgtgctgccgatgttcagcaaagccgttgaggagcacgggaaaccatcattcacttggtttggcccaacgccaagagtgatgatttcagaccctgaatcaataagggaagttatgtctaataagtttggccactatggcaaaccaaagcctacccgtctcggaaagttgctagcctccggagttgtaagctatgaaggcgagaaatgggcaaagcaccggagaattctgaatcctgcctttcaccacgagaaaataaagcggatgctgccagttttttctaactgctgcacggaaatggttacaagatgggagaattcaatgtctattgaaggaatgtcagaggtagatgtttggcctgagttccaaaatcttacaggagatgtcatatcaaagacagcattcggtagcagctatgaggaaggaaggagaatttttcagctgcaagcagagtcagccgaacgcataatacaagcctttcggacaatttttataccaggatattggttcttaccaactaaaaacaacagaaggttgagagaaattgaaagagaggtcagcaaacttctacgaggaataattggaaagagagagcgggctattaaaaatggtgaaaccagtaatggtgacttgttgggcttattggtggagtcaaatatgagggagtcaaatgggaaagcagaactaggaatgactacggacgaaattattgaggaatgcaagctattttattttgcaggaatggagacaacatcagtattgctcacttggacattaattgtgctaagtatgcacccagagtggcaagagcgagcaagagaagaagtgctacaccactttggaagaaccacaccagactatgatagcttaagtcgtctgaagattgtaacaatgattctgtacgaggttcttaggttgtatccgccagtggtgttcttgaccagacgaacatacaaggaaatggagctcggcggcatcaaatatcccgctgaagtgacccttatgttgcccattttatttattcaccatgatcccgatatttggggaaaagatgcaggtgaattcaatccagggaggtttgctgatggcatctccaacgcaacgaagtatcagacctctttctttccatttggatggggtccccgaatctgcatcggccagaactttgcactattggaagccaagatggctatctgtacaatccttcagcggttctcctttgagctttcaccatcgtacatccacgcaccattcactgtgataactctccacccacagcatggtgcacaaattaagctgaagaaaatctaaccatgctgctcacttgctcggattggtcaaggagaaacaagtcagtttgataagttatatatctttctcttttgtaaacagaggtagtctacaggtttcgtattcgaactagaaagattttacttattgatatactagcttttatgcagataaaaacatggtgagtgaaataatattccgagtttttaat

SEQ ID NO: 22324 - DNA, 994 bp, Oryza sativa nipponbare
  Clone ID: LIB3431-060-F7_FLI
cacacaccttcaataacttgcaaggataactcaaactacttgaatcagatcagacaaaaacatcataagaatatcacgatgtgtggaggagcactgatcccgaacgactacggcgacgacgactgggaggccgccttccgggagttcatcgctggcgacgacgacgacgacgacggcggcgtttccatgttcccttctggtgcagggacgatggagacgaccacagaggtggcgccggcggcggcggtggtggagaggccgcggcggcggcgaagggtgaggcggagctacccgtaccgcggcgtccggcagcggccgtgggggcggtgggcgtcggagatccgcgaccccgtcaagggcgcccgcgtctggctcggcaccttcgacaccgccgtcgaggccgcgcgcgcctacgacgccgaggcgcgccgcatccacggccacaaggcaaggaccaacttcccgcccgacgagcctccgctgccggcgccatcgcaggcgccgttctgcttcctgctcgacgacgacgacgacgacgacggcgtggcccgtggaaacagcccggcgtcgtcgtcggcgccggacagagcctccgcttgcacgacgtcgtcgacggtggcgtccggcgagcgaggcgatgagctcatactgctggagtgctgctccgacgacgtgatggacagcctcctcgccggcttcgacgtgtccagcgaaccacgcagtgttttgggaatggttaattagcagcgcgcacgcctgattagatcggtacatgtgaagtacaagagaagtagttactactagctaggagcaaattaacttggagtgcaagaataaaatatgcatgtctctgcactactactgtagtgttagcaagtttgctcattgttctgttgtatcctttcatgtccatttcagacttcccaatgctacataaggatgtacatatgtatgatgttgtgtgccttgttaatcaatgaatgtaaatatcttt

SEQ ID NO: 22325 - DNA, 781 bp, Oryza sativa nipponbare
  Clone ID: LIB3432-012-D10_FLI
agcttctagctgtgatcaagcaaagaagaattgaaaaaaaacatatatatattatatatatggcaggggtgtgggtgtttgaggatgggatggtgaggagggcagatagcgaggcgccgtcgagagggcgcggtgtcggtggtggaggtgggggagggaaggtgcttgtgcacgtgccgagcagcgaggtggtgacgagctacgaggttctggagaggcggctgcgggagctcgggtgggagaggtacctcaacgacccgtgcctcctccagttccaccagcgctccaccgtccacctcatctccgtgccccgcgacttctcccgcctcaagctcgtccacatgtacgacgtcgtcgtcaagacccgcaacgtcttcgaggtccgtgacgccgccaccactgcttccccgccatgatcgcatcgatgtctatgctttgatcatcatcgatatgaccttcctcgactccgggctcaggccagacacgccgccatggcgcctacaatcgtatgtgtgtattgtatgaatctcaattcaggtaatgaatgattgtatatcatatgatttgtaattctgtacaggtataacgtatgcgtatatacgtacgtgtgcgatcgatcgggtgtgtgtgatatatattaaaataagcgtggctggtttaattgcaagtgagtgtttagttatttaattatacgagagccatgagcacgtgtgtagctagctttggagtcttgtactttgtggtttggagccattgcttgactgattccgtggcacgaatc

SEQ ID NO: 22326 - DNA, 1085 bp, Oryza sativa nipponbare
  Clone ID: LIB3432-014-E9_FLI
caaaaattcgcggtggcctaccagcgatttcgcttcactgcagtccgtctaccgaatggccgcggcggcgcggcccgtcgacgtcgtccgccacttcccgtgctcctcctcggtcgccgcctcctcctccttgctgctgtcgcgctccaagtccaggctcgcgtctcctgcggcggcggcggcgagctccatgcggcgaaggcttgtgctcggcgtgggcgccgccgccgccccggccgtggcggcgctcgcggcctcggcgacgcccgcggcgctgcgggactgcgccgccacgctgctcatcaccgcgggcgcgtactccctggtgcgcgccttcgacgggctcacggcgcggcggctcatcgaacagaacctgagcagaaaaattgtgcatgtgctctccggagtcctgttcatgtcttcctggccactattcagtaattcgacagaagcacggttcttcgcggcaattgtcccgttgctgaactgcataaggcttctgacctacgggctccgcctttccactgatgaagctctagtaaaatcggtgacccgtgaaggaaaaccagaggaattgctgagaggtcctctgtactatgtcattgtgctgctggtcagtgttttggtcttctggcgccagtctcctattgggattgtttcgttgtcgatgatgagtggtggtgatggctttgctgacattgttgggagaaggtatggctccgcgaagctgccattcaatgagaacaagagctggataggaagcatctcaatgttcatttctggcttccttctatctgcactgatgctgttctacttctcttgccttggttacttcactgtctgctgggatctggcacttggtaaactggctcttgttgcattagcagctactgtagtggagtgtattcctgtcaatgatgttgtggatgacaatatctccgttcctttggccaccatgttggcagcctatctgttatttggctacagttcatgttgttgagactataaaatttctcccttttgcttttcatgtcctgaatttggtactgccaaacatcatagattggatctctttctgttgaatc

SEQ ID NO: 22327 - DNA, 1080 bp, Oryza sativa nipponbare
  Clone ID: LIB3432-029-H9_FLI
cttgcaaggataactcaaactacttgaatcagatcagacaaaaacatcataagaatatcacgatgtgtggaggagcactgatcccgaacgactatggcgacaagccgccgccgccgccgtcggagtcgtcggagtgggacgccacaacgaagatgaagaagaagaagaagcgtggtggcggcggcgacgacgactgggaggccgccttccgggagttcatcgctggcgacgacgacgacgacgacggcggcgtttccatgttcccttctggtgcagggacgatggagacgaccacagaggtggcgccggcggcggcggtggtggagaggccgcggcggcggcgaagggtgaggcggagctacccgtaccgcggcgtccggcagcggccgtgggggcggtgggcgtcggagatccgcgaccccgtcaagggcgcccgcgtctggctcggcaccttcgacaccgccgtcgaggccgcgcgcgcctacgacgccgaggcgcgccgcatccacggccacaaggcaaggaccaacttcccgcccgacgagcctccgctgccggcgccatcgcaggcgccgttctgcttcctgctcgacgacgacgacgacgacgacggcgtggcccgtggaaacagcccggcgtcgtcgtcggcgccggacagagcctccgcttgcacgacgtcgtcgacggtggcgtccggcgagcgaggcgatgagctcatactgctggagtgctgctccgacgacgtgatggacagcctcctcgccggcttcgacgtgtccagcgaaccacgcagtgttttgggaatggttaattagcagcgcgcacgcctgattagatcggtacatgtgaagtacaagagaagtagttactactagctaggagcaaattaacttggagtgcaagaataaaatatgcatgtctctgcactactactgtagtgttagcaagtttgctcattgttctgttgtatcctttcatgtccatttcagacttcccaatgctacataaggatgtacatatgtatgatgttgtgtgccttgttaatcaatgaatgtaaatatctttatattgcttttgtac

SEQ ID NO: 22328 - DNA, 903 bp, Oryza sativa nipponbare
  Clone ID: LIB3432-043-C3_FLI
ccctaatccagataaaagaatcaggatagaagagatcaggaatgatgaatggtttaagaagaattatgaacctaccagagaaattgaaagtgaagaagtcaatcttgatgatgtcaatgcagcttttgatgatcctgaggaagacgctgaccatactttagatgacgaagcaggacctttgacactcaatgcattcgacctaataattctatctcaaggcttgaaccttgcagcactatttgatcgccgacaggactatgacaagcttcaaaatagatttttatcacgcaaaccagcaaaggttatcatgtcaagcatggaggttgttgctcagtcaatggggtacaagacacacattcgcaattataagatgagggtggaaggtctaaatgcaaataagacaagtcatctcgcagttatgcttgaaatttttgaagttgccccatcgatcttcatgattgaactgcaaagagcagcgggagacacctccgattataacaagtttataaataattactgcagcaaattagacgatatcatttggaattttccaattgagaagagcaaatcaaggatatcgcggctatcgaagcgctagtctgctttgacatccatcatttgtactatgtgtaatctaatgctatgcagcttgagtggtattgggtttgttagtggatgtatttgtagagattgccaattcaattcatctctgatcttttagttataagagatgaccatgtacaaagggccactgaaagttttggcatctcagtttctctgtacaatgtttgcagcgaggtatattaaacagtttgactgaccgccgctccctgctcatcaacacgctttgtagtttgtctcaagatgtattaatttctccctgctccattagcagcttgcatc

SEQ ID NO: 22329 - DNA, 1400 bp, Oryza sativa nipponbare
  Clone ID: LIB3432-052-D8_FLI
tgctcctcgagcatcgatcgctgatgtttcctgcagcgctgacaattcgaagaagaaagagaaatcaaagaagtatggcagagttcttgaaccagatgagcctttcaagctgttcctaagagatcgggagacgacggaattcctgacagcaaaagaggagagacatttgttcagtaaaatacagattcttatgaaaatagaggaggctcaccggaaactagaagttcaatgcggccgtgagccgacattggcagagtgggctgaggctgtagggatgagcagcaaggagctgcagtcctctattcgcaccggaagacggtgccgggagaagatggctcgatcgaacttcaggcttgtgattcatgtagctaggaagtatgaaggatatggtcttgacatccaggaccttgttcaggatggatgcagtgggttgatgaagacctttgagaagttcaatcccagcaaggggtgtcgattcccgacctacgcatattggtggatacgccaatcaattaagaagtcaatcttcaagaactcaagactaatccggttaccggagagtgtgtatgcgcttctgagaaaggtgggcaaggcaaggatggaatgcatcatggaaggggagcaacccaccaacgcgaacgtagcgaggcgcgccggcatcaccatcgagaagcttgcgaagctccgagcgaaaacccggaaaccccggtcgatgcaggatcatgtctggtcagatgagggtgtcaccttccaggagatcacagaagacccaaatgtggagccacctgacctgagtgtggacaggatgatgatgaggcagcaggtgagggacttcctggggatcctgagccccagggagaaggagatcatcgagcaccggttcgggatccacgatggcgagccgaagacgctacatgtcatcggggacatgtttgggctgtccaaggagaggatcaggcagctgcagaaccgggcgctggagaagctcaagaggagtgcatccttgcaggggtttgatgtctactttgatttgctaacctgaagaagaaaggccaagcagctcatttggtttcagaaactttcagtcaagttgtccatacaaaacagcagaaacacatacacactgtagctttctagacctattatacatatatactacacacccagtgacacgtactgtacaagtatagtgctagatctgcagaaagaaatgtggtacacggattcagagtttcagatggcatccttttttgcttatgtaagtaaatttcccagcaagctgctgttggtgcttatactgatactgcaagtctgcaatgcaaagcaaccctcattgtaattaaggataatcatgtacatttttttacccttaatttgagctgatcaggcgctgtaattat

SEQ ID NO: 22330 - DNA, 549 bp, Oryza sativa nipponbare
  Clone ID: LIB3433-025-H10_FLI
cgcctcgcctccctccgccgccccggttacgcaaccaaataccgacggcgccgcccgccgacgagccttctcccttcgcgccgccccctcgcagcatcctcgtgccctcctccggcatcttcctgcgccgcgttagcatcgtctgtcggcgccgtcggaggttctgctcggagctcgcttccgatggacggcgcggcgacgggcacggagcgcctctgccctctaggatgaggggccggagacgtcgccggcggaggcttgtgcaagtcatctatgctagcacacttgatgactgatgtcatggaagataattcttcatggacagctctttctattgatcacattagaatttctgcattcaatttcggaattgtctccgaggataacgatgaaggcaaagaatttttgctttcattggacactgttgttcctgatgatatcctggagagaattttcacgtttttacctatagtaagcatgataaggtcaacagcagtttgcaaaagatggcatgacattatctactcaagcaggtttctttggacccac

SEQ ID NO: 22331 - DNA, 909 bp, Oryza sativa nipponbare
  Clone ID: LIB3433-026-D1_FLI
ccgggaagcaccgccggttctcgctgctcaacccctcggcgtccggccgctcgccgacatcgacgacggcgccgctctgcgacatctgccaggagaagaggggtttcctgttctgcaaggaggaccgggcgatcctgtgccgcgagtgcgacgtgccggtgcacacggcgagcgagctcaccatgcgccacagccggtacctcctcaccggcgtgcggctctcctcggagcctgccgcgtccccggcgccgccgtcggaggaggagaacagcagcagcttctgctgcagcgccgacgacgccgtgccggccccggcggcgcccgccacgagccacggcgggagcagcggcagcagcagcatctccgagtacctcaccacgctgcccgggtggcacgtcgaggacttcctcgtcgacgacgccactgccgaggccgccgccgccgccgccgccacctcttccggcatctccgcgaacgggccgtgtcagggggtaacacggatcggagggctgcaagaatccgccggctaccctgcgtggatggcgcagcagcagctgtgctgcgacggcctcgtcgccggcgacgcgtcgccggctagccgggagcggtgggtgccgcagatgtacgcggatcagcttgccgccggcagcaagagatccaggacgtccactgcttcttcctactcctactggtgaaactaaagcaattgaggccatggtttgtacgtagtagatgttgtttcgggcttaattaatgactgcattttgcgcttccggacgggagtgtttgtgcgttatttttgaggcgcagaggaaaatctgagccttttgtatcccttcctttttgctcgtcacgactagtactgtatgtttttcttctacgcaataacgagaatttttcctcttttcc

SEQ ID NO: 22332 - DNA, 1047 bp, Oryza sativa nipponbare
  Clone ID: LIB3433-034-E10_FLI
ggggggtgagctacgcgtacaaggacgggacggcggcggactcggtgttccgggtgtgcagcgcgctggggcaggtggcattcgcgtacgccgggcacggggtggtgctggagatccaggcgacgatcccgtccacgccgacgaagccgtcgaggggggccatgtggaagggcgccgtggcggcgtacctggtcaccgcgctctgctacttccccgtcgcgatcgcgggctactgggcgttcggccgcgacgtctccgacaacgtgctcgtcgcgctgcgccggccgccgtggctcgtcgccgccgccaacatgatggtcgtcgtccacgtcctcggcagctaccaggtgtacgccatgcccatcttcgagaccctcgagacgattctgatcaccaggatcaggctccctcccggggcgctcctccgcctcgtcgcccgatcagcctacgtcgcgttcacgctgttcgtcgcggtgacgttcccgttcttcggcgacctgctcggcttcttcggcggcttcgggttcacgccgacgtcctacttcctcccctgtattctgtggctgaagatcaagaagcctccgaggttcagcgcgtcgtggtttgccaactggggttgcatcgtcgttggagtgctgttgatgatcgcttccaccatcggcgggctacgaagcatcatccaggatgcctcgacgttccagttctactcgtgatgggtgatgatgcatacgtactgacttagtacatacagaacgtcaggatcaactgtaaccaggccaagaaattagaggtatcaagagtagttgcaaacgatggccatattattctgtgactttcattgatcgttggcctcgcttgcagcgtgccggccagcggtccttgcgaaatgtgtaactgaagacgaattacagtagtgattcagtgatgcgcatcgaccctgtctgtgcaccagatgtaatagaccttgctgacacacggtttcgcaatcctcatgctgaataacatcgatggcgattgcagggagaaaaatatatataaacatctagt

SEQ ID NO: 22333 - DNA, 993 bp, Oryza sativa nipponbare
  Clone ID: LIB3433-037-H4_FLI
ctagttcgcgctggcgctgcagtggcctggcaccatctgcgcctcaacccgccactgctgcgccatcaacggatgctgccgctcggagccgctccagacgttcacgatccatgggctgtggccggactacgacgacgggacctggccggcgtgctgccgccacaccagcttcgacatggacaagatattgcccctgaagccgacgcttgagaagtactggccgtccctctactgctcatcctcttccacttgcttcagtggcaaggggcccttctgggctcatgagtgggagaaacatggaacatgctcatccccggtagttaaggatgaattagagtatttcaccactgctcttgacctctacttcaaatacaacgtcacggaaatgttggcaagtggtggtatccatgtttcaaatggtaaacaatatgcgctaactgatgtcattgatgccatcaaatgtgcttttggggcctcaccgcaaattgtttgcaagaagggctcagttgaagaactgaggttatgctttgacaaagatttgaagccccttgattgccttactactactgctaccaatgaaaacgtatcgaagaagaagtattgccctcgatacatcaccctgccaacatatgaccccatagtacatgctaattctactcgggagatcataacagtcgaaagtgaggtctatggatatctttacacatcctaagatacgattaccgcgagcaagaattacatggccatgatgaagccggtagttcagggctcttagctgcttaagacatactggggccggcattgaggttcaaggaaatgtatatctagataactcgattattacatttgtaagcacggcacgccagaacaacggagaatgtgattgtgtctgaaaaatcaattgctttatgtactatgcaaggttggaaaatagttcgtccatgtatatagtcattggtcagggtcatctgcgactgcaatctgctgaattat

SEQ ID NO: 22334 - DNA, 1056 bp, Oryza sativa nipponbare
  Clone ID: LIB3433-043-B5_FLI
gccaaacggtgctgcaccaatatcctcaactgataagccaatatcagcaagatggagaatactgatgcctgatggctcctatggcaagtatcctaaacctaggcgcctggcagcatcggaaatacctgaaattgtcgaacaatatcgtcaagccgccattaatgccattgaagcaggttttgatggcattgagatccatggtgctcatggctatatcattgatcaattcctaaaggatggaatcaatgaccgcactgacgagtatggtggctcactttccaaccgctgccggttcctacttgaggtaactagggctgtggtttctgccattggagcagaccgagtcgcggtgaggatatcaccagccattgatcaccttgacgcctatgattcagaccccattaagctcggcatggccgttgttgagcggctgaatgctctccagcagcagtcagggcggctcgcctacctccacgtcacgcagccacggtacaccgcctacgggcagaccgagtctgggcagcatggcagtgccgaggaggagagccgcctgatgcgcaccctccggggcacgtaccagggcacattcatgtgcagtggcggctacacgcgggagcttgggttggaagcagtggagagcggcgatgccgacctggtgtcgtacgggcggctcttcatatcaaacccggacctggtcgagcggttcaggctgaacgccgggctgaacaagtacgtgcgtaagacattctacacgcccgatcctgtcgtgggttacacggactatccgttcctcggacagcctaagtcgcggatgtaaatgtactgcgggataagtaaatcaaggatacgattgtgtattgtaaggaaaataaagggcaacggtgaggtgatttagcttatttttgggacctaatttgacggtaatttattctttcaccaaatctgatatgatccattgctgattcagtagctactctagcctatgtaaaccttgggtcatcagcacagattgtatctatatgtgtattgcataatgtttcatatcagttgtctagc

SEQ ID NO: 22335 - DNA, 1228 bp, Oryza sativa nipponbare
  Clone ID: LIB3433-053-D10_FLI
ccgatggaggtgaccgatgaggagaaggagcggaaggagaggaaatcgtctgctcagaaggagaaggaagcggggaacgcagcttacaagaaaaaggacttcgagaccgcgatccagcattacacaaaagccatggaacttgatgatgaggacatttcctatcttaccaaccgtgcagcggtctacattgagatgggaaagtacgatgaatgcattaaggactgtgataaggctgtggagaggggaagggaacttcgtgctgatttcaagatgatctcaagggcactgacaagaaaaggaacagccctagccaaacttgctaagacctctaaggactatgacattgccattgagactttccagaaggctctaactgagcatcggaatccagacactctaaaaaagctaaatgaggctgagagggcaaagaaagagttggagcaacaagagtactatgatccaaagttagcagatgaagagagagagaaaggtaatcagcttttcaaggagcaaaaatatccagacgcggtaaagcattacactgaggctatcaggagaaatcctaaggacccgaaggtgtacagcaatagggctgcatgctacaccaagttgggagccatgcctgaaggtcttaaagatgcagagaagtgcattgaactagatcccaccttctccaaagggtatacaaggaaaggtgcaattcagtttttcatgaaagaatatgacaaggcaatggaaacttaccaggccggtttgaagcatgatccgaataacccggaactgctggacggtgtgaaaaggtgtatcgaacagatcaacaaggccaacaggggtgatttgactcaggaagagattcaggaacgacagaacaaggctatgcaggatccagagatccagaatattcttacagatcccatcatgcgacaggtactggtcgatttgcaggagaaccctagggcttctcaggagcatcttaagaaccctggagtgatgcagaagattcagaagcttgtaagcgctggaatagttcaaatgagatagtcgaccaaagcaagaagcgctgttcgtgtctatgttcattgctccttactttttttccatgctcagtctttgtggacttaagatttacacagtttggggctaatcttcattctcaattggattatgtgagtgcagcgtgtcactggattattagtggttatggcatccgtgctacagctgcacgtgc

SEQ ID NO: 22336 - DNA, 881 bp, Oryza sativa nipponbare
  Clone ID: LIB3433-056-G10_FLI
gaccaaatcgccgcagcagggcgcgccatggagccggcggcggagaagagggaggccgagcaggaggagctgcagcagcagcacgacgagcccgccgtcccttccgccgacgacgacgaggctgaggcggaggagaacgagcgccgcaaccgcgagctcaaggccggcttccatccccttaggcgtagattcgtgctatggtacacgcgccggactcctggggcgaggtcgcagtcctacgaggacaacatcaagaagatcgtcgacttcagcactgttgagtcgttctgggtttgctactgccacctcacgcggccggttagcctgccgagccccaccgacctgcatcttttcaaggagggcatccggcccctctgggaggatcccgcaaataggagcggtggcaagtggatcataaggtttaagaagaccgtctctggtcgtttctgggaggatttggtgttggtgctagtgggtgatcaacttgattatagtgatgatgtttgtggcgttgtactcagtgttcgtttcaatgaggacattctaagtgtctggaaccgtaatgcatctgaccaccaggctgtgatgacattaagagattcaattaagaggcatctgaagctgccacacagctatctgatggagtacaaaccacatgatgcttcactgcgggataactcatcttacaggaacacgtggttgagaggataagctccatggtcacatatttagctgttatcttcctctaaactatcgcctcgtggatttcttttgaacctgtgcttgcatgggactaaaccttgctatgtgttgtgcatccaaactctgttatgctatggacaatcaaaatgcccagaattatcgtgatgccttattgttat

SEQ ID NO: 22337 - DNA, 739 bp, Oryza sativa nipponbare
  Clone ID: LIB3433-058-H12_FLI
cgccaggcggtggccgggctcggagttcatcacccgggagcgccccgtcgtggccggcaggtcgttcagcgtcaacatgttcaggctgacgtggcggacggcgttcgtggtcgtcagcacggtgctcgccatcgtgatgcccttcttcaacgacatcctgggcttcctcggcgccgtcgggttctggccgctgacggtgtactacccggtggagatgtacatccggcagcggcggatacagcggtacacgtccaggtgggtggcgctgcagacgctcagcctcctctgcttcctcgtctcgctcgcctccgccgtcgcctccatcgagggcgtcagcgagtcgctcaagcactacgtccccttcaagaccaagtcgtgatcccgatcacgacggccttttttttttgcttttgcatcctgatgaaaaaagatttcagaaacatatgcacaacaaatgccggaagttagccaagagtttggtcaccagctcggtgcgttggtcggtcaggaggaggagggttcaacttgtgtaggttaagaaatgctagagagtatggagaccatcttcgattgctgctcatgtatagaaaaaagaggaagcttcgtattcatgtaatgaatcggaatgtttaacaaacaaggcttgttctgaactcttctcagggacaggcatggataacagattaaagataaatgaatgtgttagacaagggcagattagaagcggctcttaagcttc

SEQ ID NO: 22338 - DNA, 1210 bp, Oryza sativa nipponbare
  Clone ID: LIB3434-007-C6_FLI
gagaagatgcaagcgcaggacgtgaagaacgtcttctgcatgaagggtgggcaaggggagtccagttacctcaaaaacagtaaagctcagttgagagacctgcaaatgatgctgtatgccctggaggagacactggacaagatcgcgatccctccccgcgggccggggaggcttctgctgacggcggccgacctcggctgctcctgtggccgcagctcgctcgtcgtcgccgatgcgatcgtgcagcacatgaccaagctgtgtcgcggtcgcggcaagcatgtcgacgccgtcgcggctgctgatccggagttctggttctacttctccgacctcccgagcaacgacttcaacaccctcttcagcctcctcccgccgcacgccgcttcctccggcgacggcagtgggcggcgctacttcgccgccgccgtgcctggctcgttccatgaccgtctgttcccggagcgatctatcgacgtgttcacctccaccttctgtctgcactggctctctcaggtgccggacgaagtcgctgatacgcggtcaccggcttacaacaaggggaaggtgttcgtgcagggcagctcggaggagaccggcacggcgtaccggcggcagttccagtccgacatggcgcgcttcctgcgctgccgcgccgccgagctgaaacctggtggcgccatgttcctagtcttcgttggccgcccgtcgtccgccggccccaccgaccaaggccgcagcctcaacctgctgggcaccatgttcgaggagtcgtggcgtgacctcgtcgacgaggggttgatcgacggcgggaggatggacagcttcaacatcccgtcgtacgctgcgacgctggaggagttcagggagtccgtcgacgccgacggctcgttcgctgtcaaccggctggagcacgtgatgggaggccgtctcgccgtggacgacgacccccacgacgaccgctgcgcggtcgggcgcagggtggcgaacaaccagcgatcgatcttcgggccgctcgtcgaagcgcacattggcagggcgctcgcggacgagctgttcgtccggatggagaggcgcgcagaagagctctccgacgagcttgtggacgagatgggggttcgcttccacatcttgtgctcgctttcactcgtctaacgatatttacgtcgtacaatgtcctaataatgaacaaaatattcaaattgtgggc

SEQ ID NO: 22339 - DNA, 976 bp, Oryza sativa nipponbare
  Clone ID: LIB3434-008-E2_FLI
caaggcccgcctcggcgccgccatcgactgctacaccgaggctatcgctctttgccccgacgtcgccgtctactggctcaaccggggcctctgccatttcaagcgcaaggaatgggctaaggtcgaagaggatagcaggagagctcttgcccttgatgacactctggtcaagggtcactatttgctgggatgtgccatgcttgagaaggaacaatgtgctcttgctatcaaggaattcaacaaggctttggatcttcttaagtcttcgaatttgggggacaaaatggcggaggacatttggcaggttcttgcgaaggcaaaataccaagattgggaaatacactccactaagagagtttggaagatgcaaagtttaaaggaagcatgtgaaaatgctttgcaggagcaccactttcttagtggcacacttgtgggagatggctcaaccaatgagtatacagaccaactgaaattgttatcagaagtcttcaccaaagctacaatcgacgatacaccaacagatgtgcctgactacctttgctgccaaataacctttgagatttttagagatccagtgatcacacccagtggtataacgtatgagaggtccataatccttgaacatctttgcaaggtgggcaatttcgacccggtgacacgagagcctctgaaagagcatcaattggttcctaacctggctataaaggaagcagtccaagcctacctcaagaatcacagttgggcctacaagttgaactgatgatgttgctctgtagttgcttagtgctaacaacaggtgttgataaaatgttgggttgtcaagggggaattctttgcttttctgatgtaatgtataagcaagttcattcgtgccctcatggaattgattgattcttgggcaacttctgacgaaccttggacaattgtacataaaacatcatagcagaaccttggacggtttcagacataccgtgcc

SEQ ID NO: 22340 - DNA, 1037 bp, Oryza sativa nipponbare
  Clone ID: LIB3434-040-E1_FLI
gcaggtggtgctctcgcagataccgggcttccatgacatggcgtggctctccgtcctgtcggcggccatgtccttcacctactccctcatcggcttcggcctcggcgtcgccaaagtcataactaatggagtgatcaagggaggaatcggggggatcgccatggtgtccgcgacgcagaaggtgtggcgagtctcgcaggcgatcggggacatcgcgttcgcctaccccttcgcgtcggttctgctggaaatcgaggacacgctgaggtcgccgccgccggagagcgagacgatgaggacggcgtcgagggcgagcatcgcggtgaccaccttcttctacctctgctgcgggtgcttcggctacgcggccttcggcgacgccacgcccggtaacctcctcaccggcttcggcttctacgagccctactggctcatcgacttcgccaacctctgcgtcgccgtccacctcctcggcggctatcaggtgtactcgcagccagtgttcgcggcggtggagcggcggatgggcggcgcgggggcgggcgtggtggaggtggcggtgccggcggcggtggcgtggccgtcgcggtggcggcgcggctgccgcgtgaacgtgtacaggctgtgcttccggacggcgtacgtggcggcgacgacggcgctggccgtgtggttcccctacttcaaccaggtggtcgggctgctcggcgccttcaccttctggccgctgtccatccacttccccgtcgagatgtacctcgtgcagaagaaggtggcgccgtggacgccgcggtggctcgccgtccgcgccttcagcgccgcctgcctcgccaccggcgccttcgcctccgtcggctccgccgtcggtgtgttctcctccaagaccagctaataattgaaatgcatcagctcgatcagcaaatgaatcgaagaaagatggtctgtaaatatcaaaggaagtgttaatttgttcttgtatggagagagcatttatgtacagatcggtaaaattaaatgcgcaaaatggcacttaaatc

SEQ ID NO: 22341 - DNA, 792 bp, Oryza sativa nipponbare
  Clone ID: LIB3434-047-A2_FLI
ggcttctcctccccctcccggttcggttcggttcgggtccggttcgatttcgtttttttttcttcttcgtggggttggtgggaaagcatggcggcgccggatgttgagtaccgctgcttcgtcggcggcctcgcctgggccaccgacgaccgctccctcgaagccgccttctccaccttcggcgagatcctcgagtccaagatcatcaacgatcgggagacggggaggtcgcgcgggttcgggttcgtgacgttctcgagcgagcaggccatgcgcgacgccatcgaggggatgaacggcaaggagctcgacggccgcaacatcaccgtcaacgaggcccagtcgcgccgctccggaggcggaggcggaggcggctacggccagcgcggcggaggcggaggctacggtggcggcggcggctacggtggtggcggcggcggtggctacggccagcgccgtgaaggcggctacggcggtggcggcggctacggtggcggccgtggcggcggcggcggctacggcggtggctacggcagccgcggcggcggcaactccgacgggaactggaggaactgagcggtggggccctcatggccaagttatctatctatctaatcgagctaccatcatcatcatccgatcgttatcatcgttagttttgtgtggaactactatctagtttgtgttactgtgtggttgcccatctgtgtttttgatcgcaagaagaaagctcgtctcgtgtttgctttgatcaaatgaaatgaatgaatgaatcttagtgtgctccgctct

SEQ ID NO: 22342 - DNA, 2045 bp, Oryza sativa nipponbare
  Clone ID: LIB3474-003-F4_FLI
tgggatgcaaaggataaggggggagagattagattagagagatagccatggagggaggtgttcatgagttcgatggctcaaccttcagagagtgcttctccctctcatggaggaacccttatgtccttaggctcgccttctccgccggcatcggtggcctcctcttcggctacgacaccggtgtgatttcaggagctctgctttacatccgtgacgatttcccttcagttgacaagaacacatggcttcaggagatgatcgtgagcatggcggtggccggcgcgatcatcggggcggcgatcggcgggtgggcgaacgaccggtacggccgccggacgtcgatcctggtggccgacgcgctcttcttcgccggcgcggcggtgatggcgtcggcgacggggccggcgcagctggtggtggggcgggtgttcgtcgggctcggcgtcgggacggcgtccatgacgtcgccgctgtacatctcggaggcgtcgccggcgaggatacgcggcgcgctggtgagcaccaacggcctcctcatcaccggcgggcagttcttgtcgtacctcatcaacctcgccttcaccaaggcccccgggacgtggcggtggatgctcggcgtcgccgccatccccgccgtcgtccagttcttcctcatgctcttcctccccgagtcgccgagatggctctaccgaaaggggagggaggaggaagcagaggcgatcttgaggaagatatactcggcggaggaggtggagagggagaaggaggagttgaaggagtcggtggaggcggaggcgcgggagaggagctcgtcggagaagacgagcctggtggcgctgctgatgacgacggcgacggtgcggcgggggctggtcgccggcgtcgggctgcaggtgttccagcagctggtggggatcaacacggtgatgtactacagccccaccatcgtgcagctcgccgggttcgcctccaaccagacggcgctcgcgctgtccctcgtcaccgccggcctcaacgccgccggctccctcgtcagcatctacttcatcgaccgcaccgggcggcgcaagctgctcgtcatcagcctcgccggcgtcatcctctccctcgccctcctctccgccgtgttccacgaggccacctcccactccccgcccgtcggcgccgccgagaccgcccacttccacggcggcgcgctcacatgcccggactactcctcccgctcgtcgtcgtcgttctgggactgcacgaggtgtctcaaggcagcggcggcgtcggcggggtgtgggttctgcgcggcgggcggcggcgacaagctgcgcgccggggcgtgcctggcggcggcggcggcggcgtcgaacgccacggctcgcgacgcgtgccgcggcgaggggagggagtggtacacgcgggggtgcccgagcaggtacgggtggctggcgatggcggggctggcgctgtacatcgccgccttctcgccggggatggggacggtgccgtggatcgtgaactcggaggtctacccgctgcggcaccgcggcgtgtgcggcggcgcggcggcgacggcgaactgggtgtcgaacctggcggtggcgcagtcgttcctgtcgctgacggacgccatcggggcggcgtggacgttcctcatcttcggcgggctgtccgtggcggcactcgcgttcgtgctcgtctgcgtgccggagaccaagggcctccccatcgaggaggtggagaagatgctcgagggaagggagctccgcctcaggttctgggccaagcgccgccaccaccacggcggcgacggcgacggcggcggagaaaagaccggcggcgtgtgacacgacacgaggcctgtttatttagcgttttgatgactgattcgttgcaaatgaacgaaggagtgtggatttggtccgatcacgcacaaacatgtagtcataaatatttaagtttattaaggtaaaatttagataaacttttgaaactttgatcactgatttcatatcagatcaagtttataaaatcgatggcgtttgcgtttggtg

SEQ ID NO: 22343 - DNA, 1612 bp, Oryza sativa nipponbare
  Clone ID: LIB3474-004-B12_FLI
ctcttctctccttggctcagcttgacatcgtcggagcagcagaaaagtttgctcgatcgagctagctaactaggtcgtcggatcagtgataaatcgttcgccgatggatccgtggattagcacccagccttcgctgagcctggacctccgcgtcgggctgccggcgacggcggccgtcgccatggttaagcccaaggtgctcgtcgaggaggacttctttcaccagcagcctctcaagaaagacccagaggttgcggcgctggaggcggagctgaagcggatgggcgcggagaaccggcagctgagcgagatgctggcggcggtggcggccaagtacgaggcgctgcagagccagttcagcgacatggtcaccgccagcgccaacaacggcggcggcggcggcaacaacccgtcgtccacctccgagggcggctccgtctcgccgtcgaggaagcgcaagagcgagagcctcgacgactccccgccgccgccgccgccgccgcacccacacgcggcgccgcaccacatgcacgtcatgcccggcgccgccgccgccggctacgccgaccagaccgagtgcacctccggcgagccctgcaagcgcatccgcgaggagtgcaagcccaagatctccaagctctacgtccacgccgacccatccgacctcagcctggtggtgaaagatgggtaccaatggaggaagtatggtcagaaggtcaccaaggacaacccctgcccaagagcctacttcagatgctcatttgctcccgcctgccctgtcaagaagaaggttcagagaagcgcggaggacaacacgatcctcgtggcgacgtacgagggggagcacaaccacggccagccgccgccgccgctgcagtcggcggcgcagaacagcgacggctccggcaagagcgccgggaagccaccccatgcgccggcggcggcgccgccggcgccggtggtgccgcaccgtcagcacgaaccggtcgtcgtcaacggcgagcagcaggccgcggcggcgtcggagatgatcaggcggaacctggccgagcagatggcgatgacgctgacgcgtgacccaagcttcaaggcggcgctcgtcaccgccctctccggccgcatcctcgagctctcgccgaccaaggattgacgattgctactgatcgacgcggcggattcgatcgcttcttcttgcaactgcgggcatggccattgccatcctctcctgtctctgcctctctgttcttggtggcgccagcaagaacacgatcgacgcggtgtccatccatggcggagttcgatcgatcgattgatcggctagggaggaattgatgattcgctgtatataacctagaatttttacacgattactcgagggatagatcgacgagcaacattttcggccggcgcccatggctgatcaaccaacgatcatcggcggcggccggacgtgagcaagacgattcagaaaaaaattcagatatttgcgtcggcaaaagacgcttgtaacatgtagagtagggaggaaaattatttgaagtgtacgtagtgcagtccttttgagcaaaattaatcccaaatttgcttcggtcccgaacaattcaacgaaatc

SEQ ID NO: 22344 - DNA, 848 bp, Oryza sativa nipponbare
  Clone ID: LIB3474-004-D12_FLI
gctggagaaagctaagaaaagagaggcggctttcattgtaacatttgcgaaacgtgaacaagaaattgcagaactgaagtctgcagttagggatttgaaaactcaattaaggccaccatcgatgcagacaaggagattattgcttgatccagcaatccacgaggaatttacacgattaaagaatcttgtggaggagaaggagaaaaagatcaaggaactacaggacaatgttgctgctgtcaattttactccatccagtaaacatgggaaaatgctaatggccaagtgtagaacattgcaagaggaaaatgaagagattggggcgatggcttctgaaggaaaaatccatgaacttggaatgaaaattgcagttttgaagactcggaacaatgaactcaggaatcagttcaatgagctgtataaacacatggatggtctaacaaatgacgttgaaagatcaaatgaaatggtggccattcttcaagatgagttagaaacaaaagatgtagagctgagaagattgaaggagatgcttgcccagaaagaagcaactgatgagaacaaaatacctcaagaaaatgacgtcgctggagatgatatagttgctgccgccgagagtcagccaataaaagtagaaacataagctacgccttcagcagtcatttctagagtagcttgcgttctcaacattcttattattttttgtatcatgtatcagaagtgtttacttgtgtaatttatctaatgtcgtttattcttgccgatttgcattgcgctttgtctgagcactgcagcatgagacgtgttacctacttaccttgaatctaaactctcttagttcgtgcgtc

SEQ ID NO: 22345 - DNA, 399 bp, Oryza sativa nipponbare
  Clone ID: LIB3474-009-C11_FLI
atcagcctcgacgacgtcatcgagatcgccaggatcatgaggaacaggtccatggccaaggagatggccgggaccgtcaaggagatccttgggacctgcgtcagcgttgggtgcaccgtcgacggcaaggaccccaaggatctgcagcaggagatctccgatggcgaggtcgagatcccttcggcttaaaaggcttgatatttgaggacattaccatctcgtgctactgaagtgatcatttgttccaaaatgctgcttatgtaccttacgagacgatgtgattcgacctatttttgtcatgctttagtagtgatcttgttgagacctcaatgttactattgcaacttggtaccatttggtcctctggaatggagtttcaagtacttgcataatttaatc

SEQ ID NO: 22346 - DNA, 1746 bp, Oryza sativa nipponbare
  Clone ID: LIB3475-001-C1_FLI
cgaagaagaaaaaaaaaaggaggaaaagaaaagaggaggaaagcgaagaggttggagagagacgctcgtctccacgtcgccgccatggccgcccgcgccgccgccgccgcgttcctgctgctgctcatcgtcggcgcggccaccgcggcgccggacatgtcgatcatctcctacaacgcggagcacggggcgcgggggctggaggaggggcccacggaggccgaggcgcgcgccgcgtacgacctctggctcgccgagaacggcggcggctcgcccaacgcgctcggcggcgagcacgagcgccggttcctcgtgttctgggacaacctcaagttcgtcgacgcccacaacgcccgcgccgacgagcgcggcgggttccgcctcgggatgaaccgcttcgccgatctcaccaacgaggagttccgcgcgaccttcctcggcgccaaggtcgccgagaggagccgcgccgccggggagaggtaccgccacgacggggtggaggagctgccggagtccgtcgactggagggagaagggcgccgtcgcccccgtcaagaaccagggccaatgcggaagctgctgggccttctccgcagtaagcacagtagaaagcatcaaccaacttgttactggtgagatgatcacattgtcggaacaagaacttgtagaatgctcaaccaatggacagaacagtggctgcaacggtgggctcatggatgatgcctttgacttcatcattaagaatggaggcattgatactgaagatgactatccttacaaagctgtagatggcaagtgtgacatcaacagggaaaatgctaaggttgtgagcatcgatggctttgaggatgtacctcaaaatgatgagaaatcacttcagaaggcggttgctcaccaaccagtcagtgttgctattgaggctggtggccgcgagttccagctctatcattcgggcgtcttcagcggtaggtgtggcacaagccttgaccatggtgtggttgccgtcggttatggcactgacaatggcaaagactactggattgtccgcaactcttggggcccgaagtggggtgagtctggatacgttcgcatggagcgcaatatcaatgtgaccacggggaagtgtggcattgccatgatggcatcataccctaccaagagcggagcaaacccacccaagccatctccgactcctccaactcctccaacaccacctcccccatccgcccctgaccatgtctgcgatgataacttctcttgcccagcgggcagcacctgctgctgcgcattcggcttcaggaatctctgcttggtttggggctgttgcccagttgaaggtgcaacctgctgcaaggatcatgccagctgctgcccgcctgactaccctgtctgcaacacccgggctggaacctgctcagcgagcaagaacagcccattgagcgtgaaggctttgaagcgcacgctcgctaagctgaacaccgcatgagctcatcgataacatgtaatcggcgaggagaggggatgaggcagcgtggagcctttctgaaatttctgcttccgtgcctccatatatcgttgtcgcattttgaggggacagcttatttactctactgcctgccttttatcttacagtgatctgtgtacatagctcgatccaatttgtactcttatttatcttctccaatttgtactctatataatttatcatctcaagaatacattaacgaagatcctgttttaccgttcc

SEQ ID NO: 22347 - DNA, 778 bp, Oryza sativa nipponbare
  Clone ID: LIB3475-007-C8_FLI
ccttccaattcatctcgtcctctctctcgtaactcgtaaagagatctcgtctcgcctcgggaatccaaccattgccggcgaagtagagatcgggagggcggcgccatgaacaggggcggcggcgtcggcgtcggcgatgagagcggaagcgactacgagagcggcggcggcatgcggaagccgctgctgatgcacacggggagctggtacaggatggggtcgcggcaggggagcctcaccggcgcggggacctcgtccatggccatcctacgcgagtcccacgtctccgccttcctctgcacgctcatcgtcgcgctcggccccatccagttcggattcacggggggcttctcctccccgacgcaggacgccatcatccgagacctcgacctcaccctctccgagttctcggtgttcggatcgctgtccaacgtcggcgccatggttggggcgattgccagtggtcagatggccgagtacattgggcgcaaagggtcattgatgattgctgcaattccaaacatcattggttggcttgccatctcctttgcaaaagtatggcattacatggttcagaatcttactttcaccaccttgttgctttatacaatttaagctcgatgcctttgctttataggactcatcgtttctttatatgggacgattgctcgaggggtttggtgttggtgtcatctcttatacggtttgtatgagaaaacttccttcctcccttttttatgcgcacttatagtttgagtacttaacttctttgttcaag

SEQ ID NO: 22348 - DNA, 607 bp, Oryza sativa nipponbare
  Clone ID: LIB3475-007-D3_FLI
gcggacggcgcggcgctcgtcgtgcggagcgcgcacggggcgcgcgggttcctgtacccgatcgtcgatcccgaggacgtcaggcgtggcgggttcgacgttctggcggtgtgccacccggaggacgaggtgatcaactccgtcatcgtcgcccgcaaggtcggtgccgccgccgccgccgccgcggcgcgcagagacgagctcgcggactcgcgcggcgtggttctgccggtggtcgggccgccgtccacgtgctgcaaggtggaggcgagcgcggttgagaaggcagaagagtttgccgccaacaaggagctgtccgtctaacagccggacgatcgaaaggcgcactatattatggcaataaatcatttgattatacttatgctgcatttgcgaagctaaggtatactatgcaagccatatgtttgtgttcgtacgtgttgtttgggacgtacagttgtgttgttgtacgtcgtgaagtactgaagtgttcacagtagatcacaagttcacagcaatcaatgaggaccctgtaagccagtgtaaacgaggaacatgccatctgtgtatgacagtgagaaattatataagaaaaacattttgtgac

SEQ ID NO: 22349 - DNA, 1382 bp, Oryza sativa nipponbare
  Clone ID: LIB3475-008-H12_FLI
caaaatctgaaactctgaaaccacaaaccagactccacaagaccacaactcgttaatccctcgatctaaagaaaaaaaaaactcgttaatccctcacgcggcttctcaaattcgcacgcgacgggataaaaagaaaaaagaagaggaataattcgaagggaagaggaggaggaggatctcaatatctcatcctgctgccactgctcgactcctcctaccctcccccaaatccgcgagcctctagggttcgtgggatcccccggaaatggatccgaaccctagacttctcatcctactcgtcctcctcgcgttctccgccaccgtggcggtcgccgaggacggcgaatcgacggggggatcgaaggtctcgctggggcgccgtgcaggggggttcttgcacgggctgaagaaggaagcagtggtggagggagaccatggggtggccctcgatgaggtcggccccgggctgttcgatgcgctcttcgcgagtctctcgatgatcttagtcagcgagattggagatgaaacctttattattgcggcgctaatggcaatgcggcaccccaagtcaatcgttctgtctggtgcgctatcggcgctctacgtgatgacggtactatcaactggacttggtaggatagtccccaacttgatatcaaggaagcacactaacagtgctgctacagttttgtacttgttctttggactacgtttgttatacattgcttggaagtctgacccaaagggatctcagaagaaggaaatggaagaagtggaagagaagcttgagtcaggtcaaggaaaatcaacccttcgccggttctttggaagattttgtacaccgatctttttggaggcttttatcttaaccttcttagctgaatggggcgaccgaagccaaatagcaactattgcgcttgcaacccacaagaatgcaatcggagtagcagttggagcatcattgggccacactgtctgcacatcacttgcagtcataggtgggagcatgttggcatccaagatttcacaacggacagttgcaacaatcggaggtgttctcttcttggggttctccgtgtcatcgtacttctatcccccactatgattaacagcattaacagctccttactctttcttgataccctttggtcaccctgctccctgtgttgagcaaatgagtagaggaattaaattgattctttgggcacctctacgctacgattcgcaattcatgtatagcccttgcaaatgaaattgttcctgaccatgctacttcacttcagtctatagcagaagccgtctcgatgatgaaatcatgtctgattttttgcttggttgtacctgacatctaacttatacaatatatatacactatgttgttc

SEQ ID NO: 22350 - DNA, 1017 bp, Oryza sativa nipponbare
  Clone ID: LIB3475-010-C4_FLI
aagcattccacaagcttgccgttttccactgacagctcaagtgctcgtgcaacattagctgatcagctcgtgttcccaaccgcgacaaagcttcacagatggaggctcagaaccaagaggtcactgccctggtcgagaagatcgccggcctccacgccgccatctccaagctgccgtcgctgagcccatccgccgaggtggacgcgctcttcaccgacctcgtcacggcgtgcgtcccggcgagccccgtcgacgtggccaagctcggcccggaggcgcaggcgatgcgggaggagctcatccgcctctgctccgccgccgagggccacctcgaggcgcactacgccgacatgctcgccgccttcgacaacccgctcgaccacctcgcccgcttcccgtactacggcaactacgtcaacctgagcaagctggagtacgacctcctcgtccgctacgtccccggcattgcccccacccgcgtcgccttcgtcgggtcgggcccgctgccgttcagctccctcgtgctcgccgcgcaccacctgccggacgcggtgttcgacaactacgaccggtgcggcgcggccaacgagcgggcgaggaggctgttccgcggcgccgacgagggcctcggcgcgcgcatggcgttccacaccgccgacgtggcgaccctgacgggggagctcggcgcgtacgacgtcgtgttcctggcggcgctcgtgggcatggcggccgaggagaaggccggggtgatcgcgcacctgggcgcgcacatggcggacggcgcggcgctcgtcgtgcggagcgcgcacggggcgcgcgggttcctgtacccgatcgtcgatctcgaggacatccggcggggcgggttcgacgtgctggccgtgtaccaccccgacgacgaggtgatcaactccgtcatcgtcgctcgcaaggccgacccgcgtcgcggcggcgggctcgccggcgcacgcggcgcggttccagtggtgagcccgccgtgcaagtgctgcaagatgg

SEQ ID NO: 22351 - DNA, 1112 bp, Sorghum bicolor
  Clone ID: LIB3476-013-B4_FLI
caaaccccccacgaagcaaagcaaccgccagacttcgccgtactccaccaccagagcatgcgcgttgccgcgacccgactcgccgccgctccccctccgatccgcttcctcttcctcctggtgctcctcggttccgcgatcggagcagccatggccggccacgtcctcggcggcgtgaaggagaaccccgccgccgccaacagcgccgaatccgacgggctcggccgcttcgccgtcgacgagcacaacaagcgcgagaacgcgctgctggagttcgtgcgcgtggtggaggccaaggagcaggtggtggccggcacgctgcaccacctcacgctcgaggccatcgaggcggggaagaagaagctctacgaggccaaggtctgggtcaagccatggctcaacttcaaggagctccaggatttcagccacaaaggggaggccaccacgttcactaacgccgacctcggcgccaagaaaggtgaacatgagcctggttggcgtgaggttcctatagaggatcctgtggtcaaagatgctgcacaccatgctgtgaaatcaatccaagagagatccaactccctgtttccctatgaacttctcgagattgttcgtgccaaggcacaggttgtggaggacttcgcaaaatttgatattctgatgaaactgaagagaggcagcaaggaggagaagatcaaagccgaggtccacaagagcctggaaggggcttttgtgctaaacaagcatcagccggcggagcatgaggagtcgagcagccagtgaactgacgtagctgacagcttacataaataaaataaagagaaaacgtggccactccggttttatctggatatcgtgtattgtcgatggtcgtttctggcttggcttccgaaggcagcatgcatgccagtgctgttccaactcgttggaagacaggtggtacctgctgttgctcttgctgttataataggcattggaatttgtgaatttcgggagcttatctgttcgtatcatgttgtttaatgtgatgggtcgtatgtggatatatgttatgccaatacattttgccttttggttgcttgcgagcagtgtatgccaagttagcttaagctgcc

SEQ ID NO: 22352 - DNA, 712 bp, Sorghum bicolor
  Clone ID: LIB3476-017-D6_FLI
ggctatggaagaagaaaggatgtggaattgctatttccttccacttctcccactcaaactgtatcagtgtggactgttgatggaatcctttctcatgcccaatcaaaacattcaaatcccaaggtcgagaagtatggtaaaatcaccaaacttgagctgaaattaggtggtgacaaggctgttggtagaaagaactaccttgctgcatcaaagctctacactcaagcaattgagctggatcctgatgacgcaacattgtattcaaacaggagcctttgccagctacaaattggtgaggcaaacaaggctttgcttgatgccaacagttgcataaagatacggcctgaatggttgaaaggttactaccggaaaggtgttgctctcatgtcactcaaggagtacaaagaagcatgtgatgctttcttggctggactgaagttggaccctacaaatgttgatatggagaggatgttcatggaggcaattgaggccatgaagaaggaccatgttactacatagaccactaccatcaattagaggaactggcaggacttgtggactctatgctgccattttgtatatatatgtgtagcacaactatatgtagaaagttgtgcggactaacgctattacacggatttgtctaaaaccgtggtagaggtgcactattttgtgaactttatttctcaaaccaagcaccccctttaacttc

SEQ ID NO: 22353 - DNA, 1927 bp, Sorghum bicolor
  Clone ID: LIB3476-023-H1_FLI
aataacagaaacagtttatacctatggaatgaaacaaacagctacagatactcacggtgaagtaaaaaatatgctacaacaacagaagaacaggccttcttatttctcaaatcattcctgccttcttcagcagctccagataaaaggcccaagaaacttttggttcctccaaaggcttgtactaactaaatttcttggggaaaacttattgagactgttggcctgatttctccgtggttgtactctcaggttcttggcctgatttctccgtggttgtactctcaggttctcgagactgtttggtagctgcaccatttgcagatggctcactagctagagtttcttggagagaaccatttccagtcccgactactttggcagttgtttcgacttcgacggcctgtgctttcagcatcttttctttctcgagatcttgctttgccagggttgaaaactgtgagtcgagggaccttacagcacccagccatgcaagaacaatcaccagaagtattccaccaaggtagggtgtcgaattcgcaagagatccaaatgacaggatcatgaactgctggatcaaagcacctccagatttccccaaggggttgcagacaacgtcaatagctgctttacctttaaccttcatatcctcatccaaaggaatgtatgccatctctttgcaaggatcaaacagactgtactttgcactcttactgaaaatgttctgcattgctccaacatagactgccgcaagcaaaggtgtcaatgatgcctggtgcaatgtcatcatccatgagcaatgcaactgtttctacgcagccccaagaaaatgccaatccagttggtttacccaaccctcaattgactcaatctcagccaagcaccagcattgcttcagggcctccgctccctcagcatcttcttcatccctatgctcaagcaacccttcctcttggatacgcaagcatgattggctatccatctcttccaccaagctatgcatatctcccacctgctgcttttcagcaaccatacatgaacagtggcttgttccaccaagcagcagccgcagttcccaactcgagtgtgaaataccctctaccacagtacaaaagcaacattgcccttgctagcctaccacagccaggctctttgctctcaagctatgttggaggctttggaactgcaaacaacatgcctggaaatttccctctgaaccaaagcacaacatcagcaaccacaactcttgggtttgatgggacggtcccttcacatttcaaagatggaaatcagtttatttctcttcagcagaatgagaaccctgcaatgtggatgcatggagctggttcgcgagggatgcccccacttgcagccagtaccatgtatggctatcaagggcagagtcatcaggccggccttcggcagggccagctaccttcacaatttggctctgcgcttgggcagtcacagccaggcctgggccctgaacacagaaaccctagcgatagtaacctaagtggtgctgctcaggctaaccaaatgtggccgaatagctactgatccatccccttgtcaacttttgtggaaggcggtcctgttgtgtgtgcaaccccagagaggccatgcaatgcttgtggtctgatccaggcacgcggataccagctgtgtgcatgagttggtgtcgtgacattttgagaggcacaagagatatatgttcgagcatgttctacctgtagggtttctaggatatggccaaaaatgtagctcgatctatttattcaaattctgatagagaaaggatggttcttttttctattttatttttccttttttgctgtttaaatattttgtgacaataaaaccgaaatatctaacacagcagcaccattagttccccaggaagcgaaagataggctatttttgcaccacc

SEQ ID NO: 22354 - DNA, 866 bp, Sorghum bicolor
  Clone ID: LIB3476-029-B12_FLI
caatggccatcaagcagaaaggagcgacgacgacgacgttcctgctcttcctggtgctggcagtcgtcgtcgcagccgaggccgcccagctgcaagacgacgagcctgctacggccgccggcggcagccatgcccggcatcagcggcgcgcgaataaggcatccgccggcaccggggacgcgccaacgcacctgcacttctacttccacgacacggtgagcggcaagtcgccgacggcggtgcgggtggtgagcgcgccggcgacgtcgccgtcgccgctgttcgggatggtgaacgtgatggacgacccgctgacggacgggccggagcagagctccagcgccgtcgtcggccgcgcccagggcctgtacatggggtccgaccaggccaagctcggcttcctccaggccatgaacctggtgttcacggcgggggactacaacggcagcacgctggcgctgctgggacgcaactgcccgctcgacgccgtccgcgagctccccgtcgtcggcggcacgggggcgttccgcttcgcccgtgggtacgcgctgctccgcacccactggctcgacttcaccaccggcgacgccaccgtcgagtacgacgtctacgtcatgcactagcttaccaagacaacatcacaacaacaatggtgtcaataatggcttcgaagcaagcatgcatgcatgcttcgtcgcagagtgctgcttgccttttctttttcagcttatagcatgcgtgatctgctgtatccaatagaagcttcagaacccttccttttttttcagaaaaaaggtcgtccaaaaatctgatccagattatgttgctgttttaaaattgaggcaatatatatagcttttactttt

SEQ ID NO: 22355 - DNA, 1637 bp, Sorghum bicolor
  Clone ID: LIB3476-029-E9_FLI
ttccccagtcgccgcccgagtcaaaaagagggaagcttcttccaccacagtcccttctcctcgaggccgccctcccatcaacgactagacgctagtcaagcagcaccaaccctagtcaccccacaaccctaggcccctccctcctccacatccccttccccttggcttcccgagaggcgaggaggaagaaaccatggattcctccggcggcggcggcggcggcggaggaggaggagcgcagatcaagggtatggcgacgcacgggggccgctacgtgctgtacaacgtgtacgggaacctcttcgaggtctcctccaagtacgccccgcccatccgccccatcggccgcggcgcctacggcattgtctgcgcggctgtcaactcacagacaggggaggaagttgcgatcaagaaggttggcaatgcgttcgacaaccacatcgacgccaagcggacgctgagggagatcaagctgctgcgccacatggaccatgagaacatccttgccttaaaggacgtaatacgccccccaactagagagaactttaatgacgtgtacattgttactgagttaatggatacagatctccatcagatcatacgctcaaatcagccattgactgatgatcactgccagtacttcttgtatcagttgctaagagggctaaaatatgtgcactcagcaaatatattgcaccgcgatctaaagccgagcaatttgttcctaaatgcaaattgtgacctcaagatcgcagactttgggcttgcaaggaccacctcagagacagatctcatgacagagtatgtggtcactcgttggtacagggcaccagagctgctgttgaactgttcacagtacactgctgccattgatgtctggtcagttggatgcatattaggtgaaatcgttactcgccaacccctgtttcctggacgggattacatccagcagttaaaattgatcaccgagctcataggctcaccagatgatgcaagcctgggatttcttcgaagtgataatgcaaaaagatacatgaaacaactaccacagtttccaaggcaggacttccgcctgcgtttccgtaacatgtctcctggtgcagtcgatttgttggagagaatgcttgtgtttgatccaagcagacggattacagttgatgaggctctgcatcacccatacttggcttcacttcatgacatcaatgaagaacctacctgccctgcacctttcagctttgattttgagcaaccatcctttacagaagcgcatataaaagaacttatctggagggaatctttagcatttaacccggatcctccctactaatttcaaaaggataagttatctgctagaggcatatgaagatctctagctccagcggacgcaataacttgtgtcagtgtgcatcgattatttacgtggggtttgttgggcaaacgggcatgggttgttgctgcaatagcaactgtactagggcttgtgagaacaaacaacgtctgtattcctttcagatgcctgaacccaggcttgtattataccgcttgatttcataaactattcttatgtatctaagcttgtaattttgtagactattacttgaacgccccctgtatatctgagttgacatcacttccct

SEQ ID NO: 22356 - DNA, 2947 bp, Sorghum bicolor
  Clone ID: LIB3476-030-C4_FLI
ccggagcgtaacaagaactccgcgccgcgggaggtggtggtggtggtgttggagcagcagcagcgggccggggagggccgagaaatgcccggtggcgccttcctcctcaacagcggcggaggcatggctgactccggcggcggcctcaccgtccccgtcgttgtgacctgcctcatggcggcctccggcggcctcatcttcggctacgacattggcatctcaggaggtgtgtcggagatggaggctttcctgaagaagttcttcccgggcttgctcaagagcacggcgcgcggcggcaacaaggacgtgtactgcatctacaacaaccaggcgctaacggccttcacgtcgtcgctgtacgcgttcggcatggtggggacgctgctggcgagccgcgtcacccggcgcctggggcgccaggccgtgatgctgatcggcggcagcctgttcctggctggcgccctcgtgaacgccgccgcggcgaacctcgccatgctcatcgtcgggcggatgctgctcggcctgggcctcgggttctccggccaggccacgcccgtgtacctcgccgaggtgtcgcccccgcgctggcgcggggggttcatctcggcgttcccgctcttcatcagcatcggctacctggtcgccaacctcatcaactacggcacctcgcggatccccgactggggctggcgcctgtcgctgggcctggccgccgtccccgccgccgtcatggtggcgggcgctgcgttcatcccggacacacccagcagcctcgtcctccgcgggaagcacgacgacgcgcgcgccgcgctgcagcgggtgcgcggcaagggcgtggacatcggcgccgagttcgcggacatcctcgccgcggcggagagcgaccggcggaacgaggagggcgcgttccgccggatcctgcgccgcgagtaccggccgtacctggtgatggccgtggcgttcccggtgttcctgaacctcacgggggtcgccgtcaccgccttcttctcgccgatcctgttccggaccgtcgggttcgagagcgacgccgcgctcatgggcgccgtcatcctgggcctcatgaacatcggcggcatcctcgcgtcgggcttcgccatggaccgctacggccggaagctgctcttcgtcatcggtggcgcgctcatgttcacttgccaggtggccatggcgagcatcatcggatcacagctgggcaacgggagcaagatgcccaaggggtacgcagtaaccaacaggcgagcagagcagatcgtggactgcagcagccggctccctcgactcggccccttggcggtcgatggcggtcgactctcgccggcggccagcaaccaagcattgaaggtaaccagacacaagtctcctcaacacgcaatgattttgttttctcctctgatttacagagtgtttagttccccttctattccagaaaaattttaaatttagctctattattttgcataataaaactaaacatcatgtaaaaattttaacaaaagatggttattctctattttagattttgatctttcaaagtagttggcattttgcattttgcattttgtattttatggagaactaaacaaccccttaaactaaatcacaatctaattgatgaaatttatagggaagcgctatgcaaagtgcctatgtgcttactgcaatttaaacaaatttatttgtatatgctactgtgtgctactttatttagtgccatcataaaaattctataaataatttcttttgacattttgtttctaaattgcaatgtacatggaaaatacgtgtgctagcactagcatattttattgtggcaggaagctagcacttatatatttgcattgtatttttttctacatggaataccctgcggcgaaatcctggctccgccactgctcgccgaccggatgagccccgtcaccgccccaagcactagcagacatgcctccatcggttgcatctcaagctccgccccatccccagctgatgccacccagattgagctgctgttctcgtgaagtgggagctagaagagctcgtgacgtggatctaaagtttgcgatgccagagctgcttgtggatccctgctcactctctctctatctatctatctatctcgctctcgctctctctatcctatttttgtttccctcagatttcccaattaatttggttcctcaactagggtttggatagtggttgctgatgattgcatttcccggcatggcaggttcgttcctggcaccaacgttgcagaagaaaatgatctatccatgaactgataaagctttgaatgttggtgaatggtgaccttctggaattggagcgatctgtttatgttcattgtgtgcagttcagatgcaactactgaaaagcgtcacatagatccagagtcacgagctgctaatgcttggaatgagtccttgaaccattcacaaaatatctatatttgcaggcaagtcaaagaaaaatccctattttgattgatgccgcaagaaagagggagcagctggatgagcttctcaattttgcatcttacattgtatggtctgcaaagtttcctcaatcttgcggtagttctgaacctgcatgctaccatatgggagtaggaggctaagggcaattctgacattggagcatcggttggtgagtaaaacgccactcaatttctcagggcacaggctgagtagatgaaagcctaggcaaagaaagagctggcgaagaaggttgtcggccctaaacagactggtgccatttttttttgaaacaacaactatcaatatagaatggacagttactaaaagattttcaacatgtatattgaatggatctgagttgctgtacagtatagatagattcagctaatagagttggaaatttaaacattcataatctatcttgataatggtagcttccttcaaaatctcct

SEQ ID NO: 22357 - DNA, 1379 bp, Sorghum bicolor
  Clone ID: LIB3476-030-H12_FLI
cccatctcttcttctccacagtccacactgttcacctcctctcccctctcctcctctcttcgatccccaaatccggaattgaccagcccaaatcgtcgtcgccccggccgcatggagtggacggccccgaagcccgcctcctcgccctcctcgcctccccttctctgggactggggagaccacgccgccacgggctcgggctcctcctccggcgacgccccggcgcggcgcggtgctgggaaggagcgggaggcgaagcgtgccaggggcgaggacggcggcgggggagctgaggtgaggtgtcaggtcgaggggtgcggattggacctcaccagggtcaaggactaccaccggaagcaccgcgtctgcgaggcccacaccaagtccccccgcgtcatcgtcgccggccaggagcgccgcttctgccagcagtgcagccgattccatgccctgtcagagtttgatcagaagaagaggagctgcaggaggcgtctgtctgatcataatgcccgccgccggaagcctcagccagatgcattcacctttgcctctgcaaggctgccttcgtcattgtttgatgataggaggcaaataagttttgtctggaataaagctcctgttagtcatgtaaggcctttcacttctccatgggacagttcatctgacttaaagctccctcatgcaaaggaaacaagagaggtatcaacaaaagttgggacaattacgggacaagttcatttggataaatctcacatgtccaatgctattccaacacttagtcatggcaaagatgagccttggccaatgaaaggtccggacatgtctataactgcttcaaaatttgatggagcaccggatcttcagcgtgctctctctcttctgtcagttggcgcttgtggattgcctgatcctgtacatcaaacatcctgcgttatccaattcactggtgccagcgagaacagtggtgaccttcatttatcacatggggggaactctggtccagcttcatgcgctgatggacagcatatagctgctcagtctcagtctcagctggttcgttttaccatggataccagcaacaatgtctatgagcccagtttcttcggtgtaaaccagataaattaagcgtgaaagatacacgccagttgatcatttggataaatagccatgaagatggcctgggcttgtgcaggaagttcttcaaccaaccaccggacataaggatctctcagttaatgttatctgcatatttatcagcttatgtttaatatgcagttccaacctgtgattgacccattttttctgttgttttttttgccccctgtgatgtgacgactctggaactttctaagtgtgatactatgtagttttacactttt

SEQ ID NO: 22358 - DNA, 1432 bp, Sorghum bicolor
  Clone ID: LIB3476-034-E3_FLI
tacttcttggtcctgacgacggtgcgttcagaccagtgacgacgacgttgtgaggagagggcaaggaagcaaacctgccagggaggtggcgatggagaggtacgaggtgatcaaggacataggatcgggtaacttcggggtggccaagctggtccgggacgtcaggaccaaggagctcttcgccgtcaagttcatcgagcgggggatgaagattgatgagaatgtccaaagagagatcatgaaccacaggtcgctgaggcatccaaacatagttaaatttaaggaggttgtgctaactcccacacatttggccatagttatggaatatgctgctggcggtgagctatttgaaaggatctgcaaagctggaagatttagtgaggatgaggcaagattcttcttccaacaactgatttcaggagttagctattgtcattcaatgcaaatatgtcatagagatttgaaactagaaaacactctcctggatggtagtatagcacctcggctaaagatatttgattttggttactccaagtcctctgtgttgcactctcaaccaaaatcaactgtcgggacaccagcttacattgctccagaggtccttgctagaaaggaatatgatggaaaggtcgccgatgtttggtcatgtggagttactctgtatgtgatgcttgttggtgcttatccatttgaggaccccgacgaaccgaagaatttccgcaagacgcttactcggattctcagtgtccaatatgcggttcctgattttgtccgagtttcaatggagtgcagacatctgctgtctcggatctttgtggcgatccctgagcaacggataaccatcccagagatcaagaaccacccgtggttcttgaagaacctgcccatcgagatgaccgacgagtaccagatgaacctacagctggttgacatgaatggcccctcgcaaagtctggaggagatcatgaccatcatacaagaggcccggaagcccggtgacgggctgaagcattcgggacagctccctggcctggggagcatggagctggatgacattgatgtcgacgacatagatgttgaggacagcggtgactttgtatgtgccttgtgacgtggttcaagctgtctcggcgctgttgctgtcacgggactctcccccacccttctggtcttgtgttctactgttattccatcttgtttcagcgagctccgagctcccattttgttgttgtaatatcacatgttttgcgtaatcaaggtagtcacgctgtggataaataatagacgttattatgtcatgtattcttgctgaattcttgttcaggtcctgtgtttgccctgtatgaactgggcagtttcatgagtgcctcagcctgatcttttgatctgctgcatgtagccaatgtgttttttattattattattttactag

SEQ ID NO: 22359 - DNA, 1214 bp, Sorghum bicolor
  Clone ID: LIB3476-035-D3_FLI
caaaaaagaagggtgacaatgcttttcgacagaaggattttactactgccattgattgctattcccagttcattgaagttggtacaatggtttctccaaccatttatgctcgacgctgcctgtcatatctgatgaatggcatgccacaggaggcattgaatgatgcaatgaatgctctggtaatatctccgacatggtcaacagcattctatcttcaggcagcagcactattatcacaaggcatggagaatgaagcccaagaagcactcagggatggttgtagcttagagcaaagtagcagtggtggacattgagtgtgacaaatttgtagtccccaaaatgcacataatttcaggtgcttgtttgaagagagtattattggctatggttcatatgccgaccaacattccaccgcctcctggccaaactcagtttatgcctggtccaccacgcacgtttgctatgcccccatcatcgcacatgccgcccatggtcaatcccattggaattcctcagcctccagcaccgcctctgcctccgcagcctcctgctgaagagcaaccgcctccacctgatgaaccggaacctaagaggccgagaacagatgatgcttctcttatcccagtggaacagttccttgctcagcatccgggtcctgctagcatctctgtatctgtacccaaccttgacgaagggaacttgagaggccaagttttgcagatccctgttcaatcactgtcagacacagttggtagtctgaaggagcagatagctggagagttgcagctccctgctaataagcagaagctgagtgtgaggactagtttcctcaaagacaaccttactcttgcttactacaatgtgggtcctggagtggtgatcaatctaacactgagagagcgtggtgggagaaagaaatgagtaaatgagtcttttggttctcaatgtagtgtggcaggttaagcttacaactatacatcagcagctatcatggagaacctttttgctggatcttgctgctttacctttcattttattttcttttgtatgctaagtgcaatcatttgtgtaatgtgaacggcgtacattcctctatatcttgatatagttaaatgctgtgaggggttctgcctagtatgttacttgaggttgctactggatacctacatggccacttaatgttaaatcgtatggctgctctagctctagcttct

SEQ ID NO: 22360 - DNA, 886 bp, Sorghum bicolor
  Clone ID: LIB3476-037-G12_FLI
tcttcttgttaacccaagtagggtggagctatctagagtttcattgaaaacaaggaagtccgacaatgtcgacgatcacttcttgcacccttctgagcctcggatcggcagcgtggccggcagtctattccgccgggagaccatcaccggtggcggtggcttccctttcttcccagaggaggccccggcccctttctgtgtgttgtgcgacgagccagaaaggggatcacaacccaaagacggatttgcatccatttaacatccctgccttcgttctggtgcacccggtgccaccacgcgaggaacggtggcagctagaagaggacgccgagaaggtgaacctgtggttcgaggtgcctgggcagtcccaatatgacctcgccgtggagatcgacgaggacgtgctcgtcatcaagaagaaggtccatgtcgtcggtggggacgtgggccagaggagccctggcggcggcggcggcgtcaacgattatgctccccagagcagaaagggcggcgcggcgccagaagctagcaaggaggccgcacagcagggcggcgaggtgatctacgcccggatgctgctcccggcggggtacagcagggagggcgtggaggcggagctcaagtccggcgtgcttagggtcactgtcgccaagatcaaggagcgggcgcgcaggaagatcgacgtcggcattctagtcaagtaggagcatgcatgcatgaactgaaagagtgcttttgatttgtgcgatgtccggcaggctactgcggttcgaccgcgatctggtcacgtactcgatcgcgttgaccatatatatgttggtggctttgtgtacccaagtacacgatcaataaaaataagcatccgatcgatgttctttcttcacgc

SEQ ID NO: 22361 - DNA, 570 bp, Sorghum bicolor
  Clone ID: LIB3476-040-H2_FLI
caatacgctacccagaccccctcatcaaggccaacgacaccatcaagatcgacctggagaccaacaaaattgttgacttcatcaagtttgatgttgggaatgtcgtgatggtgactggtggaaggaacactgggcgtgttggggtgataaagagcagggagaagcataagggcagcttcgagaccatccacgttgaggattcccttggccaccagtttgccacccgcatgggcaatgtgttcaccattggcaaggacaagaaaccgtgggtgtctcttcccaagggcaagggtatcaagcttagcatcattgaggaggcaaggaagcgcaatgctgaggctgctgctgaggcttgattctcacaacttagctacagataaaccattgctgtaagcattttccataggtgcagacatgagactaatggtacactagtgttatcatggagctgttttgaacaccgaagctgctggttcacatttctttttttcccccctttgtgatttggatactatatttatcatgagttttcgtttattgagcaaatgaaacattacaagtttggcgacc

SEQ ID NO: 22362 - DNA, 1471 bp, Sorghum bicolor
  Clone ID: LIB3476-045-B2_FLI
ccaactctagcgcttcccttctcttttcctcttcttccccgaggcgccggctctggtcaggtcgggccttgccgccatttcgggactcgtacgtagcttcttcctggtcggggttgctgcgcgtcttgcgtaccctgggttgagcatcattgggagtggaagaaaggaatcatgttcaggagaaagcatgcttctcatttcaactcaaatgatgctgagcagcaagaagcaaagataaatgaattaaaatatgcacttggtcctttgtctgcccatgacgagaagtactgcagtgacacatgtttcagaagatatcttgaagcccggaactggaatgttaccaagtcgagaaaaatgcttgaagaaagtctcaaatggagggcaacttataagccggaggatattcgctggcctgatgtttctgttgaagcggaaaccggaaaaatgtacaaggcaagttttcgagatagagaagggagaaccgtaattattatgagacctacaaaggagaattcaacgtcccatgacggtaagatccggtttcttgtatatgttttggagaacgcgatcctgggccaacatgaaggtcaagagaaaatggtatggctgatagacttcgcagggtggacaatggcccatgccacacccataaagactgcaagagaatctacaagcatcctgcaaaatcattaccctgagaggctggccgttgcatttttgtttaatcccccaaaagtattcgaagccttttacaaggctgtcaaatatttccttgacccaagatctatcgagaaactgaactttgtgtacctgaaggatgaggagagcatgaaggtcctgtacaaatgcattgatcccgaggtccttcctgtcgagttcgggggaaggaacagtgttatgtacaaccatgaggagtactccaagttgatgctgcaagaagatatcgaaccatcaagcttctgggaagatgacgcgaaaacagttgaccatgctgtcaatgggaccttggttcctgatgttgcacctcggtcgctgcaacttgctgctaaagccagttgagtatcatcctactatgatggatgggagctattcagaatgctttaatggaggaactggaaaagttgagccccaatagtttattgatagtaaacaaataatagaggaaataacagatgagatattacttgtccatagtcgaaatagttgcacttatcaaacactttatccagtacacgatgagttacaggaggatatcgccatgggtggatattggatgcaaaagcccaaaagaaatggtgtgagaggttggagtgccacctgcttattgtatctaaaagtcactaaatgctgaacatgttttagccgtggctctgcagaagctaattctgggttatggctaaaagtgctgattttatatttgtatttgattatggccgaagtagctcctcaccagcttgtggattctagtagt

SEQ ID NO: 22363 - DNA, 2080 bp, Sorghum bicolor
  Clone ID: LIB3476-051-E4_FLI
gggagagccccgctgcatatgatgctgacgtattcctcacctctgaattacatcagcatcctgtcaatgattctgctgttaggtttcatgttgatcaagaccgcaaggcaaagatcgtgtgccacttcaacaagcaggttttgcagagctataagaacttcatgagtagtgcaccacctaagcgcattttgcttcgcaaaggtgctgtctggaaagacgttccagaaaagattgtcaaattggcccaagccgacttcagggcaaaaaagacgatcacagaaacaggatatcagaaccatctatttttgctcgattttgcccatatgacattcatagacacaaagacaggtcttcagaggcctattgcttggattgatgaaaatggaaagcgctacttcccggaatcatttatgcaagatcagaaattatttatcaagaaagattttggcaacggaaatcctgagtacattagtgttgagccaaatgggacacgagaaatgaatgaccagcttggagcatcagaaagttctgcagaaagctcaaactttgattcaagtactgaagatatttccagtcctaagagatctagggctgaaaagaattccatcataaaaaaatactgtgatatgggagaagctattggagaaaatgagccatgtgctttgttgcctacagcctgtaacctactgccacaccaagctaatctgggtgaggtatcacgtgctcagcgcactattgaagccgtggagaagctgttgctgcaggggatgggttcagttattgaatccaaggacattattggaatcttcaggactccattattggatgaccacagacaagtccgttaccatattcaccaaaagcaagtacaggttaccggatgtcatcgtggaaatgcaaatgtccgttatgcatggcttccttgctccaaaagcactgtgcatgaaatgatgctgaatggtgttttacaagttcataagccgcccattaattttgcagcctatggagagggcatcctccttacaccagcaaatcgttctgatgcctgtgtgaaatactctgatgttgatgaaaatggcattgtccatatgatgttgtgccgtgttataatggggaacgtagaaatagttcaccctggatctaatcagcaccgacctagtagtgaccatgttgatagtggagtagatgaccttaaaaacccacaacattacattgtgtgggatatgaatatgaataggcacatctattctgagtttgtagtcatcgtcaaattgccttctaaaaccaaagattccttcgtgtctcaagaagagtgtcagaattcatctgatctgtcactggtgttgaattctagttcacctgactgtatttcagaggagatgaacctggaggcacctccagcattgggaggtggatgtgcagcccccatgctaggagattcgatggaaaaggctccaagctcaccttggatgcctttctccatgttgtttgcagcgatctctactaaagtgtctcctgagaatatggacatggttattagttgctatgaagagtttaagagtaagaaaataagccgaggtgaactagtaaagaagctgagacatgtagttggtgatagagtgctaatatcgacgataatgcgtctccaagataagttacctccagtggagaggcgtgaggcaccggacgcatcagcggccaagatggtggcgaaaccgtgaggtgggtgtcatcgtgggcgaggaatgcagaagggaggaaccagcggacttgacataaaaccctgtgggaagcagcaactatgaaagcctcttgcagtcttgcggcatcagtctttatatatggcggctgctgtttgttctctctgtgtcataggagtttatgttggcgaggaaattgtatctggtgttttttcatttcaaagtaaactatgcacgcagctgccgtgctttttgaaccattggaatggttcatcagtcgaaaaggttccttttaccttccagtttgcctttctaagataacagagttgagcattgttgattaatgttggtcttacatatatatagaataatatgtgaat

SEQ ID NO: 22364 - DNA, 798 bp, Sorghum bicolor
  Clone ID: LIB3476-053-E3_FLI
ggacattttccaggaggtctatgaagctggctggaaatcaaaatttgaggctgctggaatatggtatgagcatcgtcttattgatgacatggttgcgtatgcgcttaagagtgaaggaggctatgtgtgggcttgcaagaattacgatggagatgtgcagagtgatttcttagctcaaggttttggctctttgggtttgatgacatcagtgttggtgtgccctgatggaaaaaccattgaagctgaagctgcccacggcacagttacccgtcatttccgtgttcaccagaaaggaggtgaaaccagtacgaacagcattgcttcaatctttgcatggacaagaggacttgcacacagggcaaagctggatgacaatgctaggctactcgacttcgctctcaaactcgaggctgcttgcgtcggaactgtggagtctgggaagatgactaaagatcttgcacttcttgttcatgggtccgccagcgtcacaagaagccattacctgaacactgaagagttcatcgatgcagttgctactgagctccgatcaagattgggagccaattgagcttacaagaaactttgtgcatggcgacttgaatgcttcatcaccgatctgctccagtcatttctgttacattggtactgccagtcatgcttccgtgatgaattgaatgtgcgtcatcgcaatgcaatttcgatcgaagctgattaaagatgatggtgtcacgtgagcgcccataataaaggatatatagaacaactgtggcagatgattaaaatacttttatgtttgct

SEQ ID NO: 22365 - DNA, 1280 bp, Sorghum bicolor
  Clone ID: LIB3476-055-G10_FLI
tttgaagaactgaaagaaaagaccgacaattttgggtcaaaggctttgattggtgagggatcatatggaagagtgtattacgctattctggacagtgaaaaacatgttgctgttaaaaagcttgacgcttcaacagaccctgaactcgataatgagtttttgacacaggtatccattgcctcaaaactaaagcatgataattttgtggagatgcttggatattgtgtggaaggaaatcagcgtctagtggcctatgaatttgctacaatgggttctctgcatgatatcttgcatggaagaaagggtgttccaggtgcacagcctggcccagcacttgattggatgcagcgggttaagattgctattgatgctgctaaagggctagagtatcttcatgaaaaggtgcagccttcaatagtccaccgggacatacggtctagcaacgttcttctgtttgaggactacaaagcgaaaattgcagatttcaatctttccaatcagtctccagatatggctgctcgtttgcattctactcgtgtccttggaaccttcggctaccatgctcccgagtatgccatgactggccagctaactcagaaaagcgatgtatatagcttcggagttgttcttttagagcttctaacaggaaggaaaccagtagatcatacaatgcctagaggtcagcagagtctggttacatgggcaacacctcgattgactgaggacacagtgaaacaatgtgttgatccaagattaaagggagagtatcctccaaaaggagttgccaagcttgcggctgtggcggcactctgtgtgcaatatgaatctgaatttagacccagcatgagcatcgtagttaaggcactctctccccttcttcaacataaaccgcaaccaccaccagccactactcctgatgcaacagcaccttcagatgcctgactttttcaacaagctatgaatcatgaatgtaaagagagccatttcctcttcggtgcgtgcgctgttctgaagtactaccgtgtgcctgtgaagtgatcagtgtcacacaagtaacggcattgtggactaatgcatatgcacacctttacataggttggtacagacaggaggctcccccccttgtcattaccgcgtgctaagctgagtcatgtcctgccttcgttggccgggtgaggtgtgcttgttggccagcggtcgtgatcacctaattaccgtgttactgtaacatgtgaaggttctaatttttttttcaaggtttgtttttcgtgtgcatgtct

SEQ ID NO: 22366 - DNA, 1766 bp, Oryza sativa nipponbare
  Clone ID: LIB3477-003-F9_FLI
ccacgtcctacgaattcgatcgcttcacaccaagaaaacctcgctagctagcttgtagctcgccatgccgggcggcggcgcgatggtggcggcgagcggcgccggccggcctgagtacccgggcgggctcaccatgttcgtgtccatggcgtgcctcgtggcggccaccggcggcctcatcttcggctacgacatcggcgtctccggcggcgtcacctccatggacccgttcctcagcaggttcttcccgtcggtgtaccgcgcgcagtcggcggcggctgcggcggccggcgggaaccagtactgcaggttcgacagccagctgctgaccatgttcacctcgtcgctctacctcgccgcgctcgcctcgtcgctcggcgccgccacggtgacgcgcgtggcggggcgcaagtggtccatgttcgccggcgggctagtgttcctcgccgggtgcgcgctcaacggcgcggcggcgaacgtggcgatgctcatcgtcggccgcgtcctgctcggcgtcggcatcgggttcgccaaccagagcgtgccggtgtacctgtcggagatggcgccggcgaggatgcgcgggatgctcaacaacgggttccagatgatgatcaccaccggcgtgctcgccgccaacctcatcaactacggcaccgcgaggatcgccggcgggtgggggtggcgcctcagcctggcgctcgcggcggtcccggccgccgtcatgaccgccggcgcgctgttcctcccggagacgcccaactccctcctggagcgcgggaggcgcggcgaggccaggcggatgctccagcgcgtgcgcggcgagggcgtggacatggaggacgagtacaacgacctggtcgccgccggcgaggcgtcccacgccgtggcgagcccgtggcgcgacatcctgcgccgccgcaaccggccgccgctggtgatggcggtggcgatcccgctgttccagcagctgaccggcatcaacgtgatcatgttctacgcgccggtgctgttcaggacgctggggttcggcggcggcgcgtcgctgatgtcggcggtgatcaccggcggcgtgaacatggcggcgacgctggtgtccgtgctcgccgtggaccgggtggggcggcgggcgctgttcctggagggcggcgcgcagatggtagcgagccaggcggcggtgggggcgctgatcggggcgaggctggggtggtcggggacggcggcgatcccggcggggtacgcggcggctgtggtggcggccatgtgcgtgtacgtggcggcgttcgcgtggtcatgggggccattggcgtggctggtgccgagcgaggtgatgccgctggaggtgaggccggcggggcagagcatcacggtggcggtgaacatggccatgacgttcgccgtcgcgcaggccttcctgccgctgctctgccgcctcaggttcgtgctcttcttcttcttcgccgggtgggtcgccgccatgaccgccttcgtcgcgctcttcgtgccggagaccaagggcgtccccatcgaggacatggccgccgtctggagcgaccactggtactggaagcgcttcgtcgacggcgacggcgacggcgcacgacgccggggagacattgagatgggacacaagtagtagtagaatttactcactgcaccgtactacacttcatgtttttcttttgttgttattcagctattattagatgcggattttctttaattactactaaatttcaatgagtgaagatgttgtaacaaggatt

SEQ ID NO: 22367 - DNA, 2133 bp, Oryza sativa nipponbare
  Clone ID: LIB3477-005-E1_FLI
caccaacctctccctcctccctcccctctcctcgcctccgcctccgcctccgcctcccaagaaggcgaaccctattccgcccccgattctcccggagcggggggccggactcccgttgcgcgattgggcggtgaaacccgaatccccctgcgggcggcggcgtccgtttctcatctaccgtcggcgttgggggggacgccgccccatgggccggtcgccagcgatatatcactatcagctcatcgaccggcggaaagggcttggataaaatcttattgcaaatttccccttgtacatgtaacatcacatgtaatttctattaaaaatgacttcactcaataaagttgtttccaatggagatacaaggtcaatgttgccaaataaagtcacagcattgaatcccaacgcagcagaatttgtaccttcatgtattagaccatcttttgagagtagcgctgtctcagatgtaagtaaggcagatcttagggcttctgggaaaactatcctagataggtccgagtcatcaaagtcaaataactcggatgatgaggcacaccagttttggcgtaagcagcttcctgatgacattattccagacttcagttttgagaaaattgaacaagaacctgaagaattgtctcttgctggattatccttgaatgcaccccctttctatggaacaacagctagccgcttttcaagagagcatgatttatcttctcaagctaacaagagcctggaactggggcttaccagtttactttatgaagataattcacaagcatcgtttccaactatgggttcaagcaattgggagcaaaattttgtaggggatctccattttacgaatggaaatcagggccttcattatgattctgaaagtgctgcaggcttttctgacagttttgctagcgattatgctgcagcaacagacgatgttcttgaccccctagcgtatttagcttcacagtttcctgatttttcatcagagagccttgcagagctgtactatgctaatggatgtgacttcaaccatactattgaaatcctcacccagctagagatgcaagttgatgctacctccaatccaactctgacccccaggacaccaaactttagcacaggggacttccccgcactgccaacagttgaagaccaaaatggtttttccaaaggcaatgcagatattctaagcatcttcaatggacgcagctcaccctctgtatctactggtactggtgattttgtttcagctgttcgcaaacttgcatcgcaaaattctggccattggaagtataagaaaggtcctgaatacggtaatggtgtttcaactgtttctgtacccaagcagtacagttctacgaccaaaacatcttctggaaacaagtttcaaagtgttagcagtgcaagagctgctccatggctcgaaactggagatgcagtagcaaacatgtactcagaatcaaggggagaagcccgtgattttgcccgcatccgaaatgcatgttttgagcaggctagacaggcttacctgattggcaacaaagctctagccaaggaattgagtatgaagggacagacatataacacacaaatgaaagcatctcatgagaaagcaagagaagctatttatcgacagaggaacccatcttcgcaacgagggagcgaccgtctgatcgatctacatggtctccatgtgaacgaagcaatccatatacttaaggtcgagctcggtactcttaagagcaccgcgagggctacaggtgagaggatgcaagtcatgatatgtgtcgggacaggtcatcacaccaagggttctcgcaccgccaggctgcccatcgccgtcgagcagtttcttctggaggaaggcctccactacacgcaggcacaacctggtttgctccgtgttgtggtgttctaacatctcttaggtcagcagcacgaagaaaaaagaagcaaaacaaaaaaaggagaaagagatgtagggaaaagaaaaacctaaaaaaaatggccgctgttgcagcactgtaattttcttgtagttgtatattaaaagaggcagcaggagaatagcctgacaacagaatacagtgtaaaattatacatagcttcattcaattcacattccattcc

SEQ ID NO: 22368 - DNA, 853 bp, Oryza sativa nipponbare
  Clone ID: LIB3477-009-E8_FLI
atcgcggcgacgaggctgagcgtggcgacgaccacggtgttctacatgctgtgcgggtgcatgggctacgcggcgttcggcgacgcggcgcccgacaacctcctcacgggcttcggcttctacgagcccttctggctgctcgacgtcgccaacgtcgccatcgtcgtgcacctcgtcggcgcctaccaggtgttcgtccagccaatcttcgccttcgtcgagcgctgggcctcccgccggtggccggacagcgcgttcatcgccaaggagctccgcgtggggcccttcgcgctcagcctcttccgcctgacgtggcgctcggcgttcgtctgcctcaccacagtcgtcgccatgctcctccccttcttcggcaacgtggtgggtctcctcggcgccgtctccttctggccgctcaccgtctacttccccgtcgagatgtacatcgcgcagcgcggcgtgccacgtggcagcgcgaggtgggtctcgctcaagacgctcagcgcgtgctgcctcgtcgtctccatcgccgccgctgcgggctccattgctgacgtcatcgacgctctcaaggtgtacagaccgttcagcggatgattggaacgtgaggggcacgtgtgctcgttaaattatttcttactatctctgtaccaaaatatagcaaactagtataaataggacgaaattcgggtagttctcaggtacgaattcatcgtactaggaaatatctcacattgtattaagttgctatattttgggtcagcattagtacaatattacacaaagaggaaaaaaaaaggaagaaatgtaacatgtggcgtttttcattggagaccttgaaaaatcttgtaattgc

SEQ ID NO: 22369 - DNA, 2119 bp, Oryza sativa nipponbare
  Clone ID: LIB3477-009-G7_FLI
ctcccgtctcttcccgtccccgctccagtgggcgggctctctccctcttcctcctccgctccgctccacctcggttgaccaccacccgatcggcggcgagggcggggagctccggcgtgctcagtgaaaatggatggaaatgctaaaggcggtgggcattctgaggcactgaagaactacaatcttggaagaactttaggtattggctcatttggaaaagtgaagattgcagagcataagcttacaggacacagagttgctataaagatcctgaaccgccgccaaatgagaaatatggaaatggaggagaaagcaaagagagaaatcaagatactgagattgttcattcatccccatatcattcgcctttatgaggttatatacactcctacggatatatatgttgtgatggagtactgcaagtttggagaactgtttgattacattgttgagaaaggcaggttgcaggaagatgaggctcgccgaatcttccagcagattatatctggggttgaatactgccacagaaacatggtggttcatcgtgatctgaagccagaaaacttgctactggattcaaagtataatgtaaagcttgctgactttggtttgagtaacgtcatgcatgatggccattttttgaagacaagctgtgggagtccaaactatgctgctccagaggtgatctctggtaaattatatgctggacctgaggttgatgtatggagctgtggagtgatcctttatgctctcctttgtggtactcttccatttgatgatgagaatatccccaacctattcaaaaagataaagggtggtatatatactctcccaagtcatttatctgctctggccagagatttgatcccaaggatgcttgttgttgatccaatgaagagaatcacaattcgtgaaattcgagagcatcagtggtttcagattcgccttcctcgttacttagcagtgcctccaccagacacagcacagcaagccaaaatgattgatgaagatacccttcaagatgtcgtaaacttgggttatggaaaggaccatgtgtgtgaatctctgcgcaatagactgcagaatgaggcaactgttgcatattatttactcttggacaatcgattccgagctaccagtggctatttgggagcagactatcaagaatctttggagaggaattttaatcgctttgcttcatcggaatcagcaagttcaaatacaaggcattatcttccaggaagcagtgatcctcatgccagtggtttgcgcccacattatcctgttgaaagaaaatgggctcttggacttcagtcacgagctcaacctcgcgagataatgattgaggtcctaaaggcacttcaagacttaaatgtctcctggaagaagaatggacagtacaacatgaaatgcagatggagcgttgggactcaggccactgatatgttagatgttaacaacagctttgttgatgactcaatcataatggataacggtgatgtaaatgggaggctacctgctgtgatcaagtttgaaatccagctttacaagaccagagacgagaagtatctgctggatatgcagagagttacggggcctcagctccttttcctggacttctgtgcagacttccttaccaagctgagggttctatagtacccttgtgttggcttcagtgaaaaaccaaacctagggttttatcatgtgcggtttttcactgcaataatgaataaaggacaccatgtaaataggcagctgtgactttcttcccagtccttagacagcgaaggttgttgtttgagtgactagtgttgtgttaagcaccaaaatgttggttgttacagacttacatagtatatagatctttataagctatctgggtgggcgaatgcttgatttctaatttttgcaggctgcagctatactgctggtgatgccgcagtacaagcttttctttttgctcctgcacacggttattatacgtgtgcatggaaattttgctactgctaggaagaagctagtaagaatatcagccccttgctgccgggttgtggtataaatgtagatgacagcaaatttagtggaatatttctatgacaacaaatgtagtcgtatgatc

SEQ ID NO: 22370 - DNA, 2019 bp, Oryza sativa nipponbare
  Clone ID: LIB3477-010-C5_FLI
cgtttctctccctcgattcacggcaacctctcggagcgtggtcgcagcaacggccgcggcgttggtggcaatggaacgcccaatctccatgcttcttcttgctgtcgaacaccagatcgcaggagacaagaatcagtgagcatgcatcatgtcgtccaacatgttcggcaagaaagggtgggactcgaatgggatggatacatctggttctgtctgcagaagttcttcagatatcaattacattaatcaacgggcaagattgaagagtgcgagcctaaactgtgtgggttcgccgccaaggaagaacaacaatgctacacagtaccggatgtttgttgccacatggaatgtgggaggaagaactcctaataaacgacttaaccttcaagactttctgcaggttgaagaatctcctgacatctacgtcttagggtttcaggagattgtccccctgaccgccggcaatgtgctcgtcctcgaagacaacgagccggcggcgaggtggctggcgctgatccaccaggcgctgaacatgccccaagaaccggccgacggcgacgagccatcgcctttgacgccgccgccgtcgtcgtcgacgacgacgtcggagtcgtcgaacggcgcccggacccggcggcgcgacgccgtgtcgaggtcagccagcggcaacctcttcttccacacgccgtcgctcaagatgctcagcaacagctaccgcgtcgacagcgcgctagtcaagacgtgcaactgctcgccggagcactcctccgtgcgccgccgtgccgcggaggtgcgcgagtccgtgtacctcgccgacgcacccgcgccagccggcgagacggcggcgccagctgccgacgaagacgacgcgccgacgacggaggcgcagtgcgaggcaggatgcggcggcggcggcggcatgagctactgcctgatcgcgagcaagcagatggtggggctcttcctgtcggtgtgggtgaggaaggagctcgtcgagcacgtcggccatctccgggtggactgcgtcgggcgcggcatcatggggtggctcggcaacaagggctgcatcgccatcagcatgacgctgcaccacaccagcctctgcttcgtctgcagccacctcgcctccggcgagaaggaaggcgacgagctgcggcgcaacgccgacgtcgccgagatcctcaagagcgcgcacttcccgcgcgcctgccgcccggcgcccgccgccgcccgccgcgtccccgagaggattcttgaccacgaccgaatgatctggctcggcgatctgaactaccgcatgtcgttaagctacgacgagacaagaacactactggaggacaacgactgggacgctctactggagaaagatcagctgttgatcgagagagaagcggggagagtgttcagaggctggaacgaaggaaagatctgcttcgcgccgacgtacaagtacacgcacaactccgacgcgtacgccggcgagacggccaagtccaagaagaagcggaggacgcccgcatggtgcgaccggatactgtggcagggagacggcatcgagcagcttcagtacctgcgcggagagtcgaggttctccgaccaccggccggtctgcggcgtgttcgccgtcgaggtggacggcggcgatggcgacggcggcggcgccgccggcaagatcatgaagggttactactccctcaacgcccggatcggcggtgacagatcgcagtgtcaccagggtgacgtgtcgtgaactgattatatatttcatccccttttgcaagtttgcaatgatagggtcttgtgtataagaaggtttattaccaagaacagaggatattgtagatactagtatctgacaagaatcccatgactgaaattagtacgagtactgactaattaagaatacagtaattttcgtaatttgtagaacctgtctagctgtatggttatttttgtccacttatatgaaccccttgggcagagaaagttgtctcgtatatatgtatagacaaattatgt

SEQ ID NO: 22371 - DNA, 1584 bp, Oryza sativa nipponbare
  Clone ID: LIB3477-010-D12_FLI
cgttcgccacactggtgggagtgggaggcctatcgcctgccctcttctccccctcccgccccctctcctgctccagctccacctccgtctcggccccgttcatcctccgcgccggcggcggcggcgacgcccggcggcatggcctccgacgcctcgtcaccccactgagagggagcgcctgcaggggagagagtacgaactcacgtgtactccagtgtgccaatgaggctaatgtggtgaccgaggatgacattgtgaacgatggtatcgatgatgaaaccgcttccgatgctgaaatggatgaggatgctgaagcaaatggtgatgagtcgtcaggcactgatgaagatgcttctgtctcctggatagagcagcagcctcttccttatccttcagtaagtacacaaataccaatttgtggttttgcacagagtagtagtgacaactgtgtgatgggaaatgtaggatgccctagagccatacatcagcaaggagacggtggaacagcactggggagttcatcagaacattcacgtcgagaggctcaatggcatgattggtggcagtgagtgggaggggatgtcgctggggcagatgatgctatcctccttcaatgagggcagggaggcaccccatccccccttcttccatgctgcacagggactttggatcctatgatggcatgattcgacaatttatggatgctgcatcaactcaatttggttctggatgggtttggctttgttacaaaacaagcaagttgcctcatgtgaaatcaagaagcccaatcccatctgataattatggtagactggtcatctcaaagtctccgaatgccatcaatcctcttgtctggggtcactctccactccttgcaattgatctttgggagcatgcatactacctggattatgaggatcggagatctgactatgtctccacatttctagagaagcttgtgtcatgggaaactgttgagtccaggcttaagaaggccgtacaacgggcagtagaaagagatgaatatgttagcacaaagcatataaggaagcaacttttagctcgggcaaagagccaaatcagagctatgcctcagcaggtcaatggggatgcaagagagcagaccagcggtcaagagaagtccctaggggtgtgacaacggagccaagtaagctacggcaggtgggtcatgttgccgagttgaaccatggggatgatggacttgtaacacaggaagctagagcagctgatcaatcttcaaggtagcagtatccgaagattgtatgcacatactgtgggcaaccctttgcttaatagcaaatgttgtcgtacaggcagcttcacagtttctgtcgctgtcgatgaatagatctgtagttcgtgacactgcagcaaatacaagtcacaaacccagagtcatgtgcgagctaaattttgataggagtaattaggtttgagtatcatagagatagacaagaattagtcacttggagcaaatgagcctgacatcttgtattcctgtgctgtccatgtttgaatcctgaacttctgattgacaaaccaaagaaaattgtagttccgaag

SEQ ID NO: 22372 - DNA, 1119 bp, Sorghum bicolor
  Clone ID: LIB3478-001-F8_FLI
tgcgtccctgcaggcgtcgccaagtttgatccggcgacggggaagcagttcaagtccccggccaagacgctgtcctacaccaactacttcgccgagtctctgatcgcggaggcggagcaggacagcaagatcgtggccatccacgccgccatggggggcggcacggggctcaactacttcctccgccgcttcccgagccggtgcttcgacgtcgggatcgcggagcagcacgccgtgacgttcgcggccggcctcgcctgcgagggcctcaagcccttctgcgccatctactcgtcgttcctgcagcgcggctacgaccaggtcgtgcacgacgtcgacctgcagaagctccccgtcaggttcgccatggacagggccgggctcgtcggcgccgacgggcccacccactgcggcgcgttcgacgtcgcctacatggcgtgcctgcccaacatggtcgtcatggcaccgtccgacgaggccgagctctgccacatggtcgccaccgccgccgccatcgacgaccgcccgtcctgcttccggtacccgagaggcaacggcattggcgtcccgttgccgcccaactacaagggcactcccctcgaggtacgtactgcacatacattggtggtcacttttgctgattttattatcaaatcggggatcttcaatcaattttgttaatcggcattcgtatataatttaggtcggcaagggcaggatcctgatggagggcgaccgggtggcgctgctggggtacgggtcggcagtgcagtactgcctggccgcggcgtcgctggtggagcgccacggcctcagggtcaccgtcgccgacgcgaggttctgcaagccgctggaccacgcgctgatcaggagcctggccaggtcccacgaggtgatcatcaccgtcgaggaaggctccatcggaggcttcggctcgcatgtcgcccagttcatggccctggacggcctcctcgacggcaaactcaaggcaagttacgacgacgatacctgctccctcagtccgtcgtcgccctaatgataatgaaacattcgttctgaactccatcgtcagttcaggctgacaagtgatgaactcggcttttgtttgggtggtgcagt

SEQ ID NO: 22373 - DNA, 1594 bp, Sorghum bicolor
  Clone ID: LIB3478-004-F2_FLI
gcagagtgataagcaagagcaaattaagcttctcactcatcatcagcacctggcctgccattaattacctagcagctagctagctaaggtagccatgaaggtagagcgcgacctccacatgagccgcggcgatggcgaggacagctacgcctccaactccaggctttaggagaagtccatactgaagacgaggccggtgctccacaaggccgtggcggcggcgcacgcgtcgtcgctctcctccggcggcggcgccatggtcgtcgcggacctcggctgctcgtcggggcccaacacgctgctcgtcgtctccgaggtgctcggagccgtcgccgacaggcgagaggatctggcaatggccgctggcgcccaaccgcagcacgtgcagttcttcctgaacgacctgcccgggaacgacttcaacctcgtgttccaatccctggagctgttcaagaagctggccgtcaaggacaagggggacgcgctgccgccgtactacgtcgccgggctgccgggctccttctacacgcggctgttcccggaccgctgcgtccacctcttccactcctcctactgcctcatgtggcgctccaaggtccccgacgagctcgccggaggcgccgtcgtcaacgagggcaacatgtacatctgggagaccacgccgccggcggtggtggcgctgtaccggaggcagttccaggaggacttctcgctgttcctcaggctgcgccacagggagctcgtgtccggtggccagatggtgctggcgttcctcggcaggaagaacaaggacgtgctccatggcgaggtcagctacatgtggggcctcctcgcgcaggctcttcagtcactcgtcaaacagggacgtgtggagaaggagaagctggactccttcaacctgccgttctacgcgccgtcggtggacgaggtgagggacgtgatcaggcagagccaggcgttcgacgtcacccacatccagctcttcgagtccaactgggatccgcacgacgacatggaggacgacgacggcggcctcgtgctcgacggcgtccagagcggcgtcaacgtcgccaagtgcatcagggccgtgatcgggccactcatcgcgcaccacttcggcgaccacgtactcgacggcctcttcgagctctatgccaagaacgtcgccgtgcacctccagaaagtgaagaccaagtaccctgtcatcgtcgtttcactcaaggcatcaattagtcgtgcgccaaagaaccaagctaatgacaagtattattcaggtttcacgcacggccagtttatgtagatcgaatctctggcgacatatctgttactggcgagtagttattaccgccggccggtagtacacgcgtactgtatgcatgcagaattaatctatgaaataaagtagctcaggtagacaggtacggttagtggcagaacgaaaatttaatttcctccttgctttggatgttgtagtagctagcatgcaggttcaatgtttccacaagcccatctagctagatgtatctggttgattatgtgctgtagtggtaatggtatatgaaaatcgaacggaagcagattgtttggataaagg

SEQ ID NO: 22374 - DNA, 996 bp, Sorghum bicolor
  Clone ID: LIB3478-008-E12_FLI
ggcttcctcgtcaatggcggcttcttctcctccttggccgccgactctcagaggttagctggaaaggtagcggtgatcaccggcggcgcgagcgggatcgggaaggcgacggcagctgagtttgtcaggaacggggcgagggtcatcatcgccgacgtccaggacgacctcggacacgccgtagctaccgagctgggcgccgacgccgtgcgatacacccgctgcgacgtcacggacgaggcgcaggtcgccgcggccgtcgacctcgccgtccagctccacggccgcctcgacgtgatgtacaacaacgcgggcatcggcggcgacatggcggcgtcctcgctgggcgccatcgacctggccgacttcgaccgcgtcatggccgtcaacgcccggggcgtgctggccggcgtgaagcacgccgcgcgcgtcatggtgccgcgccgcaccggcagcatcatctgcaccgccagcaccaccgctgtgctgggcgacatggcccctacgccctactgcgtctccaaggtggcggtcgttggaatcgtgcgcgccgtggccggacagatggcgcgctccggggtgcgcgtcaacgccatctccccgcacgctatcccgacgccgctggcgatggctactatggcgcagtggttccccgataggagcgtcgaggagcatcggcggatcctcgagagggacatgaacgagatggccgggcctgtgctggaggcggaggacattgccagggcggcggtttacctggcgtccgacgaggccaagtacgtgaacggacagaatctggtcgtcgacggcgggtacacggtgagcaaagcgctgaacatgccagcccctgcagcacgctgaggggtctctcgttctgaaccccactaagcccttgttcggtttcttggaaggatttctcagccggagtggttcctaggaatggtttgctaatttgtataatcttgatcaaggctgaatggtttcgaggtgtggaat

SEQ ID NO: 22375 - DNA, 1062 bp, Sorghum bicolor
  Clone ID: LIB3478-015-B5_FLI
ggagcagctcctgagcagctacccagcgggccaccgagttaatttagcttactccatatacacactgctactaagattgctactagctagcatggcggcaagttcatggtcgtcgtcttcatcctgcacatcgtcgttcgggtccctcgacgacgatgtcgtctgcgtcatcaagtcggattccgtggctgccgcagccgttgcggagggaagcgtcaagttcctgtgcagctacggtggtaggatcctgccccgccacaccgatggcacgctgcgctacgtcggcggcgacaatcgagttctctccgtcgaccgacccctccggttttacggtgcataatatttctgccgaccaatctatacacaagtccatcccctgaattcaatcctttaatttctctgacttcatttgggttacctgatcgtgtctgtcggcagacttgcagcggaagatgagggaattgtgcggctgggaagcgtacctgcggtgccagctaccgacggaggacctggacgcgctcatctccgtgacgtgcgacgacgacctcgccaacctgctccaggagtacgacgaggccagcaaggaccgtctccagtcgctcaaaatccgggcgttcctgttcccgaggacgccggcgcctgcgtcctccataccgcgtagtagcccgccgtcgtccccgtcgtcgcattccagaccgtcaccgagtgctcacctccacaggcgaaacacttcccgggcgcccgcagccggcgtctcgctgacgtgcgcgccgcggtggtgggcagcgccccgggcctctcgccaggcacaagcgcaccagtcgcagaactacgacctgcgtagccttgacgaggagcggtcgcacccgcaccggtaccttgtccaaaatggcaggcacttgcaataacgtgacatgagcagctcctccggaccatgggatgagcagatcggagtgtaatacagtgtacagtgcgcgcgcgtgatgcctgatgcgtgcgcaccgtgcacgcaacgtctgacatgtactaccatgctgatcctgtgcacgtccatgtgttatc

SEQ ID NO: 22376 - DNA, 812 bp, Sorghum bicolor
  Clone ID: LIB3478-015-D8_FLI
ggcattggtggtagctcaaggtacttggctaagaaatacggagcacagtgcaaggggatcacattgagccctgttcaagctgaaagaggaaatgctcttgctacagcgcaggggttgtcggatcaggttactctgcaagttgctgatgctctggagcaaccgtttcctgatgggcagtttgatctggtatggtccatggagagtggcgagcacatgccggacaagagaaagtttgttagtgagctggcacgcgtcgctgctcctggagggacaataatcatcgtgacatggtgccataggaacctcgaaccatctgagacttcgctaaaacccgatgaactgagtctcttgaagaggatttgcgatgcgtactacctcccagactggtgctcaccttcagactatgtgaacatcgccaaatcactgtctctggaggatatcaaggcagctgattggtcagagaatgtggccccattttggcccgctgtgataaaatcagcactaacatggaagggcctcacctctctactgacaagcggatggaagacgatcagaggggcgatggtgatgccgctgatgatccaaggttacaagaaggggctcatcaaattcaccatcatcacctgtcgcaagcctggagcagcgtaggtgaccaaggggcagaagttactgtcaaagcacctctgctaagtccaataatgtagatccatggccccatcaccgtctattgtactgtactgtactgtaccagaatgaacagtctcctgggacatgttttccaattgccatgacatgtcaaatgatcttctacc

SEQ ID NO: 22377 - DNA, 1398 bp, Sorghum bicolor
  Clone ID: LIB3478-016-E3_FLI
gcagctagcaatcgcctagctagctagacccacactgtgatcacagtacacacctgcacgcggccatggtcgtcatgggcaaggaggaggagaagcaccagcagctgaaggaggaggaggtccaagaagaagaagcacgagtcgtcgtcctccagcaggacatgacggcggacgaggcggcgctggtgcagaagatctccggcctggccgcggccatcgcgaagctgccgtcgctgagcccgtcgccggaggtgaacgcgctcttcaccgccctcgtgacggcctgcatcccgcgcagcacggtggacgtggagcgcctgggccctgagctgcaggccatgcgcgcggggctcatccgcctctgcgccgacgccgaggcactgctggaggcgcactactccgacctgctggcgggcttcgacaacccgctggaccacctcacgctcttcccctacttcagcaactacctgctgctgagcgagctggagcacggcctgctggcgcgccacgtcccgggaccgccgccggcgcgcgtcgccttcgtcggctccggcccgctcccgctcagctccctcgtgctcgcggcgcgccacctcccggccgcggccttcgacaactacgacatctgcggggacgccaacgaccgcgcgcgccgcctcgtgcgcgccgacgcggcgctcgccgcgcgcatggcgttccgcacctccgacgtggccgacgtcaccagggacctggccgggtacgacgtcgtcttcctggcggcgctcgtgggcatggccgccgaggagaaggcccgcgtggtggagcacctcgggaggcacatggcgcccggcgccgcgctggtggtgcggagcgcgcacggcgcgcgcggcttcctgtaccccgtcgtggaccccgaggagatccgccgcggcggcttcgacgtgctcgccgtgcaccacccggaaggggaggtgatcaactccgtcatcatcgcgcgcaagcctgtcccgcccgtcgacgcgcacgccgtcgccgtcgccgccgccggggtggggcacgcgcacgcgcacgcgcacggcgccgtgctcagccggccctgcctctgctgcgagatggaggcccgggcgcaccagaagatggaggaggtggccgtggagcagctgccgtcctaggcactggcacaccacaagatggatggattgccccggccggccacccattcagttgcatctacctgatcgatcgagtaaacagtaatcccctactactactatgtctacgtgtgtccacaccacatgcatggtcataatctgcaggttgaccttgctactggctggtgtattgttgccgtgattatactaaggtcccgtttaacaaggagtcggagctggtgaaaggaaaaatagtgaagagatt

SEQ ID NO: 22378 - DNA, 1599 bp, Sorghum bicolor
  Clone ID: LIB3478-020-C3_FLI
gacgttcgggacagttttggtagcctgtcaaggcgcagctttgaggtgactatcgctggcctttctggactcaccgtgcatcatagggggaaatctcagagcacggtgcatgaggtctgtgatacggatctcataatccaggagagccgttgggctaatctccctcctgagctcctccgcgatgtgatccggaggctggaggccagtgagagcacctggccaaatcgcaagcatgttgtgtcctgcgctgctgtttgtcgagcatggagggagatgtgccgggagattgtgctgagcccggagttttgtgggaagcttacattcccagtttctctaaagcagcccgggcctcgagatggaatgattcaatgtttcataaagcgagataaatcaaagtccacatatcatctctacttgtgcctcagcactgctgtacttatggagaatggcaagttcctcttatcagctaaaaggaaccgcaaaacaacctgcacggagtatgttatctcaatggatgctgagaacatatcgagatctagcagcacatatattggaaagctaaggtcaaacttcctcggcaccaaatttatgatctctgacacgcagcccccttataatggggctgtagtccctcatgctggccggacaagccgaagattcaactccaagaaggtctcccctaaggtgccaactggtagctacaacatagctcaggtgacatatgagctaaatgttcttggcacgagaggccctaggcggatgcactgcgtcatgcactctatacccgcctccgcagttgagcctggtggcatagtccctggacagcctgagcagattctgccccgggcattagaggagtccttccgcagcaccacctccttctccaagtcatccatcatggaccggtccatggatttcagcagctcccgtgacttcagcagcgcccgcttttctgacattgccggaggcgccgccatagctggcgatgaagagggacagaacaaggagaggccgcttgtgctccgcaacaaggccccaagatggcacgagcagctgcagtgctggtgcctcaacttccgtggccgtgtaaccattgcctcggtgaagaatttccagctgatcgctgcgccaagcccggcccctgcccctgctgccagggctccaaccccatcgtcacaacctgttccgcaggaccaagataagatcattctccagtttggtaaggtggccaaggatatgttcactatggactaccgctacccgctctcagccttccaggctttcgccatctgtttgagtagcttcgacactaaactggcctgtgagtaaatatagaccccgtggaagcaatggaacagcccggagctggcaatgcacaaggggagagatgcatttagccctaggattttagtttgatgcttttgcaatttgttgttttctctctgatggttgtattctgcttcctgttaacctggaaccggacctctaggctctaagcatgtatgttttcacctgctgcaccatggtaggtgccatttcgtgtaatgtgcatgagattcagcccttaacgtgaatgaattgttacggtgttgatttctc

SEQ ID NO: 22379 - DNA, 1059 bp, Sorghum bicolor
  Clone ID: LIB3478-023-A4_FLI
gaccatttacctgagtgctctgctctcgctggagcccgtggtgcacgctcatggaggccgccattcccaatcccagtgccctgaaaacaaggatcgccgtggtcaccggcgggaacaaagggatcgggctagaggtttgccggcagctggccggcgacggcgccaccgtcgtcttaacagccagggacgagacgaggggcgcagccgctgcagagaagctcagggaagcagggctctccaatgttattttccatcagctggagattactgatgctccgagcatcgctcggttgtttgagttcctcaagactcgttttgggaagctagacatactgataaataatgccgcaattggtgctgttgagtacgtccaagatcctgccgacagtccagcaagcgaggaaaagttcagtggcatggatcagggccaaaggcttgaatgcatgtttaaaggtgtccgggagacctacgacgctgcaagagaaggcgtgaagaccaactactatggcgtaaagcatgtgattgaagccttactgcctctgctgcaggcttcctccgatgggaggatcgtcaatgtctcctctgaatttgggctgctaaggctaatcaacaacgaggagctaaggcaggagctgaacgatgtggagaagctgaccgaggagaggctggacgaggtcctggccacgttcctaagagacttcgaggccggcgaggtggaggcgcgtgggtggccgatggctttctcggcgtacaaggtgggcaaggtggccatgaacgcgtactcgaggatcctggcaagaaggcaccccgaactgcgcatcaactgcgcgcaccccggctatgtgagcaccgacatgaccatccacaccggacccctgacgcccgaggaaggcgcggccaacctggtgaaggtggcgctgctgccggaaggcggcccgaccggcgcatacttcgcctggggagtggaggcgccctttgtgtgacaaaagcaccatgcatcgttaatgttgtgttcgttgttctccaactgcctgctatcaacgtttactgctgaaagtt

SEQ ID NO: 22380 - DNA, 1238 bp, Sorghum bicolor
  Clone ID: LIB3478-026-A12_FLI
gcgccgacgccgaggcactgctggaggcgcactactccgacctgctggcgggcttcgacaacccgctggaccacctcacgctcttcccctacttcagcaactacctgctgctgagcgagctggagcacggcctgctggcgcgccacgtcccgggaccgccgccggcgcgcgtcgccttcgtcggctccggcccgctcccgctcagctccctcgtgctcgcggcgcgccacctcccggccgcggccttcgacaactacgacatctgcggggacgccaacgaccgcgcgcgccgcctcgtgcgcgccgacgcggcgctcgccgcgcgcatggcgttccgcacctccgacgtggccgacgtcaccagggacctggccgggtacgacgtcgtcttcctggcggcgctcgtgggcatggccgccgaggagaaggcccgcgtggtggagcacctcgggaggcacatggcgcccggcgccgcgctggtggtgcggagcgcgcacggcgcgcgcggcttcctgtaccccgtcgtggaccccgaggagatccgccgcggcggcttcgacgtgctcgccgtgcaccacccggaaggggaggtgatcaactccgtcatcatcgcgcgcaagcctgtcccgcccgtcgacgcgcacgccgtcgccgtcgccgccgccggggtggggcacgcgcacgcgcacgcgcacggcgccgtgctcagccggccctgcctctgctgcgagatggaggcccgggcgcaccagaagatggaggaggtggccgtggagcagctgccgtcctaggcactggcacaccacaagatggatggattgccccggccggccacccattcagttgcatctacctgatcgatcgagtaaacagtaatcccctactactactatgtctacgtgtgtccacaccacatgcatggtcataatctgcaggttgaccttgctactggctggtgtattgttgccgtgattatactaaggtcccgtttaacaaggagtcggagctggtgaaaggaaaaatagtgaagagattaaaaaaaaaaaacagagtgcaccaagaagtcaaggcctgagatctagcaaacagagcctaatttgtccgttaatgttacatgtgtgtgtgagtgatgatgatcgagtggttaatttgaagtaactcccgtgcttaatttgtcagtttgggagtattattagcacgtaaatgcataaatacaggccattccggtccattggttg

SEQ ID NO: 22381 - DNA, 1012 bp, Sorghum bicolor
  Clone ID: LIB3478-033-D4_FLI
gcagctcctgagcagctacccagcgggccaccgagttaatttagcttactccatatacacactgctactaagattgctactagctagcatggcggcaagttcatggtcgtcgtcttcatcctgcacatcgtcgttcgggtccctcgacgacgatgtcgtctgcgtcatcaagtcggattccgtggctgccgcagccgttgcggagggaagcgtcaagttcctgtgcagctacggtggtaggatcctgccccgccacaccgatggcacgctgcgctacgtcggcggcgacaatcgagttctctccgtcgaccgacccctccggttttacgacttgcagcggaagatgagggaattgtgcggctgggaagcgtacctgcggtgccagctaccgacggaggacctggacgcgctcatctccgtgacgtgcgacgacgacctcgccaacctgctccaggagtacgacgaggccagcaaggaccgtctccagtcgctcaaaatccgggcgttcctgttcccgaggacgccggcgcctgcgtcctccataccgcgtagtagcccgccgtcgtccccgtcgtcgcattccagaccgtcaccgagtgctcacctccacaggcgaaacacttcccgggcgcccgcagccggcgtctcgctgacgtgcgcgccgcggtggtgggcagcgccccgggcctctcgccaggcacaagcgcaccagtcgcagaactacgacctgcgtagccttgacgaggagcggtcgcacccgcaccggtaccttgtccaaaatggcaggcacttgcaataacgtgacatgagcagctcctccggaccatgggatgagcagatcggagtgtaatacagtgtacagtgcgcgcgcgtgatgcctgatgcgtgcgcaccgtgcacgcaacgtctgacatgtactaccatgctgatcctgtgcacgtccatgtgttatcatccactggtgtactagatcgctttgttttttttgcaacatgaaaatgttatggaggat

SEQ ID NO: 22382 - DNA, 1051 bp, Sorghum bicolor
  Clone ID: LIB3478-058-G8_FLI
cttattgcaggtggtccttttgtgcttccccttgcacacaaacacaatgtgaaaattcttcctgctgattctgagcactctgcaatatttcagtgtatacaaggcttgtccaaaggagcacttcgtcgcattattctaactgcatcaggtggtgctttcagggactggccagttgacaggctgaaagatgtaaaagttgctgacgctttaaagcatccaaactggaatatgggaaagaagatcacagtagattctgctactttattcaacaagggtttagaagttattgaagcgcattatttatttggtgctgaatatgatgacattgagattgtgatccacccacagtctatcatacactctatggttgaaacccaggattcatctgtcctagctcaattgggttggccggatatgcggataccaatcttatacaccttatcgtggccagatagaatctattgctctgaggtcacatggccccgccttgatctttgcaagttgggttcactgacgttcaaagctcctgacaatgtaaaatacccatcaatggacctagcgtatgcagctgggcgggctgggggcaccatgacaggagttctgagtgctgctaatgagaaggccgtggagttgttcattgatgaaaagattagctacctggacatattcaaggtggtggaacttacatgtgacgcgcatcggaacgagctggtaagaagtccttcactcgaggagatcatccattatgatctgtgggcgaggagatatgcagctagcctacaaccatcttctggcctgagccctgtccctgcataataatatgtagatatactcctacatattgtcatgacctcgtgtacaggagttctaagatatcaagtgtgtggctcctgtttccatgttcgatttccaggagctagatgaagcattaggggacatctaggtcgccctcctgaatgtaaatcatgcctccacagtccacacgaataaaatgcatctgttccatgtgatttttttttatgggtgaagtgttcgaattcgggtgggaatc

SEQ ID NO: 22383 - DNA, 1155 bp, Oryza sativa nipponbare
  Clone ID: LIB3479-003-F5_FLI
aagttccattcaaaggaaatgcagccctcccaacaaaatcaaacgagccagctgagcctgaaggcactggtccactagcagtgttgaaaggcttcaggaacttacctactgggatgccttctgtgcttattgtgactggccttacctggttgtcttggttcccattcatcctctacgacactgactggatgggccgtgagatctaccacggtgacccaaagggaactgatcctcagatcgaggctttcaaccagggtgtcagggcaggtgcatttggcctgctactgaattcgattgtgctaggattcagctcattcttgattgaaccaatgtgccggaaagtcgggccaagggtggtgtgggtgacgagcaatttcctcgtctgcatcgccatggctgcaactgcactgatcagcttctggtcactcaaggacttccatggaactgttcagaaagccatcactgcagacaagagcatcaaggctgtctgcctcgtcctctttgcgtttcttggagtccctctcgccgttctgtacagtgttcccttcgcagtgacggcgcaattagcggccactagagggggtggccaagggctctgcaccggcgtcctcaacatctccatcgtcatccctcaggtggtcatcgcgctgggagccgggccgtgggacgagctgttcgggaaggggaacatcccggcgttcggcctcgcctcgggattcgcgctcatcggcggcgtcgccggaatattcctgctgcccaagatctccaagcgccagttccggtcggtcagcatgggcggcggtcactgaccgccccgctctcgccgccggctgcggcggcggcggcggccggagcagcgccgccggaagtggtgagctttgtagttctcgtttgcaatggatcaaaggagccccctctttttttttttacatagggtaattaattaattaaggctgttaattaggaaggggtgaggtggccctgcagctggggcccacgctttgttgccacctcggtagaagagaataagcagatcatgcagataatatggaactgtaaaactgttttgtgttgtgtgtgtgtgcagtgtgcttggtaattagtgtgtaatgaatggtcaggagaagtgcagtgaactaagtgaaagtgagcttc

SEQ ID NO: 22384 - DNA, 1242 bp, Oryza sativa nipponbare
  Clone ID: LIB3479-004-E11_FLI
aaccagctgagctgagcgaccaagaactcgggacgactcaggagtcggaggagacaatctcactctctccctctcccctctcctctcccaaaatccacgccgagcccgccaaatcctccccccggtgcgactcgccacggatcgcgcgccgccggcaatgggggccgccgcctgcgacgccgccgtcgaggagctcactcgcctcctggaccaagtcgaggagccgctgaagcagacgttccagaatgtgcaccagggctatccaacagacacactagtgcgcttcctaaaagctagagagtggcatgtttcaaaggcttgtgatatgcttgtggattccttgaattggaggatacaaaatgaaattgatagtatactggagaaacctataattcctgtagatttatatagatcaatacgtgagacacagcttgttggattatcaggatactcaaaggaggttcattactatgtgcaatctcatattcaaatcaatgagtaccgtgaccgtattgttttgcctatggcatcaaagaagtttgggcggcctattagcacctgtataaaggttctagatatgactggattgaaattgtcagcactcaaccaaatgaagattttgactgcaatatctactgttgacgatctgaattaccctgaaaaggcagagacctattatatagttaatgctccatatatattctcggcatgttggaaggttgtgaagcctctcttgcaagagaggacacggaagaaggttcacgttttgcatggttgtgggagagatgagcttctaaagattatggaccactcctcccttccccatttctgtcagcgggaaggctcaggatcatctaaaaattcgtcgaacgacgtcaacaattgcttctctctcgatcatcctttccaccaagagctctaccactacattgacgagcaggcattgaaccaggagctcatcaagcagggctccctgcatgtgaatatccctgaccaagatcctgaggatgccaagatcgtcgaggtcatcgaagccgagttccataagctcggcgagcagaacggttctgtcaatggcgaacacaaagaatgaacaggtggtcgttgaagatgatcagctgccatagcttacctacaacacctttggtggtttgcttctgacgattcttttctgtgtcgctgtgttggcatggccacccctgttgttttcctgggctataggtgttacagatttacaatagc

SEQ ID NO: 22385 - DNA, 1062 bp, Oryza sativa nipponbare
  Clone ID: LIB3479-006-B3_FLI
caagaagaaatttctctccttgtagaaacaagcctagagagtactatggagcagaggaaatttttgttgtgcctaattcttggcttacttgcgacttcaggacctgccaagaccgtcaatgctgactcgccctttgatttttattatctcatcctcatgtggcctggagcatactgcactgacagcgagtatggttgttgcgtgcccaagtatggttacccgtcagaagatttcttcgtcaagagcttcatgacctttgactcgtcagagaacacagctgttgtcaggtgcaactccgacaatcctttcgacattaacaagctagactcaatcgagaacaacctgaaccactactggagcaacatcaagtgtcctcgcaccgacggcgtgaactcatggaagagcgagtggaacagctatggcgtctgctccggcctcaaggagttggactacttcaaggccggtctccagctcagaaagaacgcagatgttctctctgctctcgctgaacaaggcatcaagccggactaccaactgtacaacacggcgttcatcaagtgggcagtgaaccagaagctgggtgtgacaccaggagtgcagtgcagggacgggccatttgggaagaagcagttgtacgagatctacctctgcgtcgacaaggacgccaagagcttcatcgactgccctgtcctgcccaacctcagctgccctgccgaggtgctcttccatccgttccacacctggatgctcaacaccacatcggctgccaacatcgtgatgcccactgaaactgtgctggcctaattaagagcctttaatttgctagctaagctgccatgatctacttgatcaacctgtcctaagagcatgtagcatatgcttagcttgttgctttgggtgaataatcgcgcaacttttatacattgttgtgccctctgaataatatgtgcagtactatatatgaagtattgtaccgcatatgttatgtattacatgtgcaggtcttgtgcacacctgtgaggtgaatggatatattatgaatatataacgtgttgtattatg

SEQ ID NO: 22386 - DNA, 652 bp, Oryza sativa nipponbare
  Clone ID: LIB3479-009-D6_FLI
gtcaccgacaatctccagaggtgggtcatcgaggtcgcgggggctgcgggcacgctctatgccggagagacataccaattgcaggtggacttccctgagcattaccccatggaggctccccaggtcatatttcttcatccagcgccaatgcatccgcacatttacagcaatgggcatatctgtttagatatattgtatgactcgtggtcaccggcgatgaccgttagttctgtttgtatcagtatcttgtccatgttgtcaagctcaccagcaaagcaacgtcctgccgacaatgatcgctatgtcaggaactgccgcaatgggaggtcgccgaaggagaccaggtggtggtttcatgatgacaaagtgtgattggttccaacttccggttggcttctcctcagcaacccttttacccgccaccctacctttacatggcgtcctccatgggagatgatttaggcatatttttaagcgatctatttgaccgcaaattaacatgcctttgtggtttgtaaatgaatgtgaacctgtatcgaatcctagacttattaattactataccttggatatatagaataattacatgtgtatcttgcttattgcccaaaatagaggcatcaaatgcagtcaaaactttggttttctgggt

SEQ ID NO: 22387 - DNA, 688 bp, Sorghum bicolor
  Clone ID: LIB3480-019-F3_FLI
ctctacttctacttgcagcaattcgacagaagcacggtatttcgctgcagttgttccactcttgaactccataaggcttctgatatatggactccgtctctacactgatgaagctctagtaaaatcagtgacacgtgaaggaaaaccagagtaaatcctattgactgaaaaaaccgtatgatcctttagcttgctgctctgacaatgatgactttgcttctttacagggaattgctgagaggtccactgtattatgtgttggtgctgttgttcagtgttttagtcttctggcgggagtcccctgttgggattgtctctttgtcaatgatgagtggtggcgatgggttcgctgacattgttgggagaaggtatggctcagtgaagctgccattcaataagaagaagagctgggccgggagcatctctatgttcatttctggttttctgctgtccgcgatgatgatgttctacttctcaagccttggttacattgatgttatttggcaggaggcacttggtaagctggcgcttgttgcactggcagcaaccgtagtggagtgtattcctgtgactgaagttgtagatgacaatatatctgttcctttggccaccatgctggtagcttttctattgtttagctccaacgcacaatgattaatcaatactactagtactagtagattatttg

SEQ ID NO: 22388 - DNA, 776 bp, Sorghum bicolor
  Clone ID: LIB3480-041-B2_FLI
ccgacagcaacaacaacacggacgtgagcggcggcggcggaggcgggttcgccgcggacgagcggaagcggaagcggatgctgtcgaacagggagtcggcgcgtcggtcccgcgcgaagaagcagcagcggctggaggagctggtggcggaggtggcccgtctgcaggcggagaacgcggcggcgcagtcccgcatcgcggcgttcgagcgcgagttcgccaaggtggacggcgacaacgccgtgctgcgcgcccgccacggggagctgtccagccggctcgagtcgctcggcggcgtcctggaggtgcttcagatggccggcgccgccgtcgacatcccggagatggtcactgaagaccccatgctccgcccctggcagccgtcgttccccccgatgcagcccatcgggttctgagcctgcgccggagccaagtcaagacattggccgtggtttatacagtgtcgccatggtcagtggtcacctaccgctgctatctactactcctacatgcccccaagtgctagttttgtgtcgtcgtttttctgcactctgcagcagccttggctgcttatcatggtttgcttcttgttagtgttaatctagactgttatcaagaatgatcaatttgtcgtgtggttatgaacttgtgaatgtagcgatgtgctctggcggtgagacattatcaagaatgtataagtgtgccggagaacatcatcgttctgtggttgtaatatctttgcctgtgaaattaaatggacctatatatatgtgttt

SEQ ID NO: 22389 - DNA, 1456 bp, Sorghum bicolor
  Clone ID: LIB3481-015-E6_FLI
ggtctctctccatcatctccatctcttgctatcaaatacaacacgattacagctcttgcttctccttttttgtcatgctgttataagttaacgtacgtacgcgtgtctgctctctgctggagactatagagtggtgtgcagagcttgctgaaacctctggtggaggaggctatagccgccctgtgcagaccggccgtgccatgccgcgtcggggtggcagacctcggctgctcctcgggccctaacgcgcttgctctcgtgtccgccgccgtcgactccctgcgccaccatcaccgccgccgtcgtcttgggtgccagtcgtcatcgtcaccagagcccaaccgccgccgacgggcggagatcagcgtgtacctcaacgacctcccggacaacgacttcaacctcgtcttcaaggcggtgccggcgttccttgagaagcacatgggagcatcaggcggtgacgacgacgacggcgatggcgatgggccgctggtgctggtgttgggtgcgccggggtccttctacggccgcctcttcgccgcccagtcgctgcacttggtgtgctcctctttcagcgtccactggctctccaaggttccacaggaactggcggatggcgtgctggtgaacaagggcaacacatgggcggggagaacgagcacgccggccgtcgccgccgcctacggccggcagttcgagcatgacttgtcgctgttcctgtcgtcgcgggccgaggaaatcgtgccaggcgggtggctggtcctctcggtcgccggccggccggggaaggacctgtccagccaggaccggcagtcggagttcaccgccgaggtgctctgcgacatggcggcccgtggcgtggtcaccgcggaggacgtcgactcgtacaacgtccccttctatgccccctgcgccgacgagctgcgcgccgcggcggagctggaggggtcgttcgaggccgtccgcgtggagagccacgccgtcctcacctgcgacggcgacccggccaagagcgccgccatggcgaggtctctccgcgtgatcagcgagtccacgctggtccggcatttcggccgggtggacgacgtcgggggcgagtttgccagggcggcggaggcgcgctacagaggccctcccgctccggtcatggaaggcgtcgttcacgtcctgtccctcaggagaaaataattaagctcaggatcgtcacgtccatggatgtatgcaagacatggccgacgacgtcgagaggctcgctcatcgtcaccatggaaatggccgatgctgacgccaatggacagcgtgcatagaattttcttccctagaggcgtgagggtataagttaaaatttcatgcatgtctcgttaccttctttgtttcttcactttaagtctctgtaatttgtactctgaatttcaacaaagttccagtaggggggtcaaacccctcctgttccatc

SEQ ID NO: 22390 - DNA, 533 bp, Sorghum bicolor
  Clone ID: LIB3481-019-E6_FLI
ctgtattatggagaacctcaccagttgctatagcacttatatgcaacttatgtgctggggatggtatagctgatgttgttgggagacgcctaggtaaagaaaagcttccatacaatcccaacaaatcatatgctggaagcatagcaatggcggtggctggttttctggcctcagttgggtaatgtctgacctttactgaattctcagttgcatcaacttatttttaatcattcggtctcatttattcaggtatatgcattacttccacacttttggttttattgaggaaacatggtacatggctttaggcttccttgtggtatctgtagctgcaacactcgttgaatcacaccccatcagcacagaactggatgacaatttgactgttcctttaacatcattcctagttggtagcctcatcttttgatgtttaggctcaaaggacatcttagatgtttctccatcatgttgtaattatgtaaaacgttactaaaataatactataattgtgagaatctctacctagagtttgg

SEQ ID NO: 22391 - DNA, 793 bp, Sorghum bicolor
  Clone ID: LIB3481-020-F12_FLI
atcctgtgaactgcaatgagatttgcagtatactattgtgacacaggagaggagctatacggtgccaaatgctaaaaactcagcaggaaacttgttcatataagcgtgggcctggtgttcttgctttttttggcctctttttagctctggatggtatgctcctttccttgctgcgctagcaccaggggtcaacgttataaggatgcttctactggggctgggacttatgaaaaatgaggctatggttaaatcaataagccgctctggagattacagggaacttctcaagggcccactgtattatgctactactataacttttgccacgtctgtattatggagaacctcaccagttgctatagcacttatatgcaacttatgtgctggggatggtatagctgatgttgttgggagacgcctaggtaaagaaaagcttccatacaatcccaacaaatcatatgctggaagcatagcaatggcggtggctggttttctggcctcagttgggtatatgcattacttccacacttttggttttattgaggaaacatggtacatggctttaggcttccttgtggtatctgtagctgcaacactcgttgaatcacaccccatcagcacagaactggatgacaatttgactgttcctttaacatcattcctagttggtagcctcatcttttgatgtttaggctcaaaggacatcttagatgtttctccatcatgttgtaattatgtaaaacgttactaaaataatactataattgtgagaatctctacctagagtttggag

SEQ ID NO: 22392 - DNA, 1220 bp, Sorghum bicolor
  Clone ID: LIB3481-032-D12_FLI
cacgattccggggagctgttcgcggtcaagtccgcgccggcgtcgtcggcgggcgccgcggagctgctgcggcgggagcgggggatcatggcgggcctccgctcgccgcacgtcgtcccttgcatcggcggccgtggcgggcgcgacggctcgtaccagctcttcctcgagttcgcgcccggcgggtcgctggccgacgccgtggccaggaatggcggcgggcgcgggctcgaggagcgcgccgtcgcggcgtacgcggccgacgtggccgcgggcctcgcgtacgtccacggggcagggctcgtgcacggcgacgtcaagccgcggaacgtcgtcatcggtggcgacggccgcgccatgctcgctgacttcgggtgcgcgagatcggcggaggccgtcggcgggccgatcggaggcacgccggcgttcatggcgccggaggtggcccgcggggaggcgcagggaccacccgctgacgtctgggcgctgggatgcaccgtcatcgagatggccaccggccgcgcgccgtggcgcggcgtggacgacgtgctcgccgccgtgcgcctcatcgggtatacgcacgccgtcccggaggtgccccggtggctctccgcggacgccaaggacttcctggccagatgcctggcgcggcgccccagcgaccgggccacggcggcggagctcctcgagcacccgttcatcgcctccgccagcggcatctccaactgccgggcggcgctggacctggacgccgccgccaagggcaggtgggtgtcgccgaagagcacgctggacgcggcattctgggagtccgacagcgacgacgacgagcacgacgtggtgtcggcacagagcaccgccgagcggatcgcggcgctggcctgccccgcttcggcgctgccggactgggactccgacgaggactggatcgatgtgctgtccacaccagccgaagcatcgtcgtccgacgcgacgaacgcgccggcggacgaggaggtcccttacctcgacgacggcggtgccggaaccgaggaagaagtggcgagggcagaggccgccgagtccctcgacattgacgtcgacggcgcccacaatgtaggagaagctgacgcttcacctgatcacgagtggcatctccgtgtcagttcaccctgtgttggtgaaactccatgtaaattactgtgtgacacaaacaatgcaatggatttcgttcttgcccc

SEQ ID NO: 22393 - DNA, 1084 bp, Sorghum bicolor
  Clone ID: LIB3481-037-C7_FLI
ccgccgggaggagcaggtggtcccttcgtggcatgacggccctcgtcaccggcggcacccgcggcatcgggtactaactacgcacaatcaacaggtggcgcatgctggcttgctgtgtaacggtaactgaactccatgtgctcaggcgtgccgtggtcgaggagctggcggcgctgggcgcggcggtgcacacgtgctcccggaacgaggcggagctccgcgaccgcctggccgagtgggaggccgccgccaagaccaacggcggcggcggggtcgtcacgggctccgtctgcgacgtgtcggcgcgtgaccagcgagagcgtctcctccgcgacgtggccgagcgcttcggcggcaagctcaacatcctggtgaacaacgtgggcaccaacttcggcaagccgacggcggagtacaccgccgaggactacgcgttcctgatgtccaccaacctggagtccgcctaccacctgtgccagctcgcctacccgctgctgaaagcccccgccgcctccgccggcaacggtaacggcggcagcgtggtgctcgtctcctccgtgtgcggcggcgtggcagtgtgcacgggctccgtctacgccatggcgaaggccggcatgaaccagctggcgaggaacctggcgtgcgagtgggccggcgacggcatccgggccaactccgttgcgccgtggtacaccaggacgccgctcgtggaaggggacctgtcgcgggggcagtacgtggaggagatcctccggcggacgccgcagcggcgcgtcggcgagcccgaggagatctcgtcgctggtggccttcctctgcatgccctgcgcgtcctacatcaccggacagaccatcgccgtcgacggcggcatgaccgtcaatggcctctaccccagctcatcgccgtcaggactaagctacagtaattaatgaagaaattaaccagcgacgcgtcaaggaatagcttgatgaatgaagaataaagtacttagttattagtaccaataagggggaatacagatgttggataaaatttggagaatatgggcacattattgcacatggatatatagaatttccaactt

SEQ ID NO: 22394 - DNA, 1070 bp, Sorghum bicolor
  Clone ID: LIB3481-040-D1_FLI
gcaccgcgccctcttctccgtagccgagtcccagcccctcacgcccgcgctcctcggcgccctgtcgagtcgagcccgcttctcggccgatcgacagcgaacgcagccccgcgccgacgagagctttgctttcggttgtgtataacgacgacagcaggaggtagataaaaggcgcgcgatgtgcgacgcggcggtggctactgcagcggcggcgcggtacaggggcgtgcggaagcggccgtggggtcggtttgcggcggagatccgggacccggcgaagcgcgcgcgcgtctggctcggcaccttcgactccgccgaggccgcggcgcgcgcctacgacgtggccgcgcgcgccctgcgcggcccgctcgccaggaccaacttccccgcccaccacctccccgcgctcacctcccgccctcccgcggccgtggccgcgcccacgtgcagctccagctccaccgtcgagtcctccagcgggccccgcaccggagtgcccagggcgacgccagcggcggtgcatcgcaggcgtgctgctgcgaagccgcggcccctgcggcaggccgcgcccgccgacgccgactgccacagcgactgcgcgtcgtcggcctccgtcgtggacgatggcgacgacgcctccacggtccggtcgctctcgtgcccgcgcccgacgctcgacctcaacctcccggcgccgctcgacgtcgatgatagccacgagctcgggctctgcacggagctgcggctctgagcgatcggatccacggacggagacgaagcaggggagagataggcggttttgctttggtcttcttttcttgaccgggttctgctttgacttgtcgtgctcgtgagagagcttgtaccagtgctgccctgtactaatggcaatagaattggatgatgattcctgcaacgaattcattcagaggtcagtcagatcgtcgagagtgttattttttccatatctcttgtatttggatctgatattgccattctgtttgtactagaaacatctatctaagagagatgtttacgaatcaacacggatcttgccacaatcttgagat

SEQ ID NO: 22395 - DNA, 1056 bp, Gossypium hirsutum
  Clone ID: LIB3493-005-G12_FLI
aaaacaggcgtctacacatacataggtcaatggccaatttactccgtggcatggtccgtccgcaacgacaaaagatctcgccttgccattggcagtttcctcgaagactacagcaacaaggtggaactggttcagttcaatctctatacatccgatttcacgactgacaatcggttagttttcgatcacccttacgctcccaccaacctaatgttctttccgtccgatgatacctctaatcccgatatgattgccacgtccggcgactaccttcgtctttgggaaatccacgacgatcacattgagcttaagtccttgcttaatggcaacaagagcagcgaattcaattccgccataacttctttcgattgggctgatttcgacactcgccgtgtggccacctccagtgtcgacactacttgtaccatttgggacattgagagggaggctgtagacactcaattagttgcgcacgacaaggaagtgttcgacatttcgtggggcgggttcaatgtgtttgcatccgtgtctggagacgggtctgtaagagttttcgacttgcgagacaaagaacgatcgacaataatttacgaaaacccgatccccgaaactccattgctgagggtagaatggaacaaggcagaccctaggttcatggctacagtagggatggatagcaataaaattgtgatagttgacatccgatttccgacaacaccattgatggaattatgcaggcataaagggagtgttaacgctatttcatgggcaccattgatgggaaaacagctttgttcggctggagatgattcgagggctctaatatgggaggtggtgggctccaattatcgagcagaaaatggagttgcagtgatggaaccagagatgtggtatggatcagcggctgagatcaatcatgctcgatggtctccaattgagttggattggattgctatagtttttctcaacaaattgcagctgttgaaagtttaagaaaatttttgacttctaataacaatagtttcaagttagccagccatgttaattaaaagtcct

SEQ ID NO: 22396 - DNA, 1291 bp, Gossypium hirsutum
  Clone ID: LIB3493-030-A4_FLI
acattgctgtgaagaaaacaatatagcattccatttcgtggaaactcaattagggaaagggaaattaacagctcccgggctataaaccctaaaagctcttcccaaatttggttgagaagaaatggagaattcaactcaagaatcccacctgagatccgataattcggtaacctacgaatcagcttacacagtttatgccatggccttatcttccacgccttcctccaccaatatcaaccatcaacgcatcgctctcggcagcttcctcgaagattacactaacagagtcgacataatctcatttgatccagaaaccctctccttcaagacccacccaaagcttgccttcgaccacccttatccacccaccaagctcatgttccaacccaatcgaaaatccgcttcatcctcttcttcttgttccgatcttctcgcttcaaccggcgatttcctgcgtctctgggaagttcgagaatcttccattgaacctgtcactgttctaaacaatagcaaaaccagcgagttttgtgccccgttaacttccttcgattggaacgatgttgaacccaagagaattgggacttccagcatcgacacaacttgcaccatttgggacatcgagaaatgcgtcgttgaaacccaattgatcgctcatgataaagaggtttacgacattgcttggggtgaagctagagtttttgcttccgtttccgctgatgggtccgttaggattttcgatttgagagacaaagaacattccaccatcatttatgaaagtccccaacccgacacccctttattaagattggcttggaacaagcaagatttgaagtatatggctaccattcaaatggatagcaataaagttgtgattttggatataaggtcacccacaacccccgttgctgagttggagcggcatcacgctagtgtcaatgccattgcctgggctcctcagagttgtaagcatatttgttccgctggggatgatacccaggctcttatttgggagttgcctacggtggcgggatctaatggtatcgatcctctgtgtgtttactctgctggctacgaaattaatcaattacagtggtctgctgcgcaacctgattggattgccattgccttttccaacaaattgcagcttctcaaagtttgaggttttcacactgtattttcctgcttgaagtctggtcttctgtttcatagactgcttaagcttgtattcccctttgacttgatttgtggaatcagttttagttaagcctgtcaattctgacttgatttgtgg

SEQ ID NO: 22397 - DNA, 1012 bp, Gossypium hirsutum
  Clone ID: LIB3493-037-C5_FLI
ttcatttcttctccattcctaaaaatctctccacaatgcttttgagaccagtttcatctttgtgtgtgcaagccaagcaaggggataatctaatttgttcccttaagggctcccctgtaacatcatcatcatcatctgctttgagttttctgcccagaaaacatggaagggctttgggtgtttatgcatccataggaaccgacaatcatgcacttacaggggtagtgttccagccttttgaagaggtgaaaaaggaggaacttgacatcccaatcgctcctcatctttcgctggctcgccagaaatatgctgatgcctgtgaagccgccatcaatgagcaaatcaatgtggagtacaacgtttcctatgtgtaccactcgttgtatgcttacttcgacagagacaacgttgcgctcaaaggctttgccaaattcttcaaggaatcaagtgaagaagaaagagagcatgcagagaagctgatggaatatcagaacaaacgaggtggaagagtaaaactacactctattctgatgcccccttcagagtttgatcatgctgagaagggagatgcactatacgctatggaattagcattgtccttggagaagctgacaaacgagaagcttttgtgcctgcacgatgtcgcggtgcaaaacaatgatgctcagatggccgatttcatcgaaagcgaatttttagctgagcaggttgaagccattaagaagatatcagattatgtttctcaattaaggcgggttggaaaaggacatggcgtgtggcacttcgatcaaatgctactccacgaaggggcgtgatgctgcccataatcaccatctaaatgctgcatctttctgttgttttagtgcttcacagatgttctactatatatacatatatgatgagggataggtagtggagaagaataaattgttgtagaatatctatatctatatgtcattgtagtagccccttaacattgccatgtaagagacaataaacagcttggtttttg

SEQ ID NO: 22398 - DNA, 833 bp, Arabidopsis thaliana
  Clone ID: LIB35-001-A11_FLI
gcttcaaacaccacttgcagtttttcttattctcctgtcttgtctaaagaaaaaagagagaggaagaaatggagacttttgaggaaagctctgatttggatgttataccagaaacatctatttgaagacttgatgatccctgatggtttcattgaagattttgtctttgatgatactgcttttgtctccggactctggtctctagaaccctttaacccagttccgaaactggaacctagttcacctgttcttgatccagattcctatgtccaagagattctgcaaatggaagcagaatcatcatcatcatcatcaacaacaacgtcacctgaggttgagactgtctcaaaccggaaaaaaacaaagaggtttgaagaaacgagacattacagaggcgtgagaaggaggccatgggggaaatttgcagcagagattcgagatccggcaaagaaaggatccaggatttggttaggcacttttgagagtgatattgatgctgcaagggcttacgactatgcagcttttaagctcaggggaagaaaagctgttctcaactttcctttggatgccggaaagtatgatgctctggtcaattcatgccgaaaaaggaggagaaccgatgtaccacagcctcaaggaacaacaacaagtacttcatcatcgtcatcaaactaatgggggaatagtgatgtttaatcagtatatataggttaatatcttaagtatgtgaagcatcatgtatagagccaagaacctgttagactagtgtactgaaaagaactcttgcaaaatatgtactaaagagttcctgtaacaatggaacttctgcgttt

SEQ ID NO: 22399 - DNA, 683 bp, Arabidopsis thaliana; identical to SEQ ID NO: 13023
  Clone ID: LIB35-003-G11_FLI

SEQ ID NO: 22400 - DNA, 517 bp, Arabidopsis thaliana
  Clone ID: LIB35-014-B1_FLI
gagattggcaaatagaaataatagtcgcattagagggagtggtagagacggtttatcctctgtcacggcagcagagatgtctcagactgaaacatcaaacaatctcaattctcctgtctctttggagctgttctctggttttccagaatttggcctctctggttccttattgagtcatgacagttttcgcagttataatttagatgggatctccgagattctgccagaacttgataggatcgaacaagatatcgaacttaattatgaggatctgcttatcatggaaacaggtttacttctcggtggactaagcttccatgaccaacaccgagacatgaggctagacatcgataacatgtcatatgaggaactattagctctagaagagaggattggtacagtaagcactgctttgacagaagaagcaatatcaaagtgcttgaaaacaagtatctatcagatgaaacctttgagttatgggtctatcaccatttcctttgtgtacataccaattcac

SEQ ID NO: 22401 - DNA, 718 bp, Arabidopsis thaliana
  Clone ID: LIB35-015-F6_FLI
gcatcaagcaatccaaagcgattaaacctactcaatctcagatctcgttaaacctagaaaccctcgagaaaaaccgtatcaatggcgccgaaagcagagaagaagcccgctgagaagaaaccagcttccgagaagccggtggaggagaaatcaaaagccgagaaagctccggcggagaagaaaccaaaggccggaaagaagctcccgaaggaagctggtgccggaggcgacaagaagaaaaagatgaagaagaagagtgtcgagacttacaagatccacatcttcaaggtgcttaagcaagttcatcccgatatcggaatctccagcaaagcgatggggatcatgaacagtttcattaacgatatcttcgagaagcttgctcaagaggcgtcgaagcttgcgaggtacaataagaaacctacgatcacttctcgggagattcagactgctgtgagattggtgcttcctggagagttggcgaagcatgccgtttctgaggggactaaagccgtcacgaaattcaccagctcttgaataattgagttagggttcttatcatatggatgttgctctgctttagggttaatggaatttggaagatctgagttagggttttagaatgtcctttaagtatctctgtttcgtttggaatttctacgttttgtaagtactgctgctattgataatgtttggagtctatatttgctctttgtgtccc

SEQ ID NO: 22402 - DNA, 914 bp, Arabidopsis thaliana
  Clone ID: LIB35-015-H12_FLI
gcagcaattaaacaatttcttcactgcaattcacacgcaaccttcaaactaaaactcgagagacaagaaatcctcagaatctttaacttaatggcgctcgaggctcttacatcaccaagattagcttctccgattcctcctttgttcgaagattcttcagtcttccatggagtcgagcgctggacaaagggtaagcgatctaagagatcaagatccgatttccaccaccaaaacctcactgaggaagagtatctagctctttgcctcatgcttctcgctcgcgacaaccgtcagcctcctcctcctccggcggtggagaagttgagctacaagtgtagcgtctgcgacaagacgttctcttcttaccaagctctcggtggtcacaaggcaagccaccgtaagaacttatcacagactctctccggcggaggagatgatcattcaacctcgtcggcgacaaccacatccgccgtgactactggaagtgggaaatcacacgtttgcaccatctgtaacaagtcttttccttccggtcaagctctcggcggacacaagcggtgccactacgaaggaaacaacaacatcaacactagtagcgtgtccaactccgaaggtgcggggtccactagccacgttagcagtagccaccgtgggtttgacctcaacatccctccgatccctgaattctcgatggtcaacggagacgacgaagtcatgagccctatgccggcgaagaagcctcggtttgactttccggtcaaacttcaactttaaggaaatttacttagacgataagatttcgtttgtatactgttgagagttgtgtaggaatttgttgactgtacataccaaattggactttgactgattccaattcttcttgttctttcattttaaaaattattaaaccgatt

SEQ ID NO: 22403 - DNA, 812 bp, Arabidopsis thaliana
  Clone ID: LIB35-017-E4_FLI
ggaccgaagatattttacaagcctttctccactaagcccttctctcttcttctcttggcctctcacttgaatctcccacaaagcgatcaatcacaaattccttcttctctctctctcttttcgtccctaagaatcaattatgaaaggagctaaatcaaagactgaaaccaggagctccaagctctctgtgaccaagaagccggctaaaggagcagggcgtggcaaagctgctgctaaggaccccaacaaaccaaagaggccagccagtgctttcttcgttttcatggaagatttccgtgagactttcaagaaggaaaaccccaagaacaagtctgtagctactgttggaaaagctgctggagacaagtggaagtccttgtctgattctgagaaagctccttatgttgctaaggctgagaaacgcaaggttgaatatgagaagaacattaaagcttacaacaagaaactggaggaaggtccaaaagaagatgaggaatctgacaagtcagtgtcagaggtcaatgacgaggatgatgctgaggatggtagtgaagaggaggaggacgatgactaagaagctgaatgttggtagcattagtataaatggctgcaaaaatctctctgtttttatctttacttgaaatgttaacggggctgattaaaatgggtctttctttttacctttttatatttccacaacccctcactaaagccccctgaatggagaaagtgaattgtagaatgtttagatggtgaaagagagacttgcagctcctgtaccctttgctttataaaacgatttagttttcctt

SEQ ID NO: 22404 - DNA, 984 bp, Arabidopsis thaliana
  Clone ID: LIB35-022-G2_FLI
ggattccagaaagaaagaaaaaaaagaaacaaataattccaaaaccttctctcttaatcgaaatcaagaaacttacaagatctggtggaaaccatggaagaaggagattttttcaactgctgtttcagcgagattagtagtggcatgaccatgaataagaagaagatgaagaagagcaataaccaaaagaggtttagcgaggaacagatcaagtcacttgagcttatatttgagtctgagacgaggcttgagccgaggaagaatgttcaggtagctagagagctagggctgcaaccaagacaagtggctatatggtttcaaaacaagagggctcgatggaaaactaagcaacttgagaaagagtataacactcttagagccaattacaacaatttggcttcacaatttgaaatcatgaagaaagaaaagcaatctctggtctctgagctgcagagactaaacgaagagatgcaaaggcctaaagaagaaaagcatcatgagtgttgtggtgatcaaggactggctctaagcagcagcacagagtcgcataatggaaagagtgagccagaagggaggttagaccaagggagtgttctatgtaatgatggtgattacaacaacaacattaaaacagagtattttgggttcgaggaagagactgatcatgagctgatgaacattgtggagaaagctgatggtagttgcttgacatcttctgagaattggggaggtttcaattctgattctctcttagaccaatctagcagcaattaccctaactggtgggagttttggtcataaaagcatataagaaaaaaacagaacataagcgaagagaaagagtgtgaatagtttgtaaattatgtgttaagaaaaataaatttagtttagtttaaatcttgtttcgatctatgtatctactatgttcaatactctttgtagctaattagtagcttataatgagactagaaaagttttgaagtc

SEQ ID NO: 22405 - DNA, 736 bp, Arabidopsis thaliana
  Clone ID: LIB35-037-D7_FLI
gtcgacccagcgtccggaaaaagtaaaagtaaagtaaaaccatcattattagttggtactctcctctctatctttctctcacactcatgggtcttccaacagatttcaaagagcttcagattccaggttacgtactaaaaacactttacgtcatcggtttctttagagacatggtcgatgctctttgtccttacatcggtctaccaagttttcttgaccacaacgagacctctcgatccgacccgacccgactcgctctctccacgtcagcaactcttgccaacgagttaatcccggtggttcgtttctccgatcttttaaccgatccggaagattgctgcacggtttgcttatccgattttgtatccgacgataagattagacagctgccgaagtgtggacacgtgtttcatcatcgttgtttagaccgttggatcgttgactgtaataagataacgtgcccgatttgtcggaaccggttcttaccggaggaaaagtccacgccgtttgattggggtacttcagattggtttagagatgaagtggagagtaccaactaataatgatggttttacttttactttttacttttttcacggtaatatttttctactgtataattctttcttccaaactactgtataattccaagtataagattatgtaattgtgtatattagcatcaatcatcctttcctttgttaaagaaccgtctgtataaaatccttcccaatgt

SEQ ID NO: 22406 - DNA, 1075 bp, Arabidopsis thaliana
  Clone ID: LIB35-042-A4_FLI
ggagagagatatagagagcatcaatggcgtcgtcgtcaagactttgcgattcgtgcaaatcgacggcagcaactctattctgccgcgcagacgccgcgtttctctgcggcgactgcgacggtaagatccacacagctaacaaactcgcatcacgtcacgaacgagtttggctatgtgaagtatgcgaacaagcaccagcacacgtcacgtgcaaagctgacgccgctgcgttatgcgtcacgtgcgaccgtgatatccactcagctaatccactctctcgccgccacgagcgcgtaccaatcactcctttctacgacgctgtaggtccagcaaaatccgcttcctcctccgtcaatttcgtagatgaagatggcggtgacgtcactgcttcgtggcttttagctaaagaaggaatcgaaatcactaatttgttctccgatcttgattatccgaagattgaggtaacgtcggaggagaatagctccggtaacgacggagttgttcctgtgcagaataagttgtttcttaacgaagattacttcaatttcgatctctctgcttccaaaatttctcaacaaggattcaatttcatcaaccaaactgtttcgacgagaacgatagatgtaccgttggtgcctgaaagtggaggagtgacggcggagatgacgaacacggagacgccagctgtgcagttatcaccggcggagagggaagcaagggttttgaggtatagagagaagaggaagaatcggaaatttgagaagacgattaggtatgcgtcgcgtaaagcttacgctgagatgaggccgagaatcaaaggacgttttgctaagagaacagattcgagagagaatgatggtggagacgtcggagtttatggcggattcggtgttgttccgagtttctgatattttccggtgaaagaaacatggtagtagtatatcggttaatagcagattaaggataattaaaactaaaatgtttcctgatttaatcaggggctaagttattgttagaagattgttgttttttgaattaattctcacaattgtatcctaaattatatagtttactt

SEQ ID NO: 22407 - DNA, 1066 bp, Arabidopsis thaliana
  Clone ID: LIB35-042-B7_FLI
gagctcaagcttctacgtcatcttcgacatgagaatgtggttgctcttaaagatgtaatgatggctaatcataagagaagctttaaggatgtttatcttgtttatgagcttatggatactgatcttcatcagattattaagtcttctcaagttcttgcaattgacgattttgatgaaaatgagctccaagaggctgacaaaatgataaaggaggaggggaagtttctgtgtgtgtcaatgggacatgagaacaagacacttgatgattttgtagaagctcacaacacatgcgtgaatgatctcatgtatttccccactcgaagcgcttacgagctctcaagtgttgctgggaacgcggacaaagttgcagcttttcaggaggagatggagaatgtgagaaaaaagatggaggaggatgagaagaaggcagaacacatgaaggccaagtacaaaacttatacaaagggtcatgagaggagggcagagaccgtgtggacccaaatagaggcgacattgaagcaggctgagattggtggaacagaagtagagtgctttaaagcattgaagaggcaagaagagatggctgcatcttttaggaaaaagaatttgcaagaggaagtgataaagcaaaaggaaacagagagtaaactgcagactcgctatgggaatatgttggcaatggttgaaaaagcagaggagataatggtcggtttccgagcacaggcattgaagaaacaagaggatgttgaagattctcacaaactgaaagaagctaagctagccactggagaggaagaggacatagccatagccatggaagcttctgcataaaaacttgagttttgtattgcttacaagttttaaggagacgtagcttgactttgtattggtaagtttttttaatatgagtcatgactttgtaaaaaggttatgatatattctctgtttgtatgctttgcaagagtcaagaaatttgaatgcttcaggatctatttggttccaaatgtaagtacaatctgaagatgtttaatcctcctctctttcaatgcaaattttatccttggct

SEQ ID NO: 22408 - DNA, 907 bp, Arabidopsis thaliana
  Clone ID: LIB35-042-E7_FLI
gaatacaacgccaaacaacaataaccagagtttcatgaaccagcatggtctgatacagtttgatccaatcgacaacatcaacctcaagagtagcggcaccaacaacagcttcttcaacctcggattctttcaagaaaacacgaagaactcagagacgagtcttccttctctatatagcaccgacgttcttgttcatcaccgtgaagaaaacttgaacgcgggttctaacgtgtcagccacggcactacttcagaaagctacacaaatgggttcagtcacaagcaacgacccatccgctttgttcagaggcttagcttcttcgtctaactcatcaagtgttatcgctaatcactttggtggaggacgaattatggagaatgataataatggaaaccttcaaggtctaatgaactcattagccgccgttaatggaggtggcggatccggtggcagtatcttcgacgttcaatttggagacaatggaaatatgagcggctcggacaagttaacgttagattttcttggagttggaggaatggtgagaaatgtaaatcgcggtggtggtggtggtggtcgcggcagtgctcgtggcggagtttctttggatggtgaggcgaagtttcctgagcaaaattatccatttggaagaggttgataatatcttattattgtataacttaattaggtgataattttgttatcttcgcttgttgttttcataatcactatataataatagtatatctttagtgagagctttttaggtttggatttggttagagtctgtcttttatataataaaaaagattgtaagtttgctagctattgtactgacttacaactccaatatgattttatgtggtgttgtttataaccgagagaatgataaatattatggtttcgaatg

SEQ ID NO: 22409 - DNA, 1233 bp, Arabidopsis thaliana
  Clone ID: LIB35-044-F1_FLI
gacactgagaagaaaaatccttcaggttatcgaaaattcccggattttactctttgggcggtggccgatttcttacgcgctctttttgtggcgactgttgtatacgcgcgagccttcatggacacgaaggcggttggagtttctaaggatacggcggcgtcgatggaagcgtcgacggtgtttcctgggtttaaattctcgccgacggatgtggagttgatttcgtattacctgaagcggaagatggatggcttggagaggtccgttgaggttataccggaccttgagatttacaatttcgagccttgggatttacccgataagtcgattgtgaaatctgatagcgagtggttcttcttctgtgcgcgtgggaaaaagtatccacatggttcacagaacaggagagcaacgaagatgggatactggaaagcaactgggaaagagcgtgatgtgaagtctggttctgaggtcattggaacaaagaggacgcttgttttccatattggtcgtgcaccaaaaggcgaaagaactgactggattatgcacgagtactgcgtgaaaggagtatctctggatgatgctatggttgtttgccgggttaggaggaacaaagaatacaatagtggtacaagtcagaaggcaccaaagccaaattcatcagccgagaagcgtgcgaaagtccaaaatggcgctacgagttcagggagcccgtctgattgggacaacttggttgatttttacctagcaggtgaatcaggggagaaactactcgctgagatggcagagtcatcagaaaatctacaggtggataatgacgaggatttctttgcggatatcctaagagacgaaatcatcaatctcgatgaagcggtgatgacagggaacacaccaaacgaagtgccaacactagaatcagcatcaatggagataagggtacttcctttaccaaacatgatagacaaacaaatgtcatcactgttagaggaaagaccatcacagaagaagaaaggaaaagacgccacggaatcattgtcgagctgcttcgtgggtttatactcgatcaaatcagtgaacaaggcacgatgggatgttattataggtgtagtggctctgatagcaatgttgttttatctagaataagaggcttatggaagtagcgaaaaacagtgtcctagctatgtttgtatcatcttttctcggacattgacaaggattatatgatgtttttgtgtt

SEQ ID NO: 22410 - DNA, 772 bp, Arabidopsis thaliana
  Clone ID: LIB35-054-D9_FLI
ggtacataaaagcttaaaagaaaacaaaaagaatggggagagcaagagaaataggagaaggaaactcatcgtcgttaagggaacaacgaaacctcagagagaaggatcgaaggatgcgcatgaaacatctcttctctatactttcttctcatgtttctcccactcgcaagttaccagtgcctcaccttatagatcaagcgacatcatacatgatccaattgaaagagaatgtaaattatttgaaagagaagaaaaggacattgttacaaggagaactcgggaatctctacgaagggtcgtttcttctacccaaactcagtattcgttcgcgggattcgaccatagaaatgaatctgatcatggatctaaacatgaaaagagtaatgttacacgagcttgtgagtatttttgaagaagaaggagctcaagtaatgagtgctaatcttcagaacttgaatgataggaccacttacacaatcatagcccaggctatcattagtcggattggcattgatccatcaaggatagaagagagagtacggaaaatcatctatggatatatatattttgaagcatgaaatcccaaatgataagtctacgctaacgctagtgtgttttttcacacatgcgttagttctttaaatatgagatgagtaattgcttttgagttcgattatgataaatatgttgaccgtcaacataagaaaccttaaaacgttgtcgtttcgtttttattcatcccggtttaattcagtttggcttgacgtgattt

SEQ ID NO: 22411 - DNA, 856 bp, Arabidopsis thaliana
  Clone ID: LIB35-055-H12_FLI
aggtggctggtccataaacgccttttgtgagctcgtggctcagtctcaaagggagagatggtcttttgataatgagcacttaggttccggacgacgaagactaagtgggtgtagtagtagcagattctcatgctccccttctgttgatcagcagacttgtgggcgttgctcaaagcttttaactgaaaggtctccagttgccaggtttgaccttccaattcctgctgttctagcgtgcggccatgtttaccatgcggcatgcttagagacaatgacaaatgaaacagagaagtatgatcctacgtgtcccatatgcacagagacacaggttactaaattatcgaggaaagctctaaaagccgaggcagaattgaaggcaacgagttacaaaaggtgtaagaaccgtgtggtagatagttatgtccgcagtgaatgtgaggatcttatgttccagaatctagggaaacgagaaggaaaaggtctgaagatggatcctagttcgaataccaaaggctccacgtctaagtcttttatgaaatggcacttcggttccgtcagcaccaagtggagtaaagccagggattctacctcgaagaagagcttttggtccagacatagtaataaaagattaagtcatcctttttcaagcgttgagggccttaatcaggcaacatgacataaaataggactggctttggattagagaaaagctcccttaaacattttgtatccctttttacttttattccatgtttaaatgtcacatggggaaaatatgtgtaccaatgaaacaaacttgtcattttgtagaatgcagaagaaacaaaaaaggataaactaaaaatctatctttact

SEQ ID NO: 22412 - DNA, 492 bp, Gossypium hirsutum
  Clone ID: LIB3543-053-D10_FLI
caaaattctctcttcaaaccaagaaaacaagagaaaaaaagatgtctaagctttgttcacttttcatagctgcccttctttttaatttcatgctaagctatgctgctaggcctgagccaactttgtccttaacccaacatgagggagttgaggcagagaaagttgatgctgatgagaactgtgaaggaattggcaaagaggagtgcttgatgagaagaacccttgctgctcatgtggactatatttatacccagaatcacaagccatgaagttgaattgttatggaagaaaaaaagacagtaaaatattggttcaatcgtagcatcaaaagccataaataaaatcacatatatttccattaatgttggcatatgattgtatatatggttttgttctttctttttcttctttttttcatgcatgtgaaccccagatgatccatttctttgtagatgcaaacttagaaaatgtttgaaaaatcattcaattggg

SEQ ID NO: 22413 - DNA, 1285 bp, Homo sapiens
  Clone ID: LIB3547-022-F6_FLI
gaggctttaaggtagctttaaattcgtgttgtcctgggagctcgcccttttcggctggagtcgggctttacggcgccggatggctctggacgtgaagtctcgggcaaagcgttatgagaagctggacttccttggggagggacagtttgccaccgtttacaaggccagagataagaacaccaaccaaattgtcgccattaagaaaatcaaacttggacatagatcagaagctaaagatggtataaatagaaccgccttaagagagataaaattattacaggagctaagtcatccaaatataattggtctccttgatgcttttggacataaatctaatattagccttgtctttgattttatggaaactgatctagaggttataataaaggataatagtcttgtgctgacaccatcacacatcaaagcctacatgttgatgactcttcaaggattagaatatttacatcaacattggatcctacatagggatctgaaaccaaacaacttgttgctagatgaaaatggagttctaaaactggcagattttggcctggccaaatcttttgggagccccaatagagcttatacacatcaggttgtaaccaggtggtatcgggcccccgagttactatttggagctaggatgtatggtgtaggtgtggacatgtgggctgttggctgtatattagcagagttacttctaagggttccttttttgccaggagattcagaccttgatcagctaacaagaatatttgaaactttgggcacaccaactgaggaacagtggccggacatgtgtagtcttccagattatgtgacatttaagagtttccctggaatacctttgcatcacatcttcagtgcagcaggagacgacttactagatctcatacaaggcttattcttatttaatccatgtgctcgaattacggccacacaggcactgaaaatgaagtatttcagtaatcggccagggccaacacctggatgtcagctgccaagaccaaactgtccagtggaaaccttaaaggagcaatcaaatccagctttggcaataaaaaggaaaagaacagaggccttagaacaaggaggattgcccaagaaactaattttttaaagagaacactggacaacattttactactgagggaaatagccaaaaaggcaaataatggaaaaatagtaaacattaagtaaatgctgtagaagtgagtttgtaaatattctacacatgtaaaatatgtaaaactatgggttatttttattaaatgtattttaaaat

SEQ ID NO: 22414 - DNA, 957 bp, Homo sapiens
  Clone ID: LIB3547-078-G1_FLI
gggatggcggccaccgcgctgctggaggccggcctggcgcgggtgctcttctacccgacgctgctctacaccctgttccgcgggaaggtgccgggtcgggcgcaccgggactggtaccaccgcatcgaccccaccgtgctgctgggcgcgctgccgttgcggagcttgacgcgccagctggtacaggacgagaacgtgcgcggggtgatcaccatgaacgaggagtacgagacgaggttcctgtgcaactcttcacaggagtggaagagactaggagtcgagcagctgcggctcagcacagtagacatgactgggatccccaccttggacaacctccagaagggagtccaatttgctctcaagtaccagtcgctgggccagtgtgtttacgtgcattgtaaggctgggcgctccaggagtgccactatggtggcagcatacctgattcaggtgcacaaatggagtccagaggaggctgtaagagccatcgccaagatccggtcatacatccacatcaggcctggccagctggatgttcttaaagagttccacaagcagattactgcacgggcaacaaaggatgggacttttgtcatttcaaagacatgatgtatggggattagaaagaactcaagacactcctgcttgatacagaacaaaaagagcttaacaggaccaacagggcttaagcccagacttgacgtaacagaaatgtgccaataggtaataggtaatttttctttctctgacttgttttgttttcttgaaataacactgttgtgtggctagaaaggaaaagatttagtgtggcttgtattcatgggatacaggacagggatggggctatcatcttttcttgaatagggctaaagaagtattttaacaaaaatctattatgtacctaatattgtgcctaataatatttagcaccacaactcaaaaaacatttagcacttg

SEQ ID NO: 22415 - DNA, 1154 bp, Homo sapiens
  Clone ID: LIB3547-090-D2_FLI
gcgggcgtcagcgcggtggccagcgcgcagaggcgggcgcggaggcggctagaaggtgaccgcggatcccagcttcctgcagccagccctgaaggatggctgccatattgggagacaccatcatggtggctaaaggccttgtcaagctgacccaggcggccgtggaaacccacctgcagcacttgggcatcggaggggagctgatcatggcggccagggccctgcagtccacggctgtggagcagattggcatgttcttggggaaggtgcagggtcaggataaacatgaagaatattttgctgagaacttcggcggcccagaaggggagttccacttctcagtcccgcatgcagccggagcctccacagacttctcttcagcctccgctcccgaccagtcagcgcccccatccctgggtcatgcccacagcgagggcccagctcctgcctacgtggccagtggaccctttagagaagccgggttccccggccaggcctcctcccctctgggcagggccaacgggaggctctttgcaaaccccagagactcattctctgccatgggctttcagcgaaggttcttccaccaggaccaatcccctgttgggggcctcacagccgaggacattgagaaggcccggcaggctaaggctcgccccgagaacaagcagcacaaacagacgctcagcgagcatgcccgggagcggaaggtgcctgtgacgaggattggccggctggccaacttcggaggtctggccgtgggcctgggcttcggggcactggcagaggtcgccaagaagagcctgcgctccgaggacccctcagggaagaaggccgtgctgggttccagtcctttcctgtccgaggccaatgcagagcggatcgtgcgcacgctctgcaaggtgcgtggtgcggcactcaagctgggccagatgctgagcatccaggatgatgcctttatcaacccccacctggctaagatcttcgagcgggtgcggcagagcgcggacttcatgccactgaagcagatgatgaaaactctcaacaacgacctgggccccaactggcgggacaagttggaatacttcgaggagcggcccttcgccgccgcatccattgggcaggtgcacttggcccgaatgaagggcggccgc

SEQ ID NO: 22416 - DNA, 3422 bp, Homo sapiens
  Clone ID: LIB3547-119-E9_FLI
ctcagcttctagtatccagactccagcgccgccccgggcgcggaccccaaccccgacccagagcttctccagcggcggcgcagcgagcagggctccccgccttaacttcctccgcggggcccagccaccttcgggagtccgggttgcccacctgcaaactctccgccttctgcacctgccacccctgagccagcgcgggcgcccgagcgagtcatggccaacgcggggctgcagctgttgggcttcattctcgccttcctgggatggatcggcgccatcgtcagcactgccctgccccagtggaggatttactcctatgccggcgacaacatcgtgaccgcccaggccatgtacgaggggctgtggatgtcctgcgtgtcgcagagcaccgggcagatccagtgcaaagtctttgactccttgctgaatctgagcagcacattgcaagcaacccgtgccttgatggtggttggcatcctcctgggagtgatagcaatctttgtggccaccgttggcatgaagtgtatgaagtgcttggaagacgatgaggtgcagaagatgaggatggctgtcattgggggcgcgatatttcttcttgcaggtctggctattttagttgccacagcatggtatggcaatagaatcgttcaagaattctatgaccctatgaccccagtcaatgccaggtacgaatttggtcaggctctcttcactggctgggctgctgcttctctctgccttctgggaggtgccctactttgctgttcctgtccccgaaaaacaacctcttacccaacaccaaggccctatccaaaacctgcaccttccagcgggaaagactacgtgtgacacagaggcaaaaggagaaaatcatgttgaaacaaaccgaaaatggacattgagatactatcattaacattaggaccttagaattttgggtattgtaatctgaagtatggtattacaaaacaaacaaacaaacaaaaaacccatgtgttaaaatactcagtgctaaacatggcttaatcttattttatcttctttcctcaatataggagggaagatttttccatttgtattactgcttcccattgagtaatcatactcaactgggggaaggggtgctccttaaatatatatagatatgtatatatacatgtttttctattaaaaatagacagtaaaatactattctcattatgttgatactagcatacttaaaatatctctaaaataggtaaatgtatttaattccatattgatgaagatgtttattggtatattttctttttcgtctatatatacatatgtaacagtcaaatatcatttactcttcttcattagctttgggtgcctttgccacaagacctagcctaatttaccaaggatgaattctttcaattcttcatgcgtgcccttttcatatacttattttattttttaccataatcttatagcacttgcatcgttattaagcccttatttgttttgtgtttcattggtctctatctcctgaatctaacacatttcatagcctacattttagtttctaaagccaagaagaatttattacaaatcagaactttggaggcaaatctttctgcatgaccaaagtgataaattcctgttgaccttcccacacaatccctgtactctgacccatagcactcttgtttgctttgaaaatatttgtccaattgagtagctgcatgctgttcccccaggtgttgtaacacaactttattgattgaatttttaagctacttattcatagttttatatccccctaaactacctttttgttccccattccttaattgtattgttttcccaagtgtaattatcatgcgttttatatcttcctaataaggtgtggtctgtttgtctgaacaaagtgctagactttctggagtgataatctggtgacaaatattctctctgtagctgtaagcaagtcacttaatctttctacctcttttttctatctgccaaattgagataatgatacttaaccagttagaagaggtagtgtgaatattaattagtttatattactctcattctttgaacatgaactatgcctatgtagtgtctttatttgctcagctggctgagacactgaagaagtcactgaacaaaacctacacacgtaccttcatgtgattcactgccttcctctctctaccagtctatttccactgaacaaaacctacacacataccttcatgtggttcagtgccttcctctctctaccagtctatttccactgaacaaaacctacgcacataccttcatgtggctcagtgccttcctctctctaccagtctatttccattctttcagctgtgtctgacatgtttgtgctctgttccattttaacaactgctcttacttttccagtctgtacagaatgctatttcacttgagcaagatgatgtaatggaaagggtgttggcattggtgtctggagacctggatttgagtcttggtgctatcaatcaccgtctgtgtttgagcaaggcatttggctgctgtaagcttattgcttcatctgtaagcggtggtttgtaattcctgatcttcccacctcacagtgatgttgtggggatccagtgagatagaatacatgtaagtgtggttttgtaatttaaaaagtgctatactaagggaaagaattgaggaattaactgcatacgttttggtgttgcttttcaaatgtttgaaaacaaaaaaaatgttaagaaatgggtttcttgccttaaccagtctctcaagtgatgagacagtgaagtaaaattgagtgcactaaacaaataagattctgaggaagtcttatcttctgcagtgagtatggcccgatgctttctgtggctaaacagatgtaatgggaagaaataaaagcctacgtgttggtaaatccaacagcaagggagatttttgaatcataataactcataaggtgctatctgttcagtgatgccctcagagctcttgctgttagctggcagctgacgctgctaggatagttagtttggaaatggtacttcataataaactacacaaggaaagtcagccactgtgtcttatgaggaattggacctaataaattttagtgtgccttccaaacctgagaatatatgcttttggaagttaaaatttaaatggcttttgccacatacatagatcttcatgatgtgtgagtgtaattccatgtggatatcagttaccaaacattacaaaaaaattttatggcccaaaatgaccaacgaaattgttacaatagaatttatccaattttgatctttttatattcttctaccacacctggaaacagaccaatagacattttggggttttataataggaatttgtataaagcattactctttttcaataaattgttttttaatttaaaaaaagga

SEQ ID NO: 22417 - DNA, 2119 bp, Homo sapiens
  Clone ID: LIB3547-132-C8_FLI
tgcagtgtctggtcgagagtacccgtgggagcgtcgcgccgcggaggcagccgtcccggcgtaggtggcgtggccgaccggacccccaactggcgcctctccccgcgcggggtcccgagctaggagatgggaggcacagctcgtgggcctgggcggaaggatgcggggccgcctggggccgggctcccgccccagcagcggaggttgggggatggtgtctatgacaccttcatgatgatagatgaaaccaaatgtcccccctgttcaaatgtactctgcaatccttctgaaccacctccacccagaagactaaatatgaccactgagcagtttacaggagatcatactcagcactttttggatggaggtgagatgaaggtagaacagctgtttcaagaatttggcaacagaaaatccaatactattcagtcagatggcatcagtgactctgaaaaatgctctcctactgtttctcagggtaaaagttcagattgcttgaatacagtaaaatccaacagttcatccaaggcacccaaagtggtgcctctgactccagaacaagccctgaagcaatataaacaccacctcactgcctatgagaaactggaaataattaattatccagaaatttactttgtaggtccaaatgccaagaaaagacatggagttattggtggtcccaataatggagggtatgatgatgcagatggggcctatattcatgtacctcgagaccatctagcttatcgatatgaggtgctgaaaattattggcaaggggagttttgggcaggtggccagggtctatgatcacaaacttcgacagtacgtggccctaaaaatggtgcgcaatgagaagcgctttcatcgtcaagcagctgaggagatccggattttggagcatcttaagaaacaggataaaactggtagtatgaacgttatccacatgctggaaagtttcacattccggaaccatgtttgcatggcctttgaattgctgagcatagacctttatgagctgattaaaaaaaataagtttcagggttttagcgtccagttggtacgcaagtttgcccagtccatcttgcaatctttggatgccctccacaaaaataagattattcactgcgatctgaagccagaaaacattctcctgaaacaccacgggcgcagttcaaccaaggtcattgactttgggtccagctgtttcgagtaccagaagctctacacatatatccagtctcggttctacagagctccagaaatcatcttaggaagccgctacagcacaccaattgacatatggagttttggctgcatccttgcagaacttttaacaggacagcctctcttccctggagaggatgaaggagaccagttggcctgcatgatggagcttctagggatgccaccaccaaaacttctggagcaatccaaacgtgccaagtactttattaattccaagggcataccccgctactgctctgtgactacccaggcagatgggagggttgtgcttgtggggggtcgctcacgtaggggtaaaaagcggggtcccccaggcagcaaagactgggggacagcactgaaagggtgtgatgactacttgtttatagagttcttgaaaaggtgtcttcactgggacccctctgcccgcttgaccccagctcaagcattaagacacccttggattagcaagtctgtccccagacctctcaccaccatagacaaggtgtcagggaaacgggtagttaatcctgcaagtgctttccagggattgggttctaagctgcctccagttgttggaatagccaataagcttaaagctaacttaatgtcagaaaccaatggtagtatacccctatgcagtgtattgccaaaactgattagctagtggacagagatatgcccagagatgcatatgtgtatatttttatgatcttacaaacctgcaaatggaaaaaatgcaagcccattggtggatgtttttgttagagtagactttttttaaacaagacaaaacatttttatatgattataaaagaattcttcaagggctaattacctaaccagcttgtattggccatctggaatatgcattaaatgactttttataggtc

SEQ ID NO: 22418 - DNA, 166 bp, Homo sapiens
  Clone ID: LIB3547-136-B1_FLI
cctccccctgcctctcggactcgggctgcggcgtcagccttcttcgggcctcggcagcggtagcggctcgctcgcctcagccccagcgcccctcggctaccctcggcccaggcccgcagcgccgcccgccctcggccgccccgacgccggcctgggccgcggccgc

SEQ ID NO: 22419 - DNA, 2119 bp, Homo sapiens
  Clone ID: LIB3547-170-A5_FLI
cagcgcgactgcgggtggcgcacgaccagggcgcagaccttggggcgcgcggcccatggagtcggggctgctgcggccggcgccggtgagcgaggtcatcgtcctgcattacaactacaccggcaagctccgcggtgcgcgctaccagccgggtgccggcctgcgcgccgacgccgtggtgtgcctggcggtgtgcgccttcatcgtgctagagaatctagccgtgttgttggtgctcggacgccacccgcgcttccacgctcccatgttcctgctcctgggcagcctcacgttgtcggatctgctggcaggcgccgcctacgccgccaacatcctactgtcggggccgctcacgctgaaactgtcccccgcgctctggttcgcacgggagggaggcgtcttcgtggcactcactgcgtccgtgctgagcctcctggccatcgcgctggagcgcagcctcaccatggcgcgcagggggcccgcgcccgtctccagtcgggggcgcacgctggcgatggcagccgcggcctggggcgtgtcgctgctcctcgggctcctgccagcgctgggctggaattgcctgggtcgcctggacgcttgctccactgtcttgccgctctacgccaaggcctacgtgctcttctgcgtgctcgccttcgtgggcatcctggccgcgatctgtgcactctacgcgcgcatctactgccaggtacgcgccaacgcgcggcgcctgccggcacggcccgggactgcggggaccacctcgacccgggcgcgtcgcaagccgcgctcgctggccttgctgcgcacgctcagcgtggtgctcctggcctttgtggcatgttggggccccctcttcctgctgctgttgctcgacgtggcgtgcccggcgcgcacctgtcctgtactcctgcaggccgatcccttcctgggactggccatggccaactcacttctgaaccccatcatctacacgctcaccaaccgcgacctgcgccacgcgctcctgcgcctggtctgctgcggacgccactcctgcggcagagacccgagtggctcccagcagtcggcgagcgcggctgaggcttccgggggcctgcgccgctgcctgcccccgggccttgatgggagcttcagcggctcggagcgctcatcgccccagcgcgacgggctggacaccagcggctccacaggcagccccggtgcacccacagccgcccggactctggtatcagaaccggctgcagactgacaccctcggcccacgactgtcttcccaagttttacagacttgttctttttacataaaggaatttgtaggaaatgcagccaaaggtgcagtcggaaaagatgcaggggaaatgtatttatgcagcgacaccccacaatgtgaacaaacagacaaaaaaactgtgccctcgtggaattgacgttctgcttgggaacacagaaaagaactcggtgatgaaataatggagatgattccagtgacaaacgacagagatggtgatggtggtcagggaagacctctctgcagaggtagtgacttgtgatgtgagctgagacctctgtcctgggaagaccaaaagaaaagcatttcaggatgagggaatggcatgcgcaaaggccctgaggctgaaatgtgcccatgtgttctaagaaatgcagcgatgctggtgtgcctggagcagggacggagggggagaatgggaggagacaaggagctgaagtagttcccgaaggaccttgtgggtgatatagaggacttcgcttttgctctgagtgaggtgggagccatagaagcttctaagcagaagagggacttgccctaattcaggtgatcacaggtgtcttgtggcctccatgggaggttgaaaaccagagaaggtgaaggggggctgcactgagccacaggaacaatgatggagattccagctaagcccagaccccgtggattctagatagattttagaggcagcagacagaattactgaggaattgagtgtaagagtggaataaagttatcaaggacaatgccaagggtggggcacccccaaatttgactctgggagactcagccaaatcctatctggtaataaaatttcttttttatttttct

SEQ ID NO: 22420 - DNA, 1035 bp, Gossypium hirsutum
  Clone ID: LIB3582-005-E5_FLI
catcaaaagcttgggtttctttttcttcttttttgcgccatgttgctgaaagctgttccaactttttcttcgttaaatcctcaactggaaaatcagggtgccctgttttcctctttttcttcttcgattaatcatcagctatcttctctaagaaatggacctgggtctcttgtagtttgtgcagccaaaggagccaaccacaagccactaagtggtgttgttttccagccctttgtggaagtgaaaaaggaacttgatcttgtcccctccgtgcctcaactttctctggctcgccaaaagtttactgatgactgtgaagcttccatcaacgaacaaatcaatgtcgaatacaatgtttcctatgtgtatcatgctatgtttgcttacttcgatagggacaacgttgcactcaagggtcttgccaagttcttcaaggaatcgagtttagaagagagagaacatgctgagaaatttatggaataccagaacaaacgaggtggaaaagtgaagctgcagtccatagtgatgcccctctctgagtttgatcatgcagagaaaggagatgcattatacgcaatggagcttgccttgtccctggagaaactaacaagtgaaaagctctttaacctacgtaatgtagccgtgcggaaccatgatgtgcagttgacggatttcattgaaggcgaattcttagctgagcaggtggaggccatcaagaaaatatcagaatatgtagctcaattgagaagagttggaaaaggacacggggtgtggcacttcgatcaaatgcttcttcatgagggagaggaagctattgcatgaagccccaacttgctgcttcgttccatgtcaaaagtttgtgcataaggtcttatttcagtagttctttgttgatatattttggctgtaagttgaaagatagtgccggatctttggtttgatgataaagctcgtaagggatttatttttggtagtccttttaatcagagtagttatagattcgtggatttcctatataggtattttccttctccg

SEQ ID NO: 22421 - DNA, 1059 bp, Gossypium hirsutum
  Clone ID: LIB3582-009-H12_FLI
catcaaaagcttgggtttctttttcttcttttttgcgcgccatgttgctgaaagctgctccagctttttcttcgttaaatcctcaactggaaaatcagggtgccctgttttcccctttttcttcttcgattaatcatcagctatcttctccaagaaatggacctgggtctcttgtagtttgtgcagccaaaggagccaaccacaagccactaactggtgttgttttccagccctttgtggaagtgaaaaaggaactcgatcttgtcccctccgtgcctcaactttctctggctcgccaaaagttcactgatgactgactgtgaagcttccatcaacgaacaaatcaagtgggatcttttctttttagatttttaagaatgaattctgaatgatttcgtgattgtgtcgatatttactaatgtctggtgcatttgacagtgtcgaatacagtgtttcctatgtgtatcatgctatgtttgcttacttcgatagggacaacgttgcactcaagggtcttgccaagttcttcaaggaatcgagtttagaagagagagaacatgctgagaaatttatggaataccagaacaaacgaggtggaaaagtgaagctgcagtccatagtgatgcccctctctgagtttgatcatgcagagaaaggagatgcattatacgcaatggagcttgccttgtccctggagaaactaacaagtgaaaagctctttaacctacgtaatgtagccgtgcggaaccatgctgtgcagttaacggatttcattgaaggcgaattcttagctgagcaggtggaggccatcaagaaaatatcagaatatgtagctcaattgagaagagttggaaaaggacacggggtgtggcacttcgatcaaatgcttcttcgtgagggagaggaagctattgcatgaagccccaacttgctgcttcgttccatgtcaaaagtttgtgcataaggtcttatttcagtagttctttgtttatatattttggctgtatgttgaaagatagtgccggatctttggtttgatgataaaagctcgtaagggat

SEQ ID NO: 22422 - DNA, 1288 bp, Gossypium hirsutum
  Clone ID: LIB3582-039-E10_FLI
ctctctctctctctctctcccttaacaaagcccaagtcttttcctctcctttttctctctctgtttctcaccctttttcatacagggaaaagaagaacgaagctttgtttggcacaagagaaaataatataaaatgatggtgggaaaagaagatctgggtttgagtcttagtttgggttttcctcagaatcaccactccttgcagctgaatctaaggccttctttgcttccttcctccgttgattcttgctcttcggtcccttctgggtttacagcctttcacaaatcgtcgtggaacgatgtttctgctccttcagatcctaacgcagaatctttccgaggcgagactagatcatttcttagaggaatcgacgtgaacagattgccatctacggtcgactgcgaagaagaagctggagtttcatctccgaacagcacgatatcgagtgtgagtgggaaaaggagcgaaagggaaggcactaatggagatgagcttgatattgaaagagcttgttctcgtggcatcagtgacgaggaagatggtgacgcttcgagaaaaaaacttagactttcgaaggatcagtctgctattcttgaagaaagctttaaagaacacaacactctgaacccaaaacaaaagatggctttggctaagcagctgggattgcgacccagacaagttgaagtttggttccaaaacagaagggcgaggaccaagctgaagcaaactgaggttgactgtgagttcctaaagagatgctgtgagaatctgacggaggaaaacaggcggttgcagaaggaagttcaggagctgagagcactgaaactttccccgcagttctacatgcaaatgaccccacctaccaccctcaccatgtgcccatcgtgtgagagagtgggtgcatcatccaccgttgatccaagatcccatcatcagctaccccaaacccaccacagggccatccccatcaacccttgggctccggctgctgccccaatccctcatggaccgttcgatgctcttcggcctcaatcgtaattattcaaccgatgctcaaggtcgtttttgtcaaatgaaaaaaaaaagcatcacaaattgagtacggagaatatctagtgttgtttagagcatcgtaccaatcccatgttctaagatatggtggttagaatgtgattttggtgggacatcatgttttgtattattgggcccacctaaatctaatccctgtttaatgttgacatattcaattagtttattttttttaatgttaatcaatgatgcctaatt

SEQ ID NO: 22423 - DNA, 1465 bp, Gossypium hirsutum
  Clone ID: LIB3582-053-F9_FLI
ctttgaatatgatttatccgtctgaaatgattaagtctacctccttcttccatcccaccaactccgtttccctccccaacctttctacaggtgggtttgtttggaagaggaagggctacagcacagcgattggtaggattaggagactacaatgttcagctcaggctccacacccaccaccggcatggccaggacgagcttttccacaccctggacacaagacttgggatggccccaagcctatctccattgtcggttcaactggttccattggaactcagacgttggacatagttgcggagaatccagataaattcagaatcgtggggcttgctgctggttcaaatgtcacccttcttgctcatcaggtgaagacattcaaacctcaactggttgctgttaggaatgagtctttggtaaatgaactcaaagatgctttggctgacatggagcaaaagcctgaaattattcctggggaacaaggagttattgaggttgctcgccatcctgatgctgtcagtgtggttacagggatagtaggatgtgcaggattgaagcctacagttgctgcaatagaagctgggaaagatattgcattagccaataaagagaccttgatcgctggtggtccctttgtccttcctcttgctcacaagcataaagtaaaaatccttccagcagattctgaacattctgccatttttcagtgtattcagggattgccagagtgtgcgcttcggcgtattattttgactgcatctggtggggctttcagggatttgcctgttgataagttgaaagacgttaaagtagctgatgctttgaaacatccgaactggaatatggggaaaaagatcacggtggactctgctacccttttcaacaagggtctagaagttattgaagcccattacctctttggggctgagtatgatgacattgagatagtaattcacccacaatctattattcactcaatggttgaaacacaggattcatcagtgctggctcagttgggatggccagatatgcgcttgccaatcctctacactctgtcatggcctgaaagaatttactgctctgaaataacttggcctcgccttgatctttgcaagcttggttcactagcttttaaggctcctgacaatgtgaaatacccctcaatgagtcttgcctatgctgctggaagggctggaggcaccatgacaggagttcttagtgcagctaatgagaaagctgtagagttgttcatcaatgaaaagataagctatttggatatattcaaggtggtggagctaacttgtgagaagcaccaggaagaattagttgccactccttcccttgaggaaattgtacattatgactcatgggcacgagactataccgctgctttgcaatgcttttcttccggtctaagtcctgtccctgcatgattcatcaactaatttgcaaagttttttggagt

SEQ ID NO: 22424 - DNA, 799 bp, Gossypium hirsutum
  Clone ID: LIB3582-058-E4_FLI
ttttggggtatagtaaccaaaaacgtctaatctaagaatctgtccaggcagcaaaaacaggcatctgtggcatggaaattgcaggcctgagctgagccgaaggaatccaagaattcacagtatttggtgaagtagtgactaacttcgacataacaaggtacgatgtggaaagaatcatggctagcaatacccttcttgctggagaattcgctaggcgaaacaaagatgtcggacctggtggtaatgacaaccttttaactggtaacaccaatgctgaaaccaacattaacatatcaccaaagaacaatggaggtcaaccagactggaaaatgatcctttatcagtcatctgaacagcaacagcccaacatcattgagaattttaaggctcaggctttctcattggcaccagaaaccatggttggccacagagaggtggatgattccagcaagatagggactactcacttctccaatgcttcttcattggtgactagtttgagcagctcaagagaaggtagcccagagagaagcagtttacctatggcgtttgcaatgcctcctccaccatcatccaagttgttcactacttcaccaaatactgtgaattcttggattccttcggctcagctcaggcctgcaatttccatgccacagatgcctgtttttgctgcctggacagattcttagattagacgttttggggtatagtaaccaaaaatatgttctcttcttttttttttccccttttttgcatggaattaaaaaaatcaggaaaaagaagtttggttttttttttt

SEQ ID NO: 22425 - DNA, 1304 bp, Gossypium hirsutum
  Clone ID: LIB3582-060-H8_FLI
ctttcttcacacccgacaatctaaactacatacaagaaaaaagtgtgtttggcaaaagagaaaaaaaaaaaaaatcaaagatggcggaaaaagaagatctgggtttgagtctgagcttgagtttccctcagaatcaccactctttacagcgaaatcttaggccttcgcttgttccttcctctgctaattcttgctcttctccttctactttaacccttaacaaacactcatggaatgattcttctcctccttcagatcataacttggaatcattccgggcggagatggggtcaatttttagaggaatcgacatgaacatattgccatcgacggcagattgtgaagaagaagctggggtttcatctccgaacagcacgatatcgagcgtgagtggaaaaaggagcgaaagagaaggcaacggagacgagcttgagatcgaaaaatcgtcatctcgtggaatcagcgacgaagaagatggcgacacttcgagaaaaaagcttagactttctaaagatcagtctgctattctcgaggaaaactttaaagaacacaacactctcaaccccaaacaaaagttagcattggctaagcagctgggattacgacccagacaagtcgaagtgtggtttcaaaacagaagggcaaggaccaagctgaagcaaacggaggttgactgtgagttccttaagagatgctgtgagaatctgacggaggagaaccaacggttgcagaaagaagttcaggagctgagagcgctgaaactttcctccacccagttctacatgcaaatgaccccacccactaccctcaccatgtgcacatcatgtgagagggttgcggtcccacccaacccaccatcatccaccaccgttgatccacggtcccatcatcaactagcccaaacccatcagagagctttccacatcaacccttgggctccatccgccgctcatagaccgttggatgctctccgtcctcgatcgtaattacaacccatgaacaagggcattcctgtcaacgcaaaagaaatcatgtgtggagttttagtctttagggtctagaagatatggtggttagaatgtgattttggtgggtcttgatgttttgtattattggacccaaaccaagcttttgacatatttaactagtttaatttaatctttggtgatgctaattacatcttcctccttcaatttcagtagtggggttgaaagatcaaaccgtgtgtgtaaagtagagtgcaaaatgtctagttattaaattttgaccaaagcaatgcaaaaatcttttgtgttacagattcc

SEQ ID NO: 22426 - DNA, 2200 bp, Gossypium hirsutum
  Clone ID: LIB3582-061-F4_FLI
aaactgagtgcaaatcttactaagccccagctcacactcctctgtcccattaactgtatgagagagaggaaatctgattttcaatttcatcactgcatcttctctttgcttttggcctcatcttcagaaaggtaagtcaagttctttagattgcttgccgctttttgagtttcaagatctatgaaccccagatctgtagagccttgatcttgttgctgaattcttgaattttagtagtttgggttcttttgctttttccttaataactagatttagtttattgtaagggcattttagctcattcaggatgttgggtcgtcctgggttatctagaactggaagctttaggcctgagaatctaggacaaaatgctttgcatatgattggcaatctttgtttcactatatttgtaatcggtgtcctagttttcaccattatagctgctacttatgagcctgaggaccctcttttccacccttccaccaagctcacagctttcctcacttccacatcaaatgccacctttcaatcggataacacggttgttaaaaccggagaggactttatggccgccaaccagactgcatttgccacttttatcaatgtgacggatgtagtagaaatcaaggaggagcgtactgaccaaactagttcatccgaatgcgagggtgattcgagaaaaccacttaattgtagggacccagaagtgttccatttgatgatgaaggaggcgattgagcgttttaaggatatacatttttatcggtttggaaagccagcaccagggcctgaggagaatacttgtgatatggcctggcggtttaggcctaaggaagggaagacagctgctttttataaggattataggcggtttgtgattaatagatctgagaattgtacacttagtgtggtgagcattggggattatcattcaggtgtgaatgcaaggaagaggaagaataagaatcaaaagctgggatttgagaagacatctggtaagcaggagcaagttgttgcggctttgcctgttgttggggaagcagtgaatgattcgcttccagtggtcgagtctgaaaatgcatttagtcgtgggaagtatttgatttatgtgggtggtggagataggtgcaagagcatgaaccattacttgtggagcttcttgtgtgcattgggtgaagcgcaatatttgaatcggactttggttatggatttgaaactttgtttatcttcaatttatacttcctcaaatcaggatgaggaagggaaggatttcaggttttactttgattttgagcatctgaaggaggccgcatcagtgttggatcacgagcagttttggcaagactggaataaatggcaaaagaaagatggcttgagtcttcatcttgttgaggattttagggtgacgccaatgaagctttctgaggtaaaggattctttgattatgagaaagtttggattggtggagcccgataattactggtacagggtttgtgaaggagagactgaatctgttgttcaaaggccatggcatctgttatggaaatcaaggaggttgatggatatagtgttggcgattgcgtcaaagttgaactgggattatgactctgttcacattgtgagaggggagaaggcgaggaacagggatctgtggcctaatcttgcccaagatacttcacctgatgcccttatctcaaccttgcagaataagattgaagacggaaggaatgtttatattgcaacaaatgaacctgatacatccttctttgatcctctgaaagacaaatattcgactcactttcttgatgaatataaggatctttgggatgagaacagtgagtggtattcagaaacaaaaaaccttaacaacggagtaccagttgaatttgacggttacatgagggtctctgtcgatacagaagttttcttgagagcgaagaaacagattgagactttcaacgaactgaccaacgattgcaaagacggcatcaacacttgcaatacagcatccagttaaaaccctatgaatccagtccgagacttcatcaaaacaccaaggcatatccacgtgtatttttaactatagtctttgttgcctttaatcaaatttatgccttacgtggtagtattatcagctggtggcatttttgaattttgtacttgtacaatatttattatcagtgtttgaggacttagcatc

SEQ ID NO: 22427 - DNA, 1047 bp, Gossypium hirsutum
  Clone ID: LIB3583-011-D11_FLI
gtttgaaaaactctgttttcctttttttccttttcatcaaaagcttgggtttctttttcttcttttttgcgccatgttgctgaaagctgttccaactttttcttcgttaaatcctcaactggaaaatcagggtgccctgttttcctctttttcttcttcgattaatcatcagctatcttctctaagaaatggacctgggtctcttgtagtttgtgcagccaaaggagccaaccacaagccactaagtggtgttgttttccagccctttgtggaagtgaaaaaggaacttgatcttgtcccctccgtgcctcaactttctctggctcgccaaaagtttactgatgactgtgaagcttccatcaacgaacaaatcaatgtcgaatacaatgtttcctatgtgtatcatgctatgtttgcttacttcgatagggacaacgttgcactcaagggtcttgccaagttcttcaaggaatcgagtttagaagagagagaacatgctgagaaatttatggaataccagaacaaacgaggtggaaaagtgaagctgcagtccatagtgatgcccctctctgagtttgatcatgcagagaaaggagatgcattatacgcaatggagcttgccttgtccctggagaaactaacaagtgaaaagctctttaacctacgtaatgtagccgtgcggaaccatgatgtgcagttgacggatttcattgaaggcgaattcttagctgagcaggtggaggccatcaagaaaatatcagaatatgtagctcaattgagaagagttggaaaaggacacggggtgtggcacttcgatcaaatgcttcttcatgagggagaggaagctattgcatgaagccccaacttgctgcttcgttccatgtcaaaagtttgtgcataaggtcttatttcagtagttctttgttgatatattttggctgtaagttgaaagatagtgccggatctttggtttgatgataaagctcgtaagggatttatttttggtagtccttttaatcagagtagttatagattcgtggatttcct

SEQ ID NO: 22428 - DNA, 2240 bp, Gossypium hirsutum
  Clone ID: LIB3583-017-F6_FLI
atttaaaggaaaaaaaaagaacaaaataaaataaagttgcagaaactgagtgcaaatcttactaagccccagctcgaactcctctgtcccattaactgtatgagagagaggaaatctgattttcaatttcatcactgcatcttctctttgcttttggcctcaccttcagaaaggtaagtcaagttctttagattgcttgccgctttttgagtttcaagatctatgaaccccagatctgtagagccttgatcttattgctgaattcttgaattttagtagtttgggttcttttgctttttccttaataactagatttagtttattgtaaggtcattttagctcattcaggatgttgggtcgtcctgggttatctagaactggaagctttaggcctgagaatctaggacaaaatgctttgcatatgattggcaatctttgtttcactatatttgtaattggtgtcctagttttcaccattatagctgctacttatgagcctgaggaccctcttttccacccttccaccaagctcacgactttcctcacgtccacatcaaatgccaccttccaatcggataacacggttgttaaaaccggagaggactttatggccgccaaccagactgcatttgccacttttatcaatgtgacggatgtagtagaaatcaaggaggagcgtactgaccaaactagttcatccgaatgcgagggtgatccgagaaaaccacttaattgtagggacccagaagtgttccatttgatgatgaaggaggctattgagcgttttaaggatatacatttttatcggtttggaaagccagcaccagggcctgaggagaatacttgtgatatggcctggcggtttaggcctaaggaagggaagacagctgctttttataaggattataggcggtttgtgattaatagatctgagaattgtacacttagtgtgttgagcattggggattatcattcaggtgtgaatgcaaggaagaggaagaataagaatcaaaagcctggatttgagaagacatctggtaggcaggagcaagttgttgcggctttgcctgttgttggggaaacagtgaatgatttgcttccagtggtcgagtctgaaaatgcatttagtcgtgggaagtatttgatttatgtgggtggtggagataggtgcaagagcatgaaccattacttgtggagcttcttgtgtgcattgggtgaagcgcaatatttgaatcggactttggttatggatttgaaactttgtttatcttcaatttatacttcctcaaatcaggatgaggaagggaaggatttcaggttttactttgattttgagcatctgaaggaggccgcatcagttttggatcacgagcagttttggcaagactggaataaatggcaaaagaaagatggcttgagtcttcatcttgttgaggattttagggtgacgccaatgaagctttctgaggtaaaggattctttgattatgagaaagtttggattggtggagcctgataattactggtacagggtttgtgaaggagagactgagtctgttgttcaaaggccatggcatctggtatggaaatcaaggaggttgatggatatagtgtcggcaattgcgtcaaagttgaactgggattatgactctgttcacattgtgagaggggagaaggcgaggaacagggacctgtggcctaatcttgcccaagatacctcacctgatgcccttatctcaaccttgcagaataagattgaagatgggaggaatgtttatattgcaacaaatgaacctgatacatccttctttgatcctcttaaagacaaatattcaactcactttcttgatgaatataaggatctttgggatgagaacagtgagtggtattcagaaacaaaaaaccttaacaacggagtaccagttgaatttgacggttacatgagggtctctgtcgatacagaagttctcttgagagggaagaaacagattgagactttcaacgaactgaccaacgattgcaaagacggtatcaacacttgcaatactgcatccagttaaaaccctacgaatccagtccgagacttcatcacaacatcaaggcatatccacgtgtatttttaactatctttgctgcctttaataaaatttatgccttacgtagtaccgtattatcatctggtggcatttttgaattttgtacttgtacaatatttattatcagtgtttgaggacttacatc

SEQ ID NO: 22429 - DNA, 1150 bp, Gossypium hirsutum
  Clone ID: LIB3584-030-C2_FLI
ctctctcaatctttatctccttcaattgtttgtttttgggttagaaagctctgtttttttattacccttttcatcaaaaagcttcaatctttcaaccatgttgcttaaagcttcccctgctttttctttgttgaagaatccccaagttgaaactcgggttcctctgttttcaagaaacggttctggggttgggtctggggctgttgttgtttgtgctaccaaaggagccaataataagccattaacaggtgtgatttttgagccttttgaggaagttaagaaggaacttaatcttgtcccaactgtgcctcaaatgtccttggctcgtcaaaagtttgctgatgagtgtgaagctgccatcaacgaacaaatcaatgtggagtacaatgtttcatatgtctaccatgctatgtttgcctattttgatagggacaacgttgctctcaagggtcttgccaagttcttcaaggaatcaagcttagaagagagagagcatgctgagaaattgatggaataccagaacaaaagaggtggacaagtgaagctgcaatccataataatgcccctctctgagtttgatcatgcagagaaaggggatgctttatatgcaatggagcttgccttgtctctcgagaaactaacaaacgaaaagctcttgaacttgcacaacgtggctgagcgaaaccatgattcgcagttgaccgatttcatcgaaggcgagttcttagctgagcaggtcgaatccatcaagaaaatatcggaatacgtggctcagctgagaagagttggcaaaggacatggggtgtggcactttgatcaaatgcttctccacgagggagctgttgcatgaaaacttgaccagagaaaccgccgcttgcttctgataccagcgatccttcttttaagttcccgtgttagtagttgttgagagattaagttttgcaagttgtatggctagtttagaaaactttgtgttgatgatataagaagattgagagactcaaaagggataatttgtaagtcctcttgatcatagctatagattttcatggtttttgacttttcgtatcgacatttttcgactgttttttcttcggttaaatgctctgcatagttagcagataaaataatacaagtagggatcattttg

SEQ ID NO: 22430 - DNA, 2358 bp, Gossypium hirsutum
  Clone ID: LIB3585-013-A8_FLI
tccattcctaaaaacctctccacaatgcttttgagaccagtttcatctttgtgtgtgcaagccaagcaaggggataatctaatttgttcccttaagggctcccctgtaacatcatcatcatcatctgctctgagttttcttcccagaaaacatggaagggctttgggtgtttatgcatccataggaaccaacaatcatgcacttacaggggtagtgttccagccttttgaagaggtgaaaaaggaggaacttgatatcccaatcgctcctcatctttcgctggctcgccagaaatttgctgatgcctgtgaagccgccatcaatgagcaaatcaagtgagttgtgctgcttcgcgttttgatatttttatcagtttcttgatttatcggggtggttatttattttgtgtgacagtgtggaatacaacgtttcctatgtgtaccactcgttgtatgcttacttcgacagagacaacgttgcgctcaaaggctttgccaagtaagattataacaagaagctctccaaagttatttttttaaatatatatatagatatctgtatgacgtgataaattttttatattgtcgtcgtcagattcttcaaggaatcaagtgaagaagaaagagagcatgcggagaagctgatggaatatcaggttttctttcatgtctatttctttttgggttaatcacaccaagcgtattcaaactatggcccaggttttaaattaatcttcaaatcttataaacctttcaattcactattcatattaatcactttctatttacctatctattagtttgaccattaaatgttagctcaaatatgatatggatcatatttaaaatatagagtttaaacttactatcgcatagacaatttgaatctaatgtattaaaaaaatagtcctaacactatttattctctttaacatatctagcccgagttattcatatattttcacgatagtaaaaatacaattttacaatttaaatagtttatctttataatttttaaaggattaaatttaaaattttataaattataaaaaggtgtaaatgaaaaaactttccattttaaatgggtaggccactgctagtcccttggctctgtcactggttatacactgatttaaaatttgattcacacattttaaatatggtccatgtcaaatctaaactagcatttaaggtcagagttgatgttaggctaatggaaggatttggtttatagaatattgatactttgaagacttaattagaacattataaagtttagggatcgatttagaatccgagtcatagtttgaagacattggtgcacttaacccggttttttttcgtattatatattggagtgggagcatataaatataatagaattattaatttcaactgtttaattagaacaaacgaggaggaagagtaaaactacactctattctgatgcccccttcagagtttgatcatgctgagaagggagatgcactatacggtgagtcggtgtccctcttacacgtttattctgatctcttttcggctctcaaatgcaatgctaattgcttcatagttcacaatatctcataattttgctgttagagtttgtttaaatgttgtttctctgatctattaacttttgccttctttgttgagttcaggtatggaattagcattgtccttggagaagctgacaaacgagaagcttttgtgcctgcacaatgtaacactaattgtttatagccatacgccataggtgtagtagatgagatgtgtgcgtctacaactaatctaatggtcttaatttaacaggtagcggtgcaaaacaatgatgctcagatggccgatttcatcgaaagcgaatatttagctgagcaggtgagctcactttcattcttagtatccaaaaaagaaatctttcaaacacccacaatttctaattatctcaagttttcaggttgaagccattaagaagatatcagaatatgtttctcaattaaggcgggttggaaaaggacatggtaagccttgcaagctatatgtatcatttgttttcataaaatcattgggttgataatgtttcagttacattgtaataaccgagtgcaatcggcttgtaggcgtgtggcacttcgatcaaatgctactccacgaaggggcgtgatgctgcccataatcaccatctaaatgctgcatctttctgttgttttagtgcttcacagatgttctatatatacatatatgatgagggacaggtagtggagaagaataaattgttgttgtaaaatatctatatctatatgccattgtagcagccccttaacatttgccatgtaagagacaataaacagcttggtttttg

SEQ ID NO: 22431 - DNA, 1360 bp, Gossypium hirsutum
  Clone ID: LIB3585-022-B2_FLI
ctcagcgcccacaaaccacatatcaaaagtagcttatatacaagtaagttaaaccgtcgaaacaaaatgctacctccatgccgacgctctttcaccgccaccactcatggtaccacccaaggctgatcttctaacttattatttcctaaatctgccgttcttttttatatataatagatagaaaattgaagacaccagcgataccagattcttacctctttttttttatttcccaatttaagccaatgacggaaacgccgttctcgaagctccctgaggacgtcgttttaaatatattttcgaagctcgaagaggatctcgctagctgggcaagtcttgcttgtgtctgcaccagattctcttctctgattcgtaatacctgcttgaagcttaaatgttccaaaaccatacccgccgtttccgccgaccttctctcctcttcctccgccccacccggcggttgggcttctcttcataagctgtctgtctgctgtccaggcctccttcacgccggtgtccttcttgacaactctgatttcggcctcgaacgcgagctcggccctgacgagaattatcaaaggccagctcattcgcatctctcgacgccgtccgctgaccctaattcaagcaaaacggaatgtaattccaatccgaacatggaaacggacgttcccggctccgattgtccctggtcacttttcgatgatctgtatttcgacaccgtttataacgcgtccgattcgatggacagctacccgtcggaaactatggacaccgcgacgatcaaaacggggcgtgaatttcccgtttgtaaaagaaggaagatttcaagatccctaaggtcccatttagcaaccggggttcggaacttaagccgagaacaagggaacaagctattggcgagccggttccgaggtgattgcttatacatttgcgattggcctgggtgcgtccacacggaggagaagcgaaactacatgctgttcagaggggttttcaagaatttcaagaaatcccgtgtgtggaggactataaacgacgggaaccgaagcaagatcgatctggactgcgcgttttgctcgtgcaaggagacgtgggatttgcactctgccttctgtctgaggcgggttttcgggtaccatgacgatggggagccagttgttcgagctttcgtctgtgagaatggacatgtttctggtgcttggactgatttgcctttgtacacttgaataccaattatttgcagttcatcgaaactaaaagtaagctatttttgtttattgtaataagaggaattgggtttgagatatatttagtattattgggtttgagatatggatttatatatatatgattcctt

SEQ ID NO: 22432 - DNA, 1048 bp, Gossypium hirsutum
  Clone ID: LIB3585-032-G1_FLI
ctttatctccttcaattgtttgtttttgggttagaaagctctgtttttttattacccttttcatcaaaaagcttcaatctttcaaccatgttgcttaaagcttcccctgctttttctttgttgaagaatccccaagttgaaactcgggttcctctgttttcaagaaacggttctggggttgggtctggggctgttgttgtttgtgctaccaaaggagccaataataagccattaacaggtgtgatttttgagccttttgaggaagttaagaaggaacttaatcttgtcccaactgtgcctcaaatgtccttggctcgtcaaaagtttgctgatgagtgtgaagctgccatcaacgaacaaatcaatgtggagtacaatgtttcatatgtctaccatgctatgtttgcctattttgatagggacaacgttgctctcaagggtcttgccaagttcttcaaggaatcaagcttagaagagagagagcatgctgagaaattgatggaataccagaacaaaagaggtggacaagtgaagctgcaatccataataatgcccctctctgagtttgatcatgcagagaaaggggatgctttatatgcaatggagcttgccttgtctctcgagaaactaacaaacgaaaagctcttgaacttgcacaacgtggctgagcgaaaccatgattcgcagttgaccgatttcatcgaaggcgagttcttagctgagcaggtcgaatccatcaagaaaatatcggaatacgtggctcagctgagaagagttggcaaaggacatggggtgtggcactttgatcaaatgcttctccacgagggagctgttgcatgaaaacttgaccagagaaaccgccgcttgcttctgataccagcgatccttcttttaagttcccgtgttagtagttgttgagagattaagttttgcaagttgtatggctagtttagaaaactttgtgttgatgatataagaagattgagagactcaaaagggataatttgtaagtcctcttgatcatagctatagattttcatggtttttg

SEQ ID NO: 22433 - DNA, 1353 bp, Gossypium hirsutum
  Clone ID: LIB3585-041-H7_FLI
cttttctctctctctttctcctttcttcacacccgacaatctaaactacatacaagaaagtgtgtttggcaaaagagaaaaaaaaaaaaaaaatcaaagatggcggaaaaagaagatctgggtttgagtctgagcttgagtttccctcagaatcaccactctttacagcgaaatcttaggccttcgcttgttccttcctctgctaattcttgctcttctctttctactttaacccttaacaaacactcatggaatgattcttctcctccttcagatcataactcggaatcattccgggcggagatggggtcaatttttagaggaatcgacatgaacatattgccatcgactgtagattgtgaagaagaagctggggtttcatctccgaacagcacgatatcgagcgtgagtggaaaaaggagcgaaagagaaggcaacggagacgagcttgagatcgaaaaatcctcatctcgtggaatcagcgacgaagaagatggcgacacttcgagaaaaaagcttagactttctaaagatcagtctgctattctcgaggaaaactttaaagaacacaacactctcaaccccaaacaaaagttagcattggctaagcagctgggattacgacccagacaagtcgaagtgtggtttcaaaacagaagggcaaggaccaagctgaagcaaacggaggttgactgtgagttcctcaagagatgctgtgaaaatctgacggaagagaaccgacggttgcagaaagaagttcaggagctgagagcactgaaactttcctccacccagttctacatgcaaatgaccccacccactaccctcaccatgtgcacatcatgtgagagggttgcggtcccacccaacccaccatcatccgccaccgttgatccacggtcccatcatcagctagcccaaacccatcatagagctttccacatgaacccttgggctccatccgccgctcatagaccgttggatgctctccgtcctcgatcgtaattacaacccatgaacaagggcattccgttcaacgcaaaagaaatcatgtgtggagtagtagtctttagggtctagaagatatggtggttagaatgtgattttggtgggtcttgatgttttgtattattggacccaaaccaagcttttgacatatttaactagtttaatttatctttggtgatgctaattacatattccttcttcaatttcaatagtggggttgaaagatcaaactgtgtatgtgtgtaaagtagagtgcaaaatgtctagttattaaattttgaccaaaatcttttgtgttacagattccaatttcaagttacaaggaatctattctttttgtttcgt

SEQ ID NO: 22434 - DNA, 2352 bp, Gossypium hirsutum
  Clone ID: LIB3585-052-B3_FLI
ccccattcaacattcacatgtaagcttctttttttttctttctctaattcatttacagtcatcaagatctatttagtttctactactgggttttcaaaaacaagcaaaaccccattatttagtgatcaaattctgtttgtttggttgacttattttgagatctgattagtttttgaaattgggttttgaaaaatgaggaaacccacaaaagaatcagagttaaacactgagccaatcggtcaaaatctgatcaaattgattagtaatctctgtttctctgtttttgtgttgtcggttcttatatttacagccattgctatcacttatcaaccaccagatccatggctggaatcagctccttctttaaccaagctcttcactcaaactgaaaatgccacttttaaaatcgatgattccattgttaaaaccggtgaagatttggtttcttcgccggttccggctattccccctgctttagcacctaatcccattactgaaaccgatgattccattgttaaaaccggtgaggatttggtttcttcgccggctccggcaattccccctgcattagcaaccaatgattccgttgtaaaaaccggtgaggattcggtttcttcgccggttccggcaatgtcccctgttttagcaaccaatgattctgttgtaaaaaccagtgaggattcggtttcttcgctggctccagctatgtcccctgttgtagcacccaatccggttactaaaaccaatgattcggttgttaaatccggtaaagaaagcaaatcttcactagctccggcaatgtcccctgctttagcacccaatcctgttactaaaaccaacgattcgctggtcagaaccggtccggctccagctccggcaacgtcccttgctttggcacccactcccattgttgaaaccgaagcaaaatccccgaaatccgattgtgaggagttaaaacacgtgaattgttcagatccactggttttacgcgcaatcaagaaattcaactcaaaaactttcaagtccattgtgattttggagtatcaaacaccggtcaacagctcgaaaccggatgaatgtgatgttgcttggaggtttcggaataaaaaggaaagatcttggagaaagtacagagattttagaaggttcgagttcgggatcggagtgaattgtacttacagagtgatccatacaggccgttggcattcgggaatcaacgctcgacgaccttggattcggcctaacccaaagttcactcaaccgatacgtgatgaagagataaacgatacaatcccgactttaccggaaacgaactttaggaaagggaagtatttgtattatgcaagaggaggagattattgtaagggaatgaaccattacttatggagtttcttatgtggtttaggggaagctgtgtatttgaatagaacatttgtgatggatttaaacatgtgtttatctgcaactcatagttcgagtcacaaagacgaagaaggcaaagatttccggttttatttcgacttcgagcatcttaaagaaacggcgtctgttgtggaagaaactgagtttttacgagattggaagaaatgggataaaggtcataaaagaaaagtaccattgaagaagataaagagccataaaactacaccaatgcaactcaaaaaggataaaagcacaatcatatggagacaatttgatggaccagagcctgataattattggtacagagtatgtgaagggcaagctgctaagtacattcacagaccgtggcatacaatatggaaatcgaaacgattgatgaacatcgtaaccgagataagcggacgtatggattgggatttcgaagctattcacgtcatccgtggtgaaaaagcacaaaacaaacaactttggccgaatctggattccgatacctcccctaacgcaatcttaaccaagcttcaacaactggttcaaccgtggaggaacctttatgttgcgacaaacgagcctttctacaattacttcgataacttgaggtcacattacaaggttcatttgcttgatgattacaaggaattgtggaacgaggcgagcgagtggtacaacgagacgacgttgcttaacagcgggaaaccggtcgagttcgatggttacatgagagctgttgtggataccgaggtactttatcgagcgaaaactcgggttgaaaccttttataatctgactaaagattgcaaagatggaattaatacatgttgaacaggttgtttaattgattcatattgctttgattatattacaaaatgtaattggttgatgtattcttgtattgttcttttattacaatttatgtcattatcagttcatcat

SEQ ID NO: 22435 - DNA, 1615 bp, Zea mays
  Clone ID: LIB3587-001-A3_FLI
gatcataccaactgcacttgttccacaaatgggaggaaacaatgaggacaaagcagtggttatccagacattgctgttcgttgcaggtatcaacaccctcctgcagagtttctttggtaccatgttgcctgcagtgatcggcgggtcatacacctttgttctgcctaccatttcgatcatccttgctggacgttatgctaatgaacctaatccacatattaaatttctccgcatcatgcgtgggacacaaggtgcgttgattgtggcttcagccttacagattatagttggcttcagtggcctttggcgtaatgttgccaggtatctgagtccactttcagctgctcctttggtggcactagttggatttggactgtatgagctaggatttccatcggttgccaaatgtgttgagattggtctacctcaactcatccttcttgtgatctttacaatgtacctgccacatgctgttcacatgctgaagtctatcttcgatcgatttgctgtcctgttcactatacccatagtgtggctctatgcatatcttctcactgttggaggagcatacaggaatgcaccaccaaagactcaatttcattgccgcactgaccgttctggattaattggtggcgcaccctggataagagtaccatatccctttcagtggggtgctccaacttttgatgcgggtgaagctttcgcgatgatggcagcatcatttgttgctctcgtggagtccactggggccttaattgctgtctctaggtatgctagtgctacaccaatcccaccctctgttcttagccgtggtattggctggcagggcatcggtattcttctggatgggctatttgggactggaaatggatcttctgtatcagttgaaaatgctggtttgctagctttgacacgcgttggtagccgaagggtagtgcagatatcagctggtttcatgatattcttttctattctcgggaaattcggagctgtgttcgcctcaattcctgcacccatctttgcagctatgtattgtattttctttgcttatgccggttctgctgggatcggcttccttcagttctgtaacctcaacacctttaggaccaagttcatccttgggttctcagttttcatgggcctttctgttcctcaatacttcaatgagtacacatctattgctggttatggtcctgttcacacacattcaagatggttcaacgatatagtgaatgtgatattctcgtccaaggcgtttgttgctggcttcgtggcatatttgctggacaacactattgacaggcatgaagcttcagtcaggagagaccgaggctaccattggtgggacaaattccggtcgtacaggaccgatacaagaagcgaggagttctattccctgccattcaatctgaataagttcttcccatcggtctgagcttttgctgtggttaatgtgagatgctcttgttactctggattctggaactgcccaccccctgttctccggcggtggcaatgtgatctggattttctcggtacatgaaaaaattactgtatattaaaacccgctcagctcgggtttcacctccttcccgtgcttcacgggaatttggcg

SEQ ID NO: 22436 - DNA, 925 bp, Zea mays
  Clone ID: LIB3587-195-A1_FLI
atctggccgccctgaagcgcgcggctaaccagcacggcgatgcggaacagcggctgattgccatgatggtggccgccctgtcctcccgcattgctccggccgcctccgccccatctcaactcctcgccgacctctgcagcgtcgagcagcgcgccgggtcccaactcctacaggacctctccccgtgcttccgcgtcgccctccacgccgccagcgccgccatcgtcgaagcggtgggcgaccaccgcgccatccacctcgtcgacttcgacgtcagcttcccgcagcacgcggctctcatccagtacctcgccgaccgacgcgtgcagggcaggtccctgaaggtcaccgccgtcaccgacccgagctcgccgttcacgcagtctctaaccgcatcgctaccagccatcgaggagcggctgaagaagctcgccgagcgagctggcgtggagtaccgctttacagtggtcagctgcagagcagcagagctggatgcgtccaggctgtgctgcgagccgggggaggcggtcgcggtcaacctcgccttcgcactctcccacgtgcccgacgagagcgtctctccggccaacccccgcgacgagctgctccgccgcgtgcgcgcgctgggcccgcaggtggtgaccctcgtcgagcaggaactgaacaccaatacggcaccgctggcggcgcgcttcactgacgcgtgcgcgcactacggcgccatcctggagtcgctggacgcgacgctggcgcgggagattgcggagaaggccagggccgaggcggccctgtcgaagaaggcggcgaacgcggtgccgtattggtgttcagttcctgctcgacgagggtcaccacctgcgggcccagcgcgcgcacgcggcggagcagctcgtcgcgggggttggccggagagacgctctcgtcg

SEQ ID NO: 22437 - DNA, 2051 bp, Zea mays
  Clone ID: LIB3587-195-B2_FLI
tccgatgtgacagatgagatggaatcgtactctttacagcttcaagaaccagatgataaatctccattggaggtaaagaaaatgagtcacaatgctctagctgcccttgtgaagtatttgcagaagaaaagaagtggaatatttgagagagcgacggctgaagtaacagaggaggtggtctctggagctgttcaccacagcttaaaattatctgagccatataagtcaaagaagctgagcaagaaacgagctcagacacatacaagctctattgctagagaaatggcaactgtactggatacttgtctgcttcaagctcttattcttactgggcagtcctcaggggcaatagagttgttgaaaggactcaattattgtgacctgaagatatgcgaagagtttttgaaggaaaggagagaatatatggttttacttgaactctataaaagcaatgaaatgcaccgtgatgctctccaactactcaatcaattagttgaagaatcaaaatctgagacggagaatacatattttaataaaaaatttaactctcaaatgatacttgaatatctcaggcccctttgtagatctgacccaatgctggttttagagtcttccttgtacgtccttgagcgcaacccatcagaaactattcagctctttttgtctgaaaatgttccagcagatttggtaaattcatatctgaagcagcatgccccaaatttgcagtcaacttacttagagctaatgctctcaatgaatgatactgggatcaaccctaatctgcaaaacgagctggtacaactgtacctttctgaagttctagactggtacaagattctgaaggaagagggaaactggacagagaagacatattccccaacacggaagaagttaatatctactttggagagcaattcaggttacaatacagacgtacttcttaagcgccttccccaggacgctctttttgaggagcgagctatattgtatgggaaaataaatcaacacctcagagctctctctctctatgttcacaagcttcagatgccagagcgagcagttgcatattgtgaccgtgtttatgaagaaagagaacaacaaccgtccaaatcaaatatctattttaatcttctacagattcatctgaacccaagaaaagctgaaaaggaatttgagcagaaaattattccagttgcatcacaatactctggaatccaaaaggctagtgctactaagcccaaagggggtcgcataggtaaaaaggttgtagagattgagggggctgatgacatacgctttagccccagcggaacagatagtggccgaagtgatggtgatggagatgatgtaaatgaccgaggccctataatgttaaatgaagcactggaactgttgagccaacggtgggacaggataaatggtgctcaggctcttaggctgttaccaagagatactaaactccaggatcttgtatcatttcttgagccactattgcgtaactctagtgaacatcggcgcaattatttggttatcaaaaacttgattttgcgggcaaacttgcaggtcaaggaggatctgtataatcggtgtcaagctgttgtcaagattgatggagatagtacgtgttctctttgccataagcgtgttgcaaatagtgcttttgcaatatatccaaatggacagactttggtgcattttgtctgctttaaagaatcacagcaaattaaggccgtcagaggagcaaattctgtgaaacgtagataatatggccgtgatccaggtttggttgatgccagcttatggaattccttctctttggcttcacaatggattttagtggactgcttcagaagtttttactggagtaatcttcactctcttcagagatcgagtttatagccgtgcgtgtgtgctcggctgctcgctctctgttttctggccagcgtactggaaaactggaacccctttcttttggttttcatgtacagaatgtaaatgatactgtaaagtttcggtcaacagattgatgatggtcttgattatagtgccgc

SEQ ID NO: 22438 - DNA, 1234 bp, Zea mays
  Clone ID: LIB3587-195-C11_FLI
ggcgtgacttctcccgaaacctccacatacccaaacccaccgaccgccgcctaggcttccacctctcccgctcaaactccggccactgaggtcgaacccgagcccgcgccgcagcggcacgatggtgaacgacgccgcggcgatggccgtcgtgagggcggcgcgcccagccctccgtggcgcccacgatggcgtcgccttcgccgcccacgccgccttcctcgccgatgggtactcgctctgcgccgtcggccctgccgcgctcgccgacccctcgcccttaggtgatgaggaggtggggattgatggttggaacatcatggagaattgttacgcctttttgtatagcaaggaggagaagggcaagaagaaaagggtactagtgaaatgtctggtgatcggtgaagtacttgcaattgatgtcttggatcttgaggcacaagataaggcgccttataatatccagattaatgtgaaagacttctttgtcgaagagcagccaaagaattatggggatatgtacaagaattttacaagtctcattgagactgtgaactcaaatgtgttgtgcaaattggatggagacggttccggtgctgaggctgctaagagcactgccgccgctgctgctaagaactctgatgggagaagttcaccaatacagagctctggagatccaggtcctagaactgctgacccttccggcctaatttatcctccaatagcaccgattggttctgatgatctctaccctgggcctggtgcaggcttctaccctcacagtggcattgggagcggtggcagcatgcatgttggtcctaatgatccgcgcttctttccttctaatcccttctctgccccatttggtgggcttgggagtgttccaccaggtagtcgctatgatccaattggcccacctgacgtcccagggtttgagccatctagctttgttaggcgtccaaggcggcctccaggcgggagcacccaccccgacctcgagttcttccagcaaggcccagacttctgagagtcgcgcagaggccggccggagcctcgccctaccctcacgaaataacttcaaaatgctgagccctcgagctagatatctcgcttggtgtgattgcaactgctgtatcaagtatagtcctagtgcgctttggctgtaaagatggatgtgaacatcgtcctagtgtatttactcttaattccaaaccatcgcctgtcatagcctaat

SEQ ID NO: 22439 - DNA, 596 bp, Zea mays
  Clone ID: LIB3587-195-D12_FLI
aatggccaacgaggagccggctcccgtcaccgctcctgccgccgccgccccagccgggggcgaccattctccggccttctcgttcagcatctggccgccgacgcagcgcacgcgggacgcggtggtgcggcgcctcgtggagacgctcgcgggggacaccatcctctgcaagcgctacggcgccgtgccggccgccgacgccgagcccgcggcgcgcgccatcgaggccgaggccttcgacgccgtggccgccgcgggaggcgccgctgcctccgtggaggaggggatcgaggcgctgcagtcctactccaaggaggtgagccgccgcctcctcgactttgtcaagtcccgctccgcggacgccaaggccgacccgccgtcggcggaggccctggcccctgacgcgcccgaggcccagcccgcggcgtgagcgccggacagccagtcactccgtacctgatcttcctgagatgagattgagtcgtgtctggagtttgtgtgaagactgcagcctgtgtgtgtggcttgggtctgggtctgtatgacttgaacgttagctgtttgcacatctatgcagttcttcttccacggatgtc

SEQ ID NO: 22440 - DNA, 831 bp, Zea mays
  Clone ID: LIB3587-195-D3_FLI
gtctccgaccacttcacctccgatcccgccaccactacccaccctttcctttgacgtcccgatggcacctgtagatctaacccccaaacagcccaggaaggcctacggcggcgacggcggcgcctactacgagtggagccccgccgacctgcccatgctcggcgtcgcctccatcggcgcagccaagctctcgctcgccgccggcggtctcgcgctccccagctactctgactcagccaaggtcgcctacgtcctccaaggcacgggcacctgcggcatcgtcctcccagaggcgacgaaggagaaggtggtggccgtgaaggagggcgacgcgctggcgctgcccttcggcgtggtgacgtggtggcacaacggacccgccgcgccgaccccgctcacggtgctcttcctcggcgacacctccaagggccacaggccggggcagttcaccaacttccagctgacgggcgcgaccggcatcttcacgggcttctccaccgagttcgtgtcgcgcgcgtgggacctgccggaggcggacgcggcggcgctggtgtcgagccagccggcgtcggggatcgtccgggcgtcctcgtccccgctgccggcgccgtcgccgcgggaccgcgagggggtggcgatcaactgcctggaggcgccgctggacgtggacatcccgggcgggggccgcgtcgtggtgctcaacacggccaacctgccgctggtcaaggaggtcgggctgggcgccgacctggtccgcatcgacgcccactccatgtgctccccgggcttctcgtgcgactcggcgtaccaggtcacctacatcgtccgcgg

SEQ ID NO: 22441 - DNA, 952 bp, Zea mays
  Clone ID: LIB3587-195-E2_FLI
ggattccagagagcccctctcgggtagggaagggaaggagaggcgaagcggaggcgagatgggggcggccgaatccgtgccggagacctccatacacgaattcaccgtcaaggattgcaacggcaaggaagtgagcctggaaacctacaaggggaaggtcctccttgttgttaacgtcgcctccaaatgtgggttcacggagaccaattacacgcagctgacggagctttatcagaagtacagggacaaagacttcgagatattggcattcccttgcaatcagttcttgcgacaggagccaggtactgatcagcagatacaagactttgcttgcaccagatttaaagctgaatacccagtttttcagaaggtgcgcgtaaacggaccagatgcggcgccggtttacaagtttctgaaagctagcaagcctggtttgtttgggtcatcaaggatcaaatggaactttaccaagtttctcgtgggcaaagatgggaaggtcatcgagagatacggaacctcgacagctccaatggcaattgaggtctctttccctctctgtctctgtctctctctccccctctccagacgtctgcctacgttttctttttgatgcatgggttcgtgtttcttggactctgcagaaggacatccagaaggcccttgaggaataattttttgtgagcttgtctcgtctcatccaccacacacttgcagcagaaataggcacttgctgaaatatttcgtcgtagtaacattcagaccggacgtctttgcttatctgtagtaaaaattctgtgtaatgttaccctccttttcgccttccgttcgtgtaagtagaggttgtattaagtagccatcatctgctagcttttgccctttctgtgtgaagaagtgaagacatggtatattgatgcaaaacttaacgttggtgaagcatgtatgttttgacgct

SEQ ID NO: 22442 - DNA, 896 bp, Zea mays
  Clone ID: LIB3587-196-D2_FLI
gctctaggccgcacgccgcaggccgcatcagcttgagcgtctaggactaggaagaggtagcagcgttcgatggccggcgacgactgcgacagcagcaagccaaagcctccgccgccagcggcggagggtgcgggcgaggtcgtcgaaggccccgtggctgcggacaaggcgctgcacgcgctgggcttcgagttcacccgcatcggcgcgcgcgaggtcgccggccgcctccccgtcacagacacctgctgccagccgttcggggtgctgaacggcggcgtgtcggcgctggtggccgagtccacggccagcgtcggcgcgttcatggcgtccgggtaccggcgggtggccggcgtgcagctgtccatcaaccacctccgccccgctcgcctcggcgacgtcgtccgggcgcaggccgtccccgtccagctcggccgcagcatccaggtgtgggaggtccagatatggcgagcggacccttccacaggggagtgcagagatctggtgtcaacagccagagttaccatgctgataataaccaacccatcaagaccagaggagatgtcgactcaccaagcaagcatcaagaaatacgcaaagctgtagagagagagagagagagaaataaaatcaaccgctttcacctgattacacctcccagtactaggaacactaaaccaacatcatctccagacatttcactctccaactattcgatgctcaaagacgaacgaaggacatgtgtgtcgtttcttattggacaattgtgtcagtgcccctctgttttaagtaaaactatagattattatcctgttttttagactttgggtttttgtcccttttataaaaaaaaactgttgtataccattatttcgttagttacacttaacggtgtt

SEQ ID NO: 22443 - DNA, 801 bp, Zea mays
  Clone ID: LIB3587-196-F2_FLI
gtcaccactcccaagccagtacccacagtcctacgagcagtcgcacgcaagtgtcaagagacaaaacggtcgacatggctcgcacgcaatctgccgtagcggtcgccgtggtggccgcggtgctgctgctggcagcggcggcgacgacctcggaggccgccatcacctgcgggcaggtgagctccgccatcgcgccctgcctctcctacgcccgcggcacggggtccggcccctccgcgtcctgctgtagcggcgtcaggaacctcaagagcgccgccagcaccgccgccgacaggcgcgccgcctgcaactgcctcaagaacgccgccaggggcgtcagcggcctcaacgccggcaacgccgccagcatcccctccaagtgcggcgtcagcatcccctacaccatcagcacctccaccgactgctccagggtgaactaaaacctagaccacgcgcgacgacggccgcctgatcgatcgaccaaccattccgccgtcgccgccggccggatcatcgatcgtcgtcatgatgatatctatcaatctacgcgtgatgatcgatggctacttgtctactgctatgtactactaaataaaatctctccgtgtgtgcacgtacgcttgcatgtgcatggtagcatgtatgtacgacgtcgtccatgtatgtgtgtgtgacgtgtgagacagagagagagagagagagagagagagacaggatcgatcgagagacggtcatgtccttttggctgtttggtttattcatatcacaacttttgagtgtatacaagattatttatgtggc

SEQ ID NO: 22444 - DNA, 1610 bp, Zea mays
  Clone ID: LIB3587-197-B12_FLI
caactttttttattgctttgaatgatgatatattcaattattttgcaatactgtttaattcttgtcatcttgtgtatatattatgttgagttggtaggtcatgtgatgaggtataatataattgtgcccttatcctgttatacatttatatgttggccaatacaataccatatcttaggtctttgtatctttattggggaggtccacttctcttcttggatgcactgaacattccagagtatgctattgggtatgagttgtatggttgagtcgaggcttttcatgccgtctagatgatgaggtgcatgatgtagattatgcacacgtatagttccagttgatatgttgtcaaattatacacacatagaccataaactttctgcatggtgtccagagctgataatattttcccttgatttgttgttactatgtgttgggtgacaattagttaacctttggtgataaagttgctcgattctatctcttctcttttctaataactatagagaaacatgactgagaagggtagacctttgcagtggtgagaactgagtcaggggaaggcttgctcggtttatcccttccgcaccctactcatgtgggagtctactgcactggatcttttctttttatagacatgactgagtgatgatgttatttgttccatgcctttttcgtcatcagtatttatatctttccttgtctttttcaggacaagcctcagccgccacctgagggccgtcttcctgatgccaccaagggttctgaccacctgaggcaagtctttggcaagcagatgggtttgagtgatcaggacattgttgccctctctggtggccacaccttggtttgttgctgtccactcatgtttgcttcaggaatttaatgtgtatgcctgtactgatttagttttctttgaggttttattagggaaggtgccacaaagagcggtctggttttgagggggcctggactacgaaccctttggtctttgacaactcttacttcaaggaacttctgagtggcgacaaggagggccttcttcagctcccaagtgacaaagccctgctgagcgaccctgtcttccgccctcttgtggagaaatatgctgcagatgagaaggcattctttgatgactacaaagaggcccacctcaagctctccgaactggggtatgctgatgcttaaatggtccatatcctggagcgggacacaaactgctgcctgtatggactcgtgcgattcagggtgaaccatcagattgtctagtgtcttctttgtaataaatttatctgttcttggtactttgtctatggttgaatcggaacccattttccgtttgcctagattcttaatttctggtgctgtatccagctgaaactagtagatctatgatcttgtggctgcagcatgttcttgtcacttttatctggtctccgttggttcggttcacaggttgtgtgctttaaaaggctgtgcttaagtcctgcaattcgagtccaccaaactgtagggtgcaagtcgagattttattagtgatgcaagttgctggtattggtgcattatcgggctaatacgcttgcgttgccttctgattttataagtgatgt

SEQ ID NO: 22445 - DNA, 508 bp, Zea mays
  Clone ID: LIB3587-197-C2_FLI
ggaccggcaggccacctgcaactgcctcaagagcatgacgggccggctcggcggcggcgtcagcatggccaacgccgccaacatccccggcaagtgcggcgtctccgtcggcgtgcccatcagccccaccgtcgactgcaccaagatcaactgatcgatggaaccatagtggaggtagctcgctcgttggatggcagcgtacgtggccatcagcagcatgcagtcgtcgtcgtagcagagatgtcctagctacgtgtgtgtcatgcatcagactggcacataataaagaagtagatcatgcacccactagtgatcacttcgtctagtgtccctccgttcaatgtcgtcgtcgtcgtcgtgtaccttacgtgacatgctgtagcacgtacgctagcagagcagcacctcaatgtccttgggtttgctttgctggctctctgttttcgtcttgtgttgcttttaatctggcacaggtttctaaattataataatgaatacttttttgtcc

SEQ ID NO: 22446 - DNA, 588 bp, Zea mays
  Clone ID: LIB3587-197-D4_FLI
gagactggcaatgatgctgctgagtttattcttcttggtgctgatacagtacaggtatgtaccggtgtgatgattcatggttatccccttgtgaagaagctttgcgcagagttacaggatttcatgagagagcacaacttttcatcaattgaagagtttcgaggggcctcgcttccgtatttcacgacgcacacagatctggttcaccggcaacaagaggcggtcaggcagaggaaggccatcaagaagggccttcaatcagacaaggaatggacgggtgatgggttcgtcaaggagaccgaaagcatggtatccaactgatgcatctctgccaccccccaccgggccattccctccaccatgctccaacttcatctttttaataaacgcgcaccagaaatgccacacaccaagcatctagtcctcatctgtacatggttctgaaccttgggccttcagtctatagaacaggccatgaatccacacaaagtcgtgacaaccgggtgacattgagcgatatatttgtcatgtgaacattaatttgtagcactgagctgagggcttgaccttgtaaaatcttggagactt

SEQ ID NO: 22447 - DNA, 1130 bp, Zea mays
  Clone ID: LIB3587-197-F10_FLI
gacaaggcggcggcgacaagacacaatggggtgccggtcctgtgacaagcccaagatgaactaccgcaaggggctgtggtctcctgaggaggaccagcggctcagggactacatcctcaagcatggcctcggctgctggagtgctgtcccggcaaaggctggtctccagagaaacggcaagagctgccgcctgcgctggatcaactacctgcgccctggactgaagcgtggaatgttctcccaggaggaggaggacgtcgtcatcgacctccaagccaagctgggcaacaagtggtctcagattgcgatgcatctgccggggaggaccgacaacgaggtgaagaactactggaactcgtacctcaagaagagggtgatgcagcaggcccagggcgcgtcgtccaactccagccccaagagcccgcccgagctcacctccatgagcaccaccgccgacctgtcgtccatgtccatgcccatgcccatgcccatgcccatgcaccagcgccaccacgtcaagaacaacagcggcggcggcagcaccgcgacgtcgcacggccagcaggacgacgccaacatcagcggcagccatgcagcgctgtcggccccaccgccgccgcctctcgcccagcagccattcgagcaccaggcggctaggagcttcgtgttctcggactgggcgccggagagctactcgctgtccacgcactggcccgccgccacgtcgacctccgggaacgtgacgccatcccacggcagcaccgccgcagccgccgccgccgccttcggggaccagatgagcggcacatacggcgccggcgggctgccgccgcagcaccaggatcaccaccacagcaccgcgcccgccaccggcatcgcggggagtggctactttgacctgctcaatatgggagacatctacggtggattcagctcgacaaacaacgatgatctgctcttctgaactcaactgacgacgatggaggcgtgatcagtgttgtgcatgagtgagtcaaatggatgcagcgcgcggtatattgttggatttgttgcttcgtcttcttcttttgtacgtattttgtaacaaaattattatttgtaacaacattattaattgcgatgtagagaac

SEQ ID NO: 22448 - DNA, 1170 bp, Zea mays
  Clone ID: LIB3587-198-A4_FLI
gtcaaatcaacacaggctgttgtttgcttcttttggtaaaggctttagctgcggcagatccaccggcggcgccccgagaatcgaagatgccggtgaaggtgttcggatcgccgacgtcggcggaggtcgcccgcgtcctggcctgcctgttcgagaaggacgtcgagttccagctcatccgcgtcgactccttccgcggcaccaagcgcctgccccagtacctcaagctccaggtactttaactgaccgtgccattgcaaatgcacacgattgttgacgagggcgaaaacaatgctgcatgtatgcagccgcacggcgaggcgctcaccttcgaggacggcaacgtcaccctcgtcggtacgtacgtacacacgcaagcgacgcgagagagccaactgaccaactgaaaacgtaatggatcatggatggatggatggatgcatgcagagtcgaggaagatcctgcgccacatcgccgacaagtacaagaaccaggggtacagggacctgttcggcccgggcgcgctggagcgggcctccatcgagcagtggctgcagacggaggcgcagagcttcgacgtccccagcgccgacatggtctacagcctcgcctacctgccgcccgacatgcagctcgacggcaggggcgtcggcggcctcccggcggcgacggggacgatgaacccggcgcaccggcagaaggtggaggagatgctgcagctgttcgagaagagccgcaggcagctgggcaagctgctggacatctacgagcagcgccttggcgaggaggccttcctggccggcggcaagttcacgctcgccgacctgtcccacctgcccaacgccgaccgcctcgccgccgacccgcggtccgcgcgcctcatcgagtcgcgcaggaacgtcagcaagtggtgggacaccgtctcccgccgcgactcctgggtcagggtcaaggagttgcagcgcccgccgtccgcggaggcgcccttctgatctcgatcgatcgcaaattaaggcggtggcccttgctcaagcctacgtgttcggtttctgcataatttttaataaacgccactggccccctacgtcattggccattgttcattgtgtaataaatcgttcaagagcatatgatgcttcttgccgtgagattaaactcgtcgttgcctcc

SEQ ID NO: 22449 - DNA, 1664 bp, Zea mays
  Clone ID: LIB3587-198-C2_FLI
cgcagagataggcgtcttcgtactcgcctacctccgcggctcaaacctttcccccttctcccaattccctccgtcggccgccgctccatcccgtacgacgacaccatgagggagtgcatttcgatccacatcggccaggccggtatccaggtcggaaacgcgtgctgggagctgtactgccttgagcatggcattcaggctgacggtcagatgcccggtgacaagaccattgggggaggtgatgatgctttcaacaccttcttcagtgagactggtgctgggaagcacgtgccccgtgctgtttttgttgaccttgaacccactgtcatcgatgaggtgaggactggcacctaccgccagctcttccaccctgagcagctcatcagtgggaaggaggatgcagccaacaactttgcccgtggtcactacaccattggcaaggagattgttgacctatgccttgatcgcatcaggaagcttgccgacaactgcactggtctccagggcttcctcgtcttcaacgctgttggtggaggaacgggctctggccttggttccctcctcctagagcgcctgtctgttgactacggcaagaagtccaagcttgggttcactgtgtacccttccccccaagtttctacttcggtagttgagccatacaacagtgtactgtccacccactccctcctcgagcacactgatgtggctatactgctggacaatgaggccatctacgacatttgccgccgatcccttgacattgagcgcccaacctacaccaacctcaacaggcttgtgtcccaggttatctcatcccttactgcctccctgaggttcgatggtgctctgaacgtggatgttaacgagttccagaccaacctggtaccctacccgaggatccacttcatgctttcttcgtacgctccagtcatctctgctgagaaggcctaccacgagcagctctctgtggctgagatcaccaacagcgccttcgagccatcttccatgatggccaagtgcgacccacgacatggcaagtacatggcctgctgcctcatgtaccgtggtgatgtggtccccaaggatgtgaatgctgctgtggccaccatcaagaccaaacgcaccatccagttcgtggattggtgcccgactggcttcaagtgcggcatcaactaccagcctcctagcgttgtgcctggtggcgacctggccaaggtgcagcgtgctgtgtgcatgatctccaactccaccagtgttgtggaggtgttctcccgcatcgaccacaagttcgacctcatgtacgccaagcgtgccttcgtgcactggtacgtcggtgagggtatggaggaaggtgagttctctgaggcccgtgaggacctggcggcgctcgagaaggactacgaggaggtcggcgctgagttcgatgagggcgaggatggcgacgagggtgacgagtactagagaagtttgctgatgacgcagcatcaggccagtgtgctgcccttatcccgtgatctgccgtgagttgctcctgctatcgtgttatgtgtgtctgttctgaagtattgtgtggtttacaacacctgatgttgtaagagttgttaattcccctgcattgctaccgggttattgagaataattatggctgtttacgttgttgcttc

SEQ ID NO: 22450 - DNA, 1080 bp, Zea mays
  Clone ID: LIB3587-198-E4_FLI
taagagtataagactaacaacagcaccaagaagaagacccaagatgacaggccttggctcaccatgtggtgcgtgcaagttcctacgcaggaagtgtgtgaaggggtgtgtcttcgctccatatttctgtcatgagcacggggctgcgcactttgctgctatccataaggtctttggggctagcaatgcctcaaagctcctaatgcatctgccaataagtgaccgttgcgaggctgcagtcactatgtcatatgaggcgcaagccaggcttcaagatccaatatatggctgtgttgctcacatcttttctctgcaacaacaggtggtcaggctgcaagcagaactagagtctttcaaagctctagcaatacaaggatgtggagatgggtccttgacatcaaaccctcagaaagaaaactgtgaaagattagcaccttatattcaagacgggcagctcttttaccaaccaacaatggcaaacaattcttcagtaaagagtgagaggcagttatactttgcaaacgattgcttcacatcaacgtcaactcaacattctgaaggttatgagccagatatatgcatgcctgactactacaacaacagcaatccttcttggaccacgcaagggagtgggtatcatgatattgatgagcttcaatcagtagcctttgcatatctggacaatgcttgacaaaacgaggaatttgatagttattgtacaagtttgaatagttttggtaacaataccttacagatgtcaatcaagttttctagcatgggcattgagttactgaagaagctgtgtgttgatgtactcataactaaaacttcaaactgcacttttgtagtttagaaatcctagtttcttcatgatgattcctgcagaagaattaaattggaattgttcaataagaaacacatcatttggtgcagataaatagaagattgaaacgaaatagaccgtaacggtattgcatttcagtctgttatgtggagaccaaaaggttcttgagtgtataattgtaattttagtgcttgtactgaacatctgtttaactctgtaagcaagtatatttagcc

SEQ ID NO: 22451 - DNA, 449 bp, Zea mays
  Clone ID: LIB3587-198-H7_FLI
caagcgggtgccaactgccaaggggggtgatggcgctgtctcgacgcatggcggctcccgtcctcgtcctcctgctcctcctcgtcgccacagagctggggacgaccaaggtggcggaggcgaggcactgcctgtcgcagagccaccggttcaagggcctgtgcatgagcagcaacaactgcgccaacgtgtgccagaccgagaacttccccggcggcgagtgcaaggcggagggcgccacgcgcaagtgcttctgcaagaagatatgctagtagtagcctaggctttgcttgctggcacaagcaggtcgtcggcacgcaacgcaattcaagcatatcggtcctcctcccgcgttgctgtctactcgatcccgttttctctttcgatcgatttcgttgtttcatgttgctttcttctgttcccgccaataataagctccatgggatctc

SEQ ID NO: 22452 - DNA, 1406 bp, Zea mays
  Clone ID: LIB3587-199-H2_FLI
cgcgccgccacgcaccagcccagccagccatggcgttcgccgcgcggaggagcatcgccacccggctctctcaccatctcacgcgacgcctccatccctgcgttccacacgcgcgtacctccgactccctcgacgagcaggcgtcgagaccctcgccaccgctcccgctcccgctcccaccacttcacgtccagctcaagcaacgttctagagaagtccaaatcctaggcttcctccctttctcgctccgcctcgcggggccaacccgccgcaccttctcgtcctcagcccccgcccccaacctcgaggcggcaccagccgccgaggtcgatgccgcgggcgtgcttgcggatgcagcggaggcggcggcgtcagtgccagcgccgttcccaggggaggtagccgccgcggctgcggactcattcccccctgttgccgcacttcagcacattatcgacgctatccatacctttaccgggctgaactggtgggtgtgcatcgcgctgacaacatttattatccggagcgccacagtcccgttgctcgtgaaccagttgaaggccacgacgaagctaagagcaataaatccagagatggaagtcattaaagaccagatgaatagtatggatccaaaatcagtgcaggagggacaagctaaaatgaaagcgctgttcaaaaaacatggtgttagtccacttactccaatgaaaggactcctgatccaagggccaatattcatgagctttttctttgccatatcaaacatggttgagaaagtaccttcattcaaaggaggtggaacattgtggtttactgacctgacgactccagattctctttacatcttgcctatgttaacaggactgaccttcttggccacagtggagcttaacttgcaagaaggaatggagggaaatcctatggctggtaaaatgaagtacttttctagaggagtagctgttttgacagtcccatttacaatgaactttgccacggcagttttctgttactggacctcatcaaacatattcaccctgttatatggtcttgttatccggcgaccagctgtgaggaagtggtttgatcttcctgctttggaaaatacgccttcgctcacggcaaagccagtattcaatatgtttggtggatccaaggcaataccagccgcacagtcaccagtagcgatcgcaggagcccagcaatctggtctgggccaacctgatgcttctgctcttggctataaggtcaaaaatcttgagaagaaagtgaaatccaggggtaaatctcggaaacacaggtaaaattttgtgcatctgtgccccagatgagcaatctgtacttccaccatcggaatgatggatacttgatttgtcctgatatgccccccaaaaatcagattttgtatt

SEQ ID NO: 22453 - DNA, 935 bp, Zea mays
  Clone ID: LIB3587-200-E11_FLI
gctgccgcatctcaagtctcaaccctcgcctccaatcgcaacgctcccgaggagagccaggaggaagtgacggcggcgccgcgaggaaggagggatcgatcgaggatggtggacgtctcgcgcgtgcagaaggagctcaccgagtgcaaccgcgaccgggaggtatcgggcgtctccatcgcgctccacgacggcgccaacatctcccacctcaccggcaccatcgccgggcccgccgacagcccctacgagggcggcacgttcgtcatcgatatccgcctgcccggtggatatccctttgagcctccgaagatgcagttcatcaccaaagtatggcaccctaacatcagcagccaaaatggagcaatttgcttggacattctgaaagatcagtggagcccagcccttaccttgaagactgcgctcctttcccttcaagctctgctttcttctcctgcacctgatgatcctcaggatgctgttgttgcacaacagtacctgcgtgactatccaacatttgccgctacggctcgctactggacagaggccttcgcgaagagtgcatcaacgggcatggaagagaaggtgcagaagctggttgagatgggcttcccagaggatcaggtgagaagtgccctgaagagcgtggatggcgacgagaacatggctctcgaaaagctctgctctggctctgggtgaaccattctcttggggccaatacatgagcagctgtacatttcacagtgcctgctaatgctcctgctcagccatttcatataggggccgtgccatggcccatgggactggagtgagactctcctaggacaacattcgtttctttaaactcttttgctgttgtgtctggtaggctgaatcgactctttgcccatggaaccctggtaatatctgatgcaaaggaaacatgaggttgacat

SEQ ID NO: 22454 - DNA, 757 bp, Zea mays
  Clone ID: LIB3587-200-E8_FLI
gagttttcctgggcagtgtagttggcgttcacctgctcgaatcgcctctacttcaccctatggcagaaggattgttcaacttggtgctcgcttggacgctgctttttgcgccactcctcttcacggattgtaggagggaccgctacaagggatcgctcgatgtcctgtggggctttcagatgttcctcacaaacactttcttgataccttacatggcgatccgactgaacggtccggaagcggaccggtctccgccacgaagatcacagctgggttcagtcatggtcaacggcgcgccggctgtgggcgcggtcggcggcctcgtctgcgttctctcgatcgtttgggcgttctctggccgcggagattctggtttcggaggcattgcggaacggtggcagtatctgcagagctacctgttctcggagcggcttgcttacgcgtttctctgggatatgtttctgtactccgtattccagccgtggctgatcggggacaatcttcggaacgtgaaggcggatgctgctgggcttgtgagtgtggtgcggttcgtccccgttgtgggtttagttgcctaccttctttgcttagaggaagaggattagctgttaactgtgtttttttatatattttttgtgatcatttggatcgttgatcagtgtgcagttgagtggattatgtacttggtggcagtgagtttgcaactgaaaacacaaatcttgtagccgaacaagaacaaccgggatggacatacagt

SEQ ID NO: 22455 - DNA, 1761 bp, Zea mays
  Clone ID: LIB3587-201-H11_FLI
gtcccgacccaacttggcgaaaattatagagacctgccactcgttccctttcccaggcgcaggcgcctctccttgccaggcgtgacacagacgaactggtgccgcctctgctggggcttggtcctcccagccgagcgcgcctcatccggatcttgcgacgacggtgcccaagctcccggcctccctttcgcatccctgctgcgagccgtcggtctccggaaagagttagagccgtcggtctccgtaaagaattggagccgccaggcgccttgagaagggttttgtcccgggatgtcgtcgtcggggaagatggaggggccgtctgccccggtggtgcgtcgggatccctacgaggtgctcagcgttcccagagattcctccgaccaggagatcaagtccgcctaccggaagctcgcactcaagtaccaccctgacaagaatgctagcaacccagaagcatcggaactcttcaaagaagttgcatattcttatagcatcttgtcagatcctgagaaaagaaggcagtatgatactgctggttttgaggagttagaaaatgaaggaatggatatggaaattgatttgtccaatcttggaactgtgaacacaatgtttgcagcactttttagcaagcttggtgttcctatcaagaccacaatatctcctactgtgctggaagaggccatgaatggcacagttacagtgagaccactccctgttggaacatcagctacgggaaaggttgataagcaatgcgctcatttttttggcgtaacaataagtgaagagcaagctcattctggaatggttgtcagagtgacttcacctgctcaaagtaaatttaagcttctttacttcgagcaagaagttaatggaggttatggacttgctttgcaggaagatagtcaaaagactggcaaggtaacatcagcaggcatgtatttcttgcatttccaggtgtatcgtatggactcaacagcgaatgcgttggcaatggccaaagatcctgaagctgccttctttaaaaggttggaaggtctccaaccctgcgaagtttcagctctcaaatctggaacccatatatttgctgtatatggtgacaattttttcaagccagctagctatatgattgaagcgatgtgcgcaaagagttatgaagacacaacagagaggctgaaagagatagaatctaaaattctagctaagcgaaatgatctgcgtcaatttgaaactgagtacagaaaagctttggcacgatttcaagaagtcaccaacagatatacacaagagagagaagcggttgatgatatgctgagagagagggacaatatccattgctcgttcacaactgaacgaactttggcaaaccctgttggtgtcggtagtagcagtaggtataccatcgagcagagcattcctgagagccctgagaatggtagcgtagatggcagagacaaatctggcaaaaagaagtggtttaatctaaaccttaataggtccgacaagaaagcctgatgaatcttttgtcagggaacgtcatgtgttttcactttgttgtacattttggaatccctattgtattcatgccgtatgagttctttggttcccagttctctgggagttttgtagcatatagcagttttgggtacaacattctattctcatgtatgtattatcctaagtgactgcattgaccccatgcatcccaggcgaagttgaatcgcccgaccaagttattttatcgttataatttcttctatc

SEQ ID NO: 22456 - DNA, 1898 bp, Zea mays
  Clone ID: LIB3587-203-D2_FLI
ggctaatgctgttcttcaatgtctcatgtgcacaaagccactgatgatctaccttcttctgagattgcattctaaagattgtaataccataatttcaaatagctgtccccaccccctccttgaaatattgatgtgtactttatatttctttttatttgacctcagttattattttataggttgttcaaaaaattggtgccttatgtgtgaacttgagcaatatgcttcaactttacgtgaaagtggtggacccttatctccaagtagaatcctttctaatctgaggaatattggatgtcgcttgggtggtggaactcaggaagatgcccatgagtttctaaggcatcttgtgatgtctatgcaagcagcttgcttggatgggctgggtggtgagaagcacgttgaaccaagtttgcaggaaacaacactgatacaacagatgtttggtggccgtcttaaatccaaggttaagtgcctcagatgctatcacgagtctgaaagatatgagaatataatggatcttactttggagattcatggctgggtagagtccttgcaagatgctttgacacagttcactgctcctgaagatttagatggtgataatatgtataaatgtggaaggtgttctgcctatgttaaagctaggaagcaactgagcgtgcatgaggtgccaaacattttaacagttgttcttaaaagatttcagtcaggaaaatatggcaagatcaacaaatgtgttactttccctgatatgttggacatggttcccttcgtgactgggtctggtgacaatccccctctttatttcttgtacgccgtggttgtacatgtcgatacagaaaatgcatcattctctgggcactatatatcatacgtcaaagatatgcagggtacatggttgagaattgatgattcagaggtccaggttgtatcagtgaatcaggttatgtcagaaggtgcatacatgcttttctacttgaggtcttttccccgaccaccaaggatatacatcgagaaggggctgccggttacatccgcaaagcggcacacgtcgaaatcttccaagggctctaaacacgatcgcaagcagacagagttactctttcctgcaaacgatcaggcatatggcgtctatgatttcagacccgatggcgaaggctatgcccaagatcagcatgcagagctgaggtccagagctttccatcacgccgacgatgcctttgcagactcggttagcgcggacttctcggaagcgacatcaagtgaatggtcgctgtttaccagctccgacgagtcctcgttcaccaccgagagcacaagggattcgttcagcgtcgtggactacggagacaacgccggcctggatccgatttcctccatattcgggccaagctatgctccggagcacggtgctcccggcagtttcgtctcgcgcacaaggttctcaccttccagtccacagacaaggtacttctcggagagcacaggctttgtctcggactcttccatgccggcccacccccacggcattgtacatagaggaaggtatccggatagtagggcgtgcgcctcttctgcggaaccgcttgcgtcggcggcgcatcagcggagcgggtatggccggtacccccttagtcgagatggttttgttcaaacatctggtttttgccaaatgtaatcggctcacatttcattagctgtagctggtgcatcggcagttgcggttcttagcactgccgttaatgctgcctcatgttcttttatttcagatgaggcttattgaatttttagctacatgtcgtttctaggggtagctcgattcgatgtagcgaaaaaaagttagattatgtctatatgcaggtgaaattttagagcatggtgacaagctctgtggc

SEQ ID NO: 22457 - DNA, 1021 bp, Zea mays
  Clone ID: LIB3587-203-E8_FLI
gaagacgcggcgggagcgaggccgacccggcgccggcgactccgcggcggacgatgacctggtcgacgtgctgctgcggctggtcgaggaggacgaggacaggccggagacgacggaggccagcaggctcacgcgcgacggcgtgaaagcgttcgtccaggacatcgtcgccggcggcacggagagctcggcggtcacgatcgagtgggccatgtcggagctcctccgccggccggacgccttgcgggctgccaccgccgagctcgaccgcgtgattgggcacggccgctgggtcacagagcgcgacctcccggacctcccctacatcgacgccgtcgtgaaggagacgatgcggctgcacccggtcggcccgctcctcgtcccgcaccacgcccgcgagcacacggtggtggccggctacgacgtccccgccggtgcgcgcgtgctggtgaacgtgtgggccatcgctcgcgaccccgcgtcatggcctgacgcgcctgacgcgttccggccggagcggttcttgaacggcagctccggcgccagcgtcgacgtgcgcggcgcgcactttgagctgctgccgttcggggccgggcggcggatgtgccccgcgcacggcctcgcgatgaagctggtgaccgctggcgtggcgaacctggtgcacgggttcgcgtggcggctgccggacggtatggcgccggaggatgtgagcatggaggagctatttgggctttccacgcgccggaaggtcccgctcgtcgccgtcgcggagcccaggctgccggcgcacctctacactaatgtcacgccgccacagcaggtcgcgggctccacgattgcgaacttgtccaccaggccggagtacaagctcgtgttctgaatcattcaccgccactaaaaataaagcaggaaaaactacacttcctgcgtgctagacgtccgggcggaacacaacagtgcttgctcacgttcttctattggttgtactaaaaatatggactagcctgaactttctgaacct

SEQ ID NO: 22458 - DNA, 1561 bp, Zea mays
  Clone ID: LIB3587-203-F11_FLI
cgactccctcctcgagtccgagggctccgaccgcccgctccgggaggcactgccggcgcggagccttcgccctcgcccaccgccgccgcccgcgcccgcatcggaggccccgcccgcggagcacgccgccgtcgacgcgctcatcgacgacgcctggtggctcggggtcgccctcgcccgcgccggcgcgcccagcaaggtcagggtatgcttcccggagaccagggaggtcatggagttcgacgccgccgacgtccgcccgcacctcgagtgggttgacggcgagtggcgctccccagataacatggagatacccaagacaatgccatatgcaaaaggaatgcaaattgaagtttccaagttggaagacaattctgttgttgcttggtcacctgcagttgtcgcaaagactatctggaagaataacctattagtcgactacactctttcaaagtgttacggtactacattgtctgaggagattgttgatgtgaagcatgtgaggccttgcccaccacaagcatcagagattagtttctgcatcaatgatgaggttgaagcattccaaggtgattgctggtggctaggggtgattactaatgttcttccagaattcaagtacacatttaagtcaacgcatttagggacggaagttgaggtgaaccagaaatttctgaggcttcgatatgactgggttggtgatcaatgggaacaagaatcaaagaatgtgcccaaggcaaaatttacacaaggtgtcaaggttgaagtctgcagcgacgatgaaggttttcgtggagcctggttcgaggcgactgttgttaaagctgtcggcagcaagttcctcgtggagtatgctacgctgaaggccgatgacgggaccaagcctctgaaagaatctgtagaagcacggcacatcagaccttgccctccagatatccctgccactgatggattcaaactacttgacgaggtcgatgccttctgcaacgacgcgtggtgggtcggtgtggtatccaaggtcctcggcgagaagaggtgcacggtctacttcaggccttggaaggaagagatggagttcgagcatgcgcagctgaggttgcactgtgactggatgggcgggaggtggatgcgggcttccccggcactggagatgtgaaggctgaagagccacgcgatggcgttagacagtagcttggtgattgtatggggtaatacccatagttaaaagtgtgtcgtcactaaggtaccatgttatgttgtcttcctgcatgaagttgtcctgtgccatctgcagcaagttggatgatgatcattgtgcagttgctgcaagttgccacaccaccatcaggtctgaatctgaacgcttgccaatggttgatcccattgtgttgtactaggaactagtaagcgcattcagccagtgttaagggtgaagaaccgggagctgtggtgctaaatgttaggggtgtcgagtgaacccttattgatcgccggcgacttgtttgttttgcactagactgcttgttttagcatccctatatgctatcttaaggttgtctcc

SEQ ID NO: 22459 - DNA, 1177 bp, Zea mays
  Clone ID: LIB3587-204-E1_FLI
ggggaacgcgcagcgcaggcggcggcgtcttcctccgcggatccctcctcttcgcgaacgacgcgattccacaccgcaaaccctccctccctccatggattgatcgagctgctcgtccacctccgctccgcccctcgcctcgccatttcgtagcttgtttctttttcccttctccctccctttcggtttctgctcgattcatcaaattagtttattggaggggagggagacgttaggtgggctgggcgtctcagcgcctgcgtgctccgcctcgggagaagccgagaaggtcaaaagaaatccccaccaccaacgcaggcgactcccccaatccaccatagcttcctattctccccatcaccagacgcccagagccccccgcccccagctcggagcaagcaataaaaggcaaaggtgccgacttttctgaaccgcttgccctccgtccacgccatattggtcgattgctcgattcctcggtcgggggagggaccccgggcccggagaagtcagcaagagatgtgcccgctgcgggtcatcctcatcttcctctccgccaccgtcgcgggcttcttcctcgtcagggggctcaacgccgagccggaccagttcgacgccgacgccgacgccgacgccgacgagtcgggatcccccagggcgcccctgcccctgcattccaaggttggatcggctgtgaaagcagggttctggacgatggtggacatggcaagcgggcgttacctctggcgcacccttgttgcacagcctgcgaattcagaatccgagaaggtccggtgacgaatgctcggttgttcgtaaattgtctcgtcctgcggatggagtgccacatagatagacataggtgaaggctggtgcaatcctgttgtatcttcttgttacatacggagtattggtatgatggtgttggtgtgtaatatagatgttacacgggggtcaatatattgaagtaaatttgcaacattgttcatgtgttgagttgaaccttgtgtcgtgtaaaactggaagtgggtgtattctggccatgtgatctgggtccaagtttgcaggttttgtcgttcggctaaatcccttaaatgtgagacttgaaatatagaataaaagcgaagctgagtacatggaaatttgtgattgctggattgcaatatgctcagttgtt

SEQ ID NO: 22460 - DNA, 985 bp, Zea mays
  Clone ID: LIB3587-204-F7_FLI
ccaccgaattccctgcgattcctctcccctcgcctcctcgtctccccctaggggatcgtcggagaggaatcgcaaagagggccgtctcatccgaggaagccatggagcacaaggaggctgggtgccaggcccccgagggacccatcctctgcatcaataactgtggcttcttcggcagcgcggcgaccatgaacatgtgctccaagtgccacaaggagatgataacgaagcaggatcaggccaagctggctgcctcctctatcgacagcatcgtgaacggcagcgacgccgtcatggagccggttgttgctggcagcaacacggtagtagctgttgcccaagttgagttgcaaacaatgaacgtgcagcagcccgctgatgttgccggacccagcgagggggtggcggcgatctccaaaggggggaaggtagggccgaaccggtgcagcgcctgcaggaagagggttggacttacgggattcaactgccggtgtgggaacttgtactgcgcactccaccgctactccgacaagcacgactgcaagttcgactaccggactgctgccagggacgccattgccaaggctaatccggtggtgaaggcagacaagctcgacaagatctagggggggttccctacggttgggtatcaggaagattgtaaaccgcggtaactcgtcatgcggaactgctgccttgccccccgcgcctttctcttccatgtttgctgctacaatcttgttgttgggcattgcagtgcacggtgcacacttgtgtagcccgcctcgagaattcctgcctctgcatctggtcagttctaaaatgatttgcatgttggctatgttgtgtaagctctatttatggtggtctcgctgagacgggtatttggcttcgcagttatctagctatgtgatgtactgttgtcttgtccctgggtattatatggtacactgcagccagtaatagtaatctgcaactgtgcgtt

SEQ ID NO: 22461 - DNA, 1681 bp, Zea mays
  Clone ID: LIB3587-204-G1_FLI
gtgcagcaccatctgctgttgccctagcagaactcttacaggtgatgaaaatgtggatatgtggaatggttatgttaacaatgatgatcgggcacttttgaaggtgataaagtattcatcgcctacttctgctggagcagagtgtgttgatcttgactgtagctgggtggagcaatgggtgcatcgagcaggaccacgcaaggagatatactatgagccagaggaagtaaaagctgctatagttacctgtggaggtctatgtcctggtttgaatgatgtcatcagacaggtccttatcttaagaagtgtccagacatttctgcatttcaaacccaaaattcttgacattcatgtcgaacatcaacatgaataagatagtattcaccctagagacctatggtgttaagaatattgttggaattccatttggttatcgtggatttttcgaaaagggcctcaaagaaatgccgctttcacgtggtctagtggagaatataaatcttaatggtggaagttttcttggtgtttctcgcggtggagctaaaactagtgagattgttgatagtatacaggccagaaggattgacatgctttttgtacttggtggaaatggtacccatgcaggagcaaatgctatccatgaagagtgccgtaagagaaagctgaaggtttcagttgtagcagttccaaaaacaatcgacaatgatatacttttgatggataaaacatttggttttgatacagctgttgaagaagcccaacgagccattaattccgcatatatagaggcacgtagtgcttaccatggtattggcttggtcaaattaatgggaagaagcagcgggtttattgcaatgcacgcttccctttcaagtgggcaggtcgatgtctgcttaatacctgaggtcccgttcactctagatggagaatttggtgttttgcggcaacttgagcatttgctaaagagtaagggattttgtgtggtttgtgttgcagaagctgctggacaagtatgctaaaattcacagctgtctggatctactccaagaatcaggtgcgactgatgcatcaggaaatgtgatattgagtgacattggtgttcacatgcaacagaagattaagatgcatttcaaggacattggtgttccagctgacgtgaaatacatcgatccaacttacatggttcgtgcatgccgtgccaacgcatctgatgcaattttgtgtaccgtgctcggacaaaatgctgtccatggggcatttgctggtttcagcggcatcacttcttgcatctgcaacacgcactacgtgtaccttcccatcacggaggtcatcacagcaccgaagcgcgtgaacccgaacagcaggatgtggcatcggtgtctcacgtccactggtcagcctgacttccactgatctgccatcgtcactgcataaccaaattcgcatagtttgaggtactagatgatttacaattctttcgctgatgtgctccattcacatcgtgaggttccaagattagttaataatgctaaactgagtggacttgtctggtttgttcacgaaggtggtgttgtccattgttccgaagctctggtatttgagaaatttgcatatttaacactataaagatgtgactccacagatttgccattttcaagatgggctacgcaaaattgccacc

SEQ ID NO: 22462 - DNA, 1097 bp, Zea mays
  Clone ID: LIB3587-205-E12_FLI
cggtattgagaatttgcgataccgatctgggagaagagaagggcgtcatgtcgtcgttcggacgcaattcatggtgtatcctcgtgctggcctccgtgctcctcctgtcctgcctcgccgacacggccgtggccaagcgaacaggcgagctcaccgtcttctggggccggaacaaggaggagggcacactgcgtgaggcctgcgacaccgggctctacaacaccgtcatcatctccttctacagcgtcttcggccacggccgctacgccctcgacctctccggccacccgctggacggcgtcggcgccgacatcaagcactgccagtcccagggcatcccggtcttcctctccatcggcggcgggggaaaccactactccatcccttcctccgcgtccgcggaggccgtcgcggacaacctgtggaacgcgttcctcggcggcggcaacagcgacgtgccccgccccttcggtgacgcggcggtcaacggcatcgacttctacatcgacgaccacagcgcaccgggcgaccactacgacgagctcgcgcgccgtctcgactacttcaacagcatgtactaccacgccacgacgaagtacgtacggctgacggcgacgccgcggtgcgcgttcccgcccgacgaccccatggcgcgggcgctgcggacggggctgttcgagcgcatccacgtccgcttctacggcgacgccgacaagtgctcgtacaagaacggcgacgtgtccggcgtcgtggaccagtggagcaagtggacggcgaggtaccccaagagccagctttacgtggggctcgccgcggccgagagcggcgtgccggaccacgcgccgccccccgttgaggtctacctcaaatacctctactacgatctgctgcccaaggtgcagaaggcgcccaactatggtggcgtcatggtctggaataggttcaccgacaacaggaccggatacagcggcgccgtcaagggctgggcggcttgcagctatgctggctgtgttaactaagtgcatagcgcatgtataaaccacgtaaataattcgtataaggtgcaagtataaataaacacaagagactttcgtgat

SEQ ID NO: 22463 - DNA, 1362 bp, Zea mays
  Clone ID: LIB3587-205-H3_FLI
cccggctaccctccgccgtcgcttcgcctcggggtcgcccgacgacaaccacgagtccacgacggcgcgcgcacctcgctgtcgcccccgtcgtgcgacgccgccggctgggcatcgccccggaactcctcctgaaggcccctcatcacgctcttgcaggctctggacggacgtgggaggccccgcggcgcccgtacgtatatctagcggcgagacggcaagctcccgccccatctccgccgcctccgctccccgtcgtccggctgcgctgttgctgctcatacggatcaagctcggctacacccgtttctgcgagcagatcagaggacgccatcgtcgggtcggtagggatgggacctgttcactccgatcaaaaggcgaagaaattggcgattatttgcgaacaaagagttataattccaaacgggcatggggagaagcttgttggtttattacatcgaacaagttcaaagaatcttgtgatcctttgtcatggattccaagccacaaaggatgacagcatcttggttgaccttgctgatgccatcacaaaggaaggaattagtgcttttcggtttgatttttctggaaatggggaaagtgatggtgaattccagtatggaagctacagaaaagaggcagctgatttgcgctctgtagtattacatttctcagaacagaaatatgacataattgctcttatcgggcatagcaaaggaggaaatgctgttcttctttatgcttccaagtaccatgatgtccctgccattgtgaacatttctggccgctttgcattagagcgaggtatggagggacgccttgggaagaatttcatgaggagaataaacgaagatggatacattgatgtgaagaataaaaaaggggagttgcagtaccgggtgtcgaaagcgagtctggatgaccggctgagcactgataccctattctccagccgtgccataagcgaagactgcagggttctcacgatccacggcgccaaagacgagatcgtcccggcggaggacgcccggcagttcgcggcgaacatccgcaaccacgagctgcgcatcgtcgcagatgccaaccaccgttacaccgggcacagggaggagctggcctcgctggtgctgggcttcctcagctcccatccctaccagatcacgtcgcgcttgcgtccgagactctagatagagtagagcacacccacttgaccgtttgcgaacaaaaaaaaaatcccctgtaccaatccaagagttgtgggtatggtgatgtgtttatccagaaccagaacacgagcacctgccgtccaaatcagcgtgactcgctctcgctctagaatttcaaaaaaagtcagtaccaggc

SEQ ID NO: 22464 - DNA, 1044 bp, Zea mays
  Clone ID: LIB3587-206-B3_FLI
cacgtctcctccgccgcccttgctaagcaaacgcaacctgcaactgcaaacccctcctccgattcctcccccgcacgcggaagccccccgcagctcttcgtccccggaggaccaagaccaccaccggagatgtcgtacgcctacctcttcaagtacatcatcatcggcgacacaggcgtcggtaagtcgtgcctgctgctgcagttcaccgacaagcgcttccagcccgtccacgacctcaccatcggcgtcgagttcggggcccggatgatcaacatcgacaacaagcccatcaagctccagatttgggatacggctggtcaagagtcattcagatccataactagatcatactacagaggagctgctggtgctcttttggtctatgatatcactaggagggagactttcaatcaccttgcaagctggctggaggatgcaaggcagcacgcgaatgctaacatgacgataatgcttgttgggaataagtgtgatctgtctcacaggcgtgcagtgagctatgaggaaggcgagcagttcgcaaaggaacatggtcttatcttcatggaggcctctgcaaagaccgcgcagaatgtcgaggaggcatttgttaagactgctggagcaatctacaagaaaatccaagatggcgttttcgatgtatctaatgagtcttatgggatcaaagttggatatgtagtccctggccaatctggaggtgctggtagctcttctcaaggtggtggctgctgcagctaatctgctaacgcccttatgtacaaaggcatatctgcggtgtagctgcgttatctctatgttgctgagcgtaaaatagttactgctccagggtgctttgttatttgatgcaccaacgggtggcagtgcctgaacgatttgagacattcagttttatttatgtcaggtgttcataaacattctgtaaatcactagattcttcaccgtcattcgtcattaagcgctcacaaattctgtccgtttgcgcgtgtaaataagatacctcgatgcatcgtttggtgcgatgtt

SEQ ID NO: 22465 - DNA, 1904 bp, Zea mays
  Clone ID: LIB3587-206-E7_FLI
attttctgaacactagtatatatatactagaaccttgtgggaattgggatacaaatcaagttatcatatcataatatatatcgtaatatcgatgcctcgatcgcatcgcaggagaaccatttctatattggtacggggcacaagcccgaatttgcatatttgactacgaactagcaaggcaaatcctttcgagcaagtctgggcatttcgtgaagaacgatgcgcaccctactttgttggctctggtcggcaagggactcgggttcatggaaggctctgactgggtgcgccatcgcagggtgatcaaccctgctttcaccattgacaagcttaagattgtgaccgagacgatgctggacttcgccgatagcatggcaggtgagttggaagctgaagcatcccagaacgagaacggagaaacacaagtggatatatacaaacatttcagcgatctgacagttgacaatatagcctacgccatctttggaagcagctacaagttaggcaaacaagtgttcgaggcacaaactgagctgctggggatcaccatggctactttccttgacgtgcccataccaggatccaaataccttccaacccaagcgaatcggcgaaaatggatgctggagacgaagctcaagagcttactcacgcggatcatacagccacggttagcaagcggtgagcacggaaacgatctgctgggcgtgatgctggactcctgcactgagaccaagcaaggagggaagcagcagcaagtggatcgtctgcgtctcagcttgagcatggaggagatcatacatgagtgcaagctgttcttcttcgctggccacgagaacacagcccttctcctcacgtggtcggtgtatttgctcagcatataccccgagtggcaagaaaggctccggaaggaggtcttgagggagttcgggagggaagctcctaaccccaacgcgctcaacagattgaaagaggcaagaaactagctagctgcgtctctctctcttgttagcatatatatgtgtactcacatttgatttgatgactatgttcctgattctcttgttagcatttctttctaatttgcagatgacaatggtgttgttcgagaccttgaggctctactcgcctgctctcttcatgcaaaggaagaccctggccgacatgaccgtggggccaataaaactgcccaaaggcactgcaattgtgatacccattccgatcatgcatcgagacaagcaggcctggggcgacgacgcagacgagttcagtccgatgagatttgcgaatgggatcacgggagcagcgaaagttcctcacggcctgctggcgttctcgatggggccaaggtcttgcatcggccagaacttgtcgatgctggaagccaagtcgacgctggccctgatgctccgcaagttctccttcgctctctcccctgactacgtgcacgcgcccgtggatctcttcactctcaaacctaagtttggccttcccgtcattctgaggccactggataatgttttgatttgagttgggcatatagtacaacaggaagtaacttaggtacatatcaaatttgctagctggtcaaaacgttatatgatgttctcaaccctccgttgttctatatcgttgaaaacaagtattttaatttaggtgcggtttggtttggcgctgcaagcgaaaatggggacgtaaatccggaattaattatagcaaaacatctcttcaagcttgaagtagttcataaatgaagactggtaaagtgtctgtaagttgctacagattctatttatgtctaagtatagaacataaaacataaaaacacggctgatttgttagctaggtggatgtaaatataggtttagagccaataactatggttcaaatcaccatttgtgcat

SEQ ID NO: 22466 - DNA, 1467 bp, Zea mays
  Clone ID: LIB3587-206-G6_FLI
tatggacatgggcgtcttgtctcgattaaaattaagaatggtatgattgcacaaaatttaactgaactcataaattggcataataactgtacattattgtggaaaaggctgtttccaagacctactctccgcatagaatataaatatatatatttcaagcggctcaattctgacattgagccgacttgtgtacacagaaccaggaaacttcaagcatcagattctttcaattggccaaattctgagttgctgacaaagaaatcgctccgttggtgagctttaagcgcttggattcattaagatacacatctgcgctatcagttgccctggcagtagtttttgtcgtaattactgctgggattgccatcatcaaactcttcaatggaactgtagcgatgcccaaactttttccagaattagatggtcttaattctatctggaatctttttacagctgtccctgttcttgttacggcctatatctgccactataacgttcacagcattgacaatgaacttgaagacagaacacagatcaagccgattgtgcgaacatcgctgttcctgtgctccagtgtttacattgccacaagtttctttgcttatctcctcttcggtgaaggcacactggacgacgtgctcgccaactttgacgcaaatcttggcattccattcagttcagtctttgacgacatagtgcgagtgagctatgcggcacatgtcatgcttgtctttcccattgtcttctttgccctccggctcaacttggatgggttgctcttccccacatcaaggcacatctctcgtgacaacaagagattcgccatcatcaccgtctctctcctcgcagtaatttatcttgctgccattctcataccaagcatctgggacgcgttccagtttactggtgccacagctgctgtcctgattggttttatatttcctgccatggtcatacttagggattcttacggaatcgcgagcaagcgcgacaagattctggctgtaaccatgatcgtgcttgctgtggtgtcaaattctgtcgccctatacagtgacgcgatgaacatcttccgtaagaaggaagtggcctgatctcagatttcaaaagtagtcagtgctggatgaagaatggtctcgcaatgcaagactcgatggtacaaggaaaacgatgcgcttggattccgtgaaggaacgatttctttgtcagcaactcagaatttggccaattgaaagaatctgatgcttgaagtttcctggttctgtgtacacaagtcggctcaatgtcagaattgagccgcttgaaatatatatatttatattctatgcggagagtaggtcttggaaacagccttttccacaataatgtacagttattatgccaatttatgagttcagttaaattttgtgaaatatggacatgggcgtcttgtctcgattaaaattaagaatggtatgattgcacatt

SEQ ID NO: 22467 - DNA, 858 bp, Zea mays
  Clone ID: LIB3587-207-A2_FLI
gcgtgggtctcgcgacctccagcgaacggtgagtcgagatccctaagtttcgatccactgtcccagtggatttgggactgcgatggaggagcagttcatcctccgcgtgccgccatccgtcgcagagcggatcgagcgcctcatgaatgaatccgccgcctcctcctccaaccccgacgaggcctccctggacctctccttctcagaggatggaagaaatggcacatttatgatcggtaatgagagctttcctgcttctctcttggatctacctgctgtggtggagtcatacaaaacatatgatgattctgtactaattaaaactgctgatgttggtcagatgattatggtaagagaagaaaatgatcctgctccagaaggagtcgagtacaagcatgggcttactcctccaatgagggatgcacgcaggcgacgtttccgcagagaaccagacctgaacgcagagctggttaaccaagttgagaagcatcttatcagtatcatgcatggagtatctgtcaaccagaacgccagtgcgacaggaggcgaagaaggtggtgatcgtaagaaacctccagtagctcgtgcagccaagcagcctggggttcaggagcccgccgcgaatggagaggaagctgatcctgagaggagcgacagtgatgattcggataactgaaatggaggacctggactgggtgcagcctcagtggtccaggcgagccatgccaaacttcgcaatttgaataaatcagaatgtatatatttgtaacaaacaatgtgttcgttgttcgctgaagcatgtactgtcacggtaaacatgatgtgacgctctaatgccaaacaagatgatgttactgc

SEQ ID NO: 22468 - DNA, 660 bp, Zea mays
  Clone ID: LIB3587-207-B3_FLI
ccggaatccacggcgattcccgtccgcctgctatcttctagtactcacccttgccctcctcgtcgtctccgccgccgccaagtcctcccgccgccccatctccgtacgtctccccgcctgacccgaccctgccatctctcctccgcccgcctctctagtctctatccatcccatcgcgcttaccgaactccgtggcgcaggacaacgagatccggcagaagaaggaggcctgctacaccgacgtcgagaacgggctgtggggatgggtgtgcaggtactcgccgacggagaaggagaactgcgtgctgcgctgcctctcgccggagtgctacgacctcatatacggcggggatccgcttgaggaaggggagttggactatgttcgaagccaggagtacaagtattgtatgcacaaatcatcccttggagaaagcttggatggtgtgaagggatccttcagctactcatgaaggaatgagaagaaaaaggttctgttagtctgctgtaaattttatttacaatcttgaacagacatgcatctttttagataatggaattgtaattccagactttgctttttctcaaagcatcaccggtgcatcatcttatattaaacttacaaatgcaaattaaacattggattcatttgttggccacacc

SEQ ID NO: 22469 - DNA, 1351 bp, Zea mays
  Clone ID: LIB3587-207-F9_FLI
cttcgccctccggacttcttttcctgccctttgcatcttccagcacgttctccaatccccaccggcccatcctctacggaaacaagaacagggacaaaagactgaaacaatcatcaacaaatcagcatcctccaggagtccaggtccaggtccaggtccaatccaatacagttgcttcttctctgacgcaacgcaacgcaacgcaaccccaactccccaagctcgcggcaaccgcgagtacctcactctgtgcaaccgccgccacgcgcaggtgttgactgttgacttgatggatcagattatggattttcctgttgacccaatcatggcagctaaggcctataagtataaagcagaaatactttttaatgaatacttgctagcagattcatatgttctatacacttctgtgctcgcggggctcctgatgtgcaagttgtcgtatgacttcacacacataatcagttctgtctacttcaaaggttatgcctctcttgcaaagatgaaaaaaattgaatggaacaacagaggaatgtccactgtccatgcaatattcattacaatgatgtcagtatacctagtcttcttatcagacttgttctctgatcagctggaaggtccagtaacatttcgcagttcacacctctccaatttaacattgggggtctctgttgggtacttcattgcggatcttgcaatgatattttggttctacccttctcttggtggtatggagtatgttctccaccacatcctgtgccttgtttgtgctgtatattctatgctttctggggaaggacagctatacgcatacatgtttctcatctctgagactaccaccccgggaatcaacctacgatggttcctcgacgttgctggaaagaaaaattccaaagcatacattgccaacggagttgcaatgtttgttacttggctgatggtccggatagttctgttcgtctacttgttttatcacatccttacaaattatgatcaggttaagcagatggacacttttgcttgtgttctgatatctgtcgcccccaccatactgttcactatgaatataatatggttttccaagatcgtaaaaggtctcaagaagacgcttgccaaaaggcacactgaataggggaatgcgcgtacatgtacatccatcccatctgtacattcacttacagctatgcacatattagctaatgcagacatgctgttaattcagctttttcgttgtgactgctcagcttgttttctggatgttatatggttttgtgtgtatgttaggtctaactgcgtgtgcttaatgtaatagttcatcgatttgtaaaatttaggtctatgcgatagcttc

SEQ ID NO: 22470 - DNA, 866 bp, Zea mays
  Clone ID: LIB3587-208-D6_FLI
gcacaagaacgcagtttcttcttaactctggactgactggagtactacagctacgtacgtacagtatgtatcttgattcataatgatgatcatatagcagtaattaatggcagcaccagtggcgacatcaccagtaaaacaagcacctagaacacatcagcactctctctaatcctgtccgcccgccggggctactcgtagccggcggcgctgtggagatccgtcatggagaaggacctcggggaccgaaacgacccgttccgcgccatctggccggcggcggcgacgtgcacgctcagccgcggggacgggaacgtgggcggcctcctcgtgccactgagcccgccgccgccaccatgctcctcatcctcgtcctcctcctcctcgtcgtccgcgccctcctcgtcgtcctcctcccctctcgcgctatggcccagactgttgtgctcaaggttggcatgtcctgtgagggctgtgttggagctgtcaagcgggtcctcggcaagatggaaggcgtcgagtcctacgacgtagacatcatggaacagaaggtcaccgtgaagggcaatgtgacacctgacgccgtcctgcaaactgtttccaagactggcaagaagacttcgttctgggaggctgaggccgtgacaagtgaatccgccacacctgccggtgccaccgcctgacaggttcgatgatctggaagtgcccggcaaggcggcaaagaaaaaaaatgtgaatgtatttagcttggatctgttacaaataattgcaaactgctagctcggtctgtacattttacagttgctattcgtgtactgtgatgttctcgtaagtttggggagatgataaaccaatatttgtatgat

SEQ ID NO: 22471 - DNA, 895 bp, Zea mays
  Clone ID: LIB3587-208-F8_FLI
gtcggtgctgtcttcaacttcaggactcttcactcttttcattggtgttttacttggccaagactccataaatgctgcgaaaattattgctgttttcattagcatggctggcgttgtaatgacaactgtgggccagacttgggcatctgatgaatcagaagcaggcaaatctggttttacacagaggactcttctaggtgatatgtttggtcttatgtcagcaatcgcctatggtctatttactgtgctgcttaaaaaattttgtggagaggaaggagaaaaggttgatgtccaaaaactgtttggttatcttgggctttttacccttgttgctctatggtggattgtctggccattaaccgcactaggcgttgagccaaagttttcaatgccccactcagctaaagtggatgaagtggtggtggcaaatagcctaatcggaagtgtattatcagactacttctgggctctttctgttgtttggactactcccttggtggccactctaggcatgtctctcacaattccaatagcaatggttgctgatatgatcattcacggccgtcactattcagcagtatatattcttggttctgtccaggtattttcaggctttgttatcgcgaaccttgcagatcgcttttctcgttctctagggctatcatagtctcataaaacagaacaggcccttattagagcgtgcatcaggaagctccaaggtcgggttggttaggccaatacttcagaaaacctggatcgggagataccaggaattattttccctttgcttctttaaacatagtggaggtgaattttgccgtggtgaatagtgaaaggcagcagatgaagaagaaaacatatgttatagcaaccctttgcaactgtaaattctctt

SEQ ID NO: 22472 - DNA, 1972 bp, Zea mays
  Clone ID: LIB3587-209-F4_FLI
cgtccattgacaccccatgaggaagcacaatcagtcgggcagcttagggaagtctcaaataaggcacacaatgctgagctgaagctgtttctggaagttgaacttggaccggagttatgtccaattcgtccacctgagaagagcaaagaagacatacttcttttcttcaagctttataatgctgagaaggaagagcttcattttgttggtaggctttttgtgaaggctctgggaaagccatctgaaatattgacaaaactgaatgcaatggctggattttctccaaatgaagaaattgagctgtacgaggaaattaagtttgagccaaatgtgatgtgcgaacatattgacaagaaacttactttccgctctagtcagcttgaagacggagacattatctgtttccaaaaggctcctgttccagatggtgatgcacaagtgcgctatccagatgttccttcattcttggagtatgttcacaataggcaggttgtgcactttcggtgtctggacaaaccaaaggatgatgatttttctttggaattgtcgaagcttcatacatatgatgatgttgttgagagagttgcacatcaacttgggttggatgatccatcaaagatacggcttacgtctcacaattgttattctcagcaacctaaaccacagcctattagatataggggggtagcacatctactggatatgcttgttcattataatcagacttctgatatcttgtattatgaggttctggacattccactgccagatttgcagcgtttgaaaacgcttaaagttgcattccaccatgcaacaaaagacgaggttgttgttcatagcataagacttccaagaaatagcaccatcagtgatgtgattactgatttgaaaaccaaggttgaactatctaatcctgacgctgagctccgcttgcttgaagtattttaccacaagatttataagatctttccacctcatgagaagatagagaacataaatgatcagtactggacattacgagctgaggagatcccagaggaagagaagaatcttggcccacatgatcgattgattcatgtttaccatttcatgaaagacccgaaccagaatcaacaaattcaaaatttcggagatccttttttgatggttattcgggaaggtgagactgctgcagaggtaatggagcgcatccagagaaaacttagagttcctgatgatgagttctccaagtggaagcttgcattcatatccatgaaccggccagagtacctccaggacactgacgttgtatcagcacgttttcagcggagagatgtatatggtgcttgggaacaataccttggcttggagcacactgatacaacatcgaaacggtcttacacatccaatcagaatcggcacacctatgagaagcccgtaaaaatttataattgagaaaccttcatcaaagttcaatccattgtcaaaggcgtcgacaacagcatgcccaaggtgatacgacgcttcaaacagaaaaatctggtatagtatttgcctgtgctgaggcctgcaagcccaccaatgctgcttccaaccttcattgttccaagcaaccaagcatgtgtttggtttttcttcgtcgtgtcgagtatgacggcccctgacagggtaggtgtttgcttagtttgtagagcaaagctagcacataagaaaaaatattttggtaggggtggggggcatgtatacaggattgtagccgatactgattgctgaatttgcacctcttgtagctgtgggaacaatggcagagattgtataatgggtttggtataattctccgtgctgttgagaaacgtacgaggataacccggtcggatagtagagttttgagttccagcctctatgctgtttgttgcaacttgacatccgtatgaagatagtacctgttgccatcttgtaaagaaacatcatccctctaaaatcctgcaagctg

SEQ ID NO: 22473 - DNA, 664 bp, Zea mays
  Clone ID: LIB3587-209-H12_FLI
gcacgtctcctcgcctcgttccccatttgctgcgtctccttgcccgcgccgccgctcgccgtttgcccctcgtctccgcaccgcgcgctgttgtccatccttgtgcagcaaaaatgacggctggctacattgttggctcactggtcggatcctttgccattgcatacctgtgtgacacatttatctctgacaagaaggcatttggaggtagcacccccaagactgtttctgagaaggagtggtggcaagccacagacaccaagttctaggcctggcctcgcactgctgggccaccggttgtcatgaaccccatcagccgccagaacttcatcgtcaagtccactgagtaggtttgggctggagaagctggttctgcgacttggtgccgccatgaagccagagttccttttctaaggtcttaatcaattgtaataaaacgaaatacagtcaggatttttttgtgatttttacttgatctgtgagcgaacactgggtctttcaccttgtcatccaatgggttctgctccttggtgaaatctcccaccagccagtaaagaactgggttgttttcataatatatgcttttgctacgcagcctctgctgttgtaaggaattgcattgttatcttatatcactgtatggtgatgtttaactagtttgttg

SEQ ID NO: 22474 - DNA, 805 bp, Zea mays
  Clone ID: LIB3587-210-A11_FLI
attcacccgtccggccggccgtgcgcggcgcacccaccaccacccgtcccgctcgacaggaggaggaagaagaagggaccgggcgacagcgcgcgatggccgccgtcgtgtgcgtcaccggcgccggcggcttcatcggctcgtggatcgtcaagatcctcctcgcccgcgggtacgccgtccggggcacctcccgccgcgaagctgctgaccccaagaacgggcacctgtgggcgctcgacggcgcggcggagcgtctcaccatgctgcaggtggacctgctcgaccgcgccagcctccgcgccgccttccgcggctgcgacggcgtcatccacaccgcctcgccgatgcacgacaaccccgaggagatcatcgagccgattatcgcagggacgcggaacgtcgtggaggcggcggcggacgccggcgtgcggcgcctggtgctgtcctccaccatcggcaccatgtacatggacccgcgccgcgaccccgacgccccgctcggcgactctagctggagcgacctcgagtactgcaagagcaccgagaactggtactgctacgcaaagacggtggcggagcagggcgcgtgggaggcggcgcgggcgcgggggctggacctggcggtggtcatcccggtggtggtgctcggcgagctgctgcagcccagtatgaacaccagcaccctgcacatcctcaagtacctcacgggacagacaaaggagtacgtcaacgagtcgcacgcctacgtgcacgtcagggacgccgccgaggcgcacgtcagggtgctggaggcgcccggagc

SEQ ID NO: 22475 - DNA, 783 bp, Zea mays
  Clone ID: LIB3587-210-A4_FLI
gcagtcaccactcccaagccagtacccacagtcctacgagcagtcgcacgcaagtgtcaagagacaaaacggtcgacatggctcgcacgcaatctgccgtagcggtcgccgtggtggccgcggtgctgctgctggcagcggcggcgacgacctcggaggccgccatcacctgcgggcaggtgagctccgccatcgcgccctgcctctcctacgcccgcggcacggggtccggcccctccgcgtcctgctgtagcggcgtcaggaacctcaagagcgccgccagcaccgccgccgacaggcgcgccgcctgcaactgcctcaagaacgccgccaggggcgtcagcggcctcaacgccggcaacgccgccagcatcccctccaagtgcggcgtcagcatcccctacaccatcagcacctccaccgactgctccagggtgaactaaaacctagaccacgcgcgacgacggccgcctgatcgatcgaccaaccattccgccgtcgccgccggccggatcatcgatcgtcgtcatgatgatatctatcaatctacgcgtgatgatcgatggctacttgtctactgctatgtactactaaataaaatctctccgtgtgtgcacgtacgcttgcatgtgcatggtagcatgtatgtacgacgtcgtccatgtatgtgtgtgtgacgtgtgagacagagagagagagagagagagagagagacaggatcgatcgagagacggtcatgtccttttggctgtttggtttattcatatcacaacttttgagtgt

SEQ ID NO: 22476 - DNA, 1098 bp, Zea mays
  Clone ID: LIB3587-212-D3_FLI
ctcctcatctcattctcaagtgtgtagccgagagagcgccatggccagcctccaagtcactcctacttcggcgttcactcagtggaatgagctgaagttcgaaggcctgtacttgttccacaagtaccagggctcaggcgccaaccaaactcaggtcataagcaacaaggcgccgattggcatcggtgccaccgtagttaacaactggacagtgtgtgacgggccagggccgaacgcaaagctcgttgcccgtgcacagggcttgcatatccaagccggcaactgggtcaactccttcagcctagtgttcgtggatcaaaggttcagtgggtccacgcttgaagtgaccgggatagtagttgaatccggggagtgggctattgttgggggcaccggtcagtttgccatggcaaacggtgtcatctccaagaagttacatgggaagaccagcgaaggggacatcatacaactcaccatccatgctttctgtccggtgctcggaccgacaaagcgctcggccacaaaagttggaccgtggggtgggagcggcgggtctccgatggacatcacggcagagccccagcgtctgaagagcatcaccgttgctactggcatcgccgtgacctcgattgccttctcctacgtcgactccgccggccaaacccaatctgctggtcgctggggcggttccggtggagaaactgagccggtgatccagctcggcgactccgaggtgctcacggagctgtccgggacgatcggcaacgtcgacggcctcaccgtcataacctccatcaagttcgtcacaagcctcaagacctacgggcctttcggagcatggggggacgggagtgacactccattcgcgatccccgtgcagcaagggagtgccatcgtcggcttcttcgcacgagctgggatctacctcgacgcccttggcgtttacgtgcgatccctgtgatgatgactctgacgacagaggcagctacctgctctgctccagtcaccctccgttttatttcctactgctacttgttgtgtcttgaataatttcgataaataaaggactccgccagagattggcacttgaatcgatcc

SEQ ID NO: 22477 - DNA, 867 bp, Zea mays
  Clone ID: LIB3587-212-H5_FLI
gcgtccggaaggaatccgatccatccaagccaagccaaggcagagaagaagaagaggaggaagaagaagcatcggcagcatgtcggaggggactgccaactgcgtggacatcctgatcgccatcatcctgcctccgctgggggtgttcctcaagtacgggtgcggccacgagttctggatctgcctcctcctcaccttcctcggctacatccccggcatcaccttcgccggtccaacatgggtaagacacgtggtatgggagctgggcgcaagctcaagacccacagaaggaaccagaggtgggctgacaaagcctacaagaagagccatctcggcaacgagtggaagaaaccctttgctgggtcatctcacgcaaagggaatcgtccttgagaagatcggcattgaggctaagcagcctaactctgctatccgtaagtgcgctcgtgtccagctggtgaagaacgggaagaagattgctgcctttgtgccaaacgatggttgcttgaactacatcgaggagaacgatgaggtgctgattgctggattcggtcgtaagggccatgctgtgggagatattcccggcgtccgtttcaaggtcgtgaaggtctctggcgtttccctcctcgccctcttcaaggagaagaaagagaagccgagatcttaaaacgctgcaagggttttggagatttaggcctggtggcgcaccgcgcacctgtagcgctcacacaagccatagcagacctcatgttgagatgaaccagcaggtgtttttgccatagttttgttgagacatctgaattcgagctttatatctgaaattgctagtcggtgtgtgatttgtgatgaaccaagcagcgccggtgct

SEQ ID NO: 22478 - DNA, 943 bp, Zea mays
  Clone ID: LIB3587-213-D5_FLI
ggggcgagctgtcagagtcggtgaggggcgtgctgcgggggtacccgaggctgcggctgacgcacgggcggatggtgctggaggtgcggcccaccatcaagtgggacaagggcaaggccctggagttcctgctcgagtcgctcggcttcgcggactgcagcagcgtgctgcccgtgtacatcggcgacgaccgcaccgacgaggacgccttcaaggtcctgcggcgccgcggccaggaccagggcgtcggcatcctcgtgtccaagcaccccaaggagacgagcgcctcctactcgctccaagggcccgccgaggtgggtccgtgacccacacccacccaccaaagcatccgtttcgatcccgtgtctacgtcctcgtctccctctctccgcggccccgcacagtgtgccctggaccaccaccagcacggcaccactaccggtggccggcggtggggttgcggccgatctcacgtccgtttcggtcgtcctgtgcaattaccgccaattcgcctactccgccgccgcgttgctgacgttgccttgtggatgtgcgcaggtgatggagttcttgctgcggctcgtcgagtggaagcgcctctccagggcaaggctcaggctgcaatgagatgagatggcgcaactgccgtacgtggacacgtacgacgatgcaacggattaagctaactgccaagtgccagttaatcaagttaagatcctgctacgtggaatcctgaactgcagagaaccgacgacctgacactgtctctctactgtccccgtagtgatcaacatgcgtgtatacatcgttgtctcatacagtactagttagttagtattaagcatgcctgttacatatatatagcttcatgtgaatgtgttgtactgatgtgtgatcttaaaagtatgctgatgaacggtgtgatattttttaatccaaaaag

SEQ ID NO: 22479 - DNA, 1863 bp, Zea mays
  Clone ID: LIB3587-214-B2_FLI
ccttactacattaaacatagcaaacaacaatttcagtggttggataccaaaagaattcagctccattccagatgtaacacttgaaggaaactcatttgccaatggacctgctcccccgccaccaccttttatgccaccaccccctcaaaggccacggaatcgtcctaagcatcctcaggggccaggagatgctcctaaaggttcagaaagccacactgttcaaagtaacaagaagcaaggccttgggacaggtccgcttgtgggcataattgctggatcaatagttgctgttttatgtgtgtttctgcttctgttatgctgcatgtgcaatgctcagaaaagaactgatgatgccagcagtgaatcaaaagattttggaggacctctaacagtaaacattgagagagcttctagcagggaaatcccagagcagatggatgacacgtctatagcaactgtgaagctcccacctgctgagaaaatgactcctgagagagtttacggtaaaaatggttctgtaagaaagacaaaggtccccataactgcaacaccttatactgtcgcttctctccaagttgctactaatagtttctgtcaagattctcttctgggtgagggctcacttggtcgtgtttataaggccgatttcccgaatggaaaggttcttgctgttaaaaagatagatagcgccgcactttctttacaggaagaagacaatttccttgaggctgtatcgagcatgtctcggctaaggcatccaaacatcgtgccattgacaggatattgtgttgaacatgggcaaagacttcttgtctatgagtacattgtaaatggaacgctgcatgatatgttgcacttctctgttgaaataagcaggaagcttacatggaacatccgcgtaaggatagcactaggcactgctcgagcacttgagtacctgcatgaggtgtgcatgccgtctcttgttcatagaaatttgaagtcttcaaacattctactagatgaggagcataatccacacctatctgactgtggacttgctgccttgactccaaatactgaaagacaggtttcaactgaagtatttggatcatttggctatagcgccccagagtttgcaatgtctggcatttatactgtaaagagcgatgtatacagttttggagtggtaatgttagagctattgacagggcggaagccactagacagttccagagagaggtcagaacagtctcttgttagatgggctacccctcaacttcatgatattgatgcacttgctaggatggttgatccagcattaaacggaatgtacccagctaaatcactctctcgttttgcagacgtaattgcactctgcgttcagcctgagccagagttccgcccacccatgtcagaggttgtccagcaacttgtgcgcttgatgcagagggctagcatcgtgaggcggcaatcaggagaagagctagggttttcatacagagtcccagaacgagaaggagacctgagagacatttccttatgagcaagtgcgtccacgatagaagcgcaaaacagtttggaggcttaatgtgcaaagaaaatatctagagcactcgtatagtcatatcgattggagaactcgagctgaccgcaacaattcaggatcggatgagttttgagaacataatttcgttgcctattgttcaactttgttcattcttctacattcgtctcattttcagtcagtatacttgttgcagctgtatttaaaacgagactcaaattgatggtggtgtatagctgattattggtagagaagaaggaaaagaaatgtaaaattgatgctccgttatgttttaatgatagaaacctcaagactct

SEQ ID NO: 22480 - DNA, 710 bp, Zea mays
  Clone ID: LIB3587-215-A4_FLI
gccagccagccgggtcctcccgcgtagctagcgtaggcgtaggcgtagccgtagcagcgtgtgcgagaggggaagaaatgctggaggggagggcgcgggtggaggacacggacatgccggcgcggatgcaggacgcggcgacctccgcggcctcgcgcgcgctcgacctcttcgacgtcgccgactgccgcgccatcgccggccacatcaagacggcacgttctctctcctctcctctcctctctctgctctgccgccgtcctcgtgtcacatttttaattgatggatgagatcacgattcaaatcattcctgaggacacttggtgctggcgctgacaccctgatcgatccttgcctcccgtccgttccgacgaacacaggagttcgacaagcggtacggcgtcgggtggcagtgcgtggtgggcgccaacttcgggtgcttcttcacccacagcagcggcaccttcatctacttctccatggagcgcctctccttcctcctcttcaaggccgccgtcgtcgcagccgccgccgctgccgtcgcctcctaatcaaccaagtcttcgtccatcacaccgtgcactttgtactgctagctagtatctatctatatatgccatttgtaatgtccagaagctcagaccctgtacggccagcagcccgtgtagtagtgtaaatacatcgcgccatgcttcgctcgttcctcgtcg

SEQ ID NO: 22481 - DNA, 919 bp, Zea mays
  Clone ID: LIB3587-215-A9_FLI
ctcacctccctgctcgaatccagcgctcacccgcgccgcgtcgagacatgtcgaagaaaatcgtggtgaagctggacctgcacgacaacaaggacaagcagaaggcgctgaaggccatctccgtgctcgtcggcatcgacgccgtgtcggtggacatggcggcgcacaagatgacggtgatcgggacggtggacccggtgcaggtggtgagcaagctgcgcagcaagtcgtgggcggcgcacatcgactccgtcgggccggccaaggagcccgagaagaaggaggagaagaaggacggcggcggcgagaagaaggacggcggcggtggcgagggcaagaaggaggaaggggacgggaagaaggacggcggcggcggtggcgacggcaagaaagacggcgagggcaagaaggaggacggcgacggcaagaagcaggacggcgagggcaagaaggaggatggcgatggcaagaaggacgacaagaaggacggcggcggcggcggcgcagaggagaagaagcccgccgccgcggtgcccccgattttgccgttcccgccgctgcaccagctgccgccgcagtacatgcacatgatcaccaacgactacatgagccagtaccaccaccgccccccgccgccgccgcccgtggcgtaccacccgtacgcggcgccgcccccgccgcccccgcagtactactacgtgcgcaacatgagcatggaggagaacccaaactcgtgcgccatctgctgaagcaatcgatcccggccgctttgtctctcgcgtcgcgcgcgcgaacgtgagtacgtacgtgtctcccggcccgccccgtccatcagtccatgtgtacatccgtcgtcgtgttacgttattattacgatgagaagacagacgaatcaaactagctactcgtagcttttatt

SEQ ID NO: 22482 - DNA, 766 bp, Zea mays
  Clone ID: LIB3587-216-A11_FLI
gctggcttctcctccccctcttaccaagtcctcctcgggttagggttccttagggttttgtggaggggcgatggcggcggctgatgtggagtaccgttgcttcgtcggcgggcttgcctgggccaccagcaacgagtcgctggagaatgccttcgcctcctacggcgagatcctcgactccaaggtcatcaccgaccgggagacggggaggtctcgcggcttcggcttcgttaccttctcctccgagaactccatgctcgacgctatcgagaacatgaacggcaaggagctcgacggccgtaacatcaccgttaaccaggcccagtcccgtggcggtggcggtggcggcggtggctacggcggcggtcgcggcggcggcggctatggtggcgggcgccgtgacggcggttatggcggcggtggcggctacggcggtcggcgcgagggtggtggcggcggctacggaggcggtggcggctacggcggtcggcgcgagggtggtggtggcggctacggcggcggcggcggcggctggagggactgatgtgtgggcccatcctggcttcggccgagttatcttatctatctatagtatcgtgttaccgttcgcttctgtcaccgtgttagtgtccgttctacctttggattaggtgttggtacccctgttgttccctttgtttgctcccgctatgaaacgagacgagagaagaatgagcaaggtttttgttcgcagctatttttgtccaatgatattgatatgttgttc

SEQ ID NO: 22483 - DNA, 815 bp, Zea mays
  Clone ID: LIB3587-216-D11_FLI
cggaaatcgcctggccagcatgttaggctctatcccagctccacctgcaatggcctcagaattcccgccgtcaacagggaaatctgctgggatgctttcggctgtcagctcgagctcaattcgttttactgctggtatcatccaacttgatggcctcactttcagcagcggctccggtcagtggcccttgcagaagaatggagacttgagtttgcttgtctcttttgctgtggagggcgacgtggcatccaagctccctgttggtcttgggcgtgctactcggattagcaccgttcccatggtgctgcgcagtggtttttaccttttctttatgtcggccatgattctcttgtttagctacaaagtagggtcgtgtatctacagcaggtaagttgaagttgatggcgcctcttgtccggccagacctgtgggctgtttattttagttcaacacgtggatcattccctcagtgatgggggtatagcagtcgttcgacaccttttttacacatttaccattttgacctgtcaaaacatacagcaataaactttcgaactggtggtggtgatcatgccgggaccatgttctcgtcagggaaagcagtgcactgtgaatttggtgctctgctcttattattgtaaccaaaattaactgcaatatgttatattctgtcctgtagaggaaaagctattttatctggttattgtaaccaagattataccttggtgggttgctgtcaaagaaacaatggaaatatgattattatcaggccgtgttatttgctccaggccagataattaccatttgatcaacat

SEQ ID NO: 22484 - DNA, 1508 bp, Zea mays
  Clone ID: LIB3587-216-D2_FLI
cacacagcgcgcagagagagggagagagagagagagggtttgtcctcctgcctgccttggctagcttggcctcccctccacctccatcggtgtattacatccgagggcactccatctcttgcgtcccttaacccctccaccaatccaatccaatcccttaaccccgcaccgaatccagccttcgaagcttcctcttcctcccggtcccggtcccggtcccggtcccggagccctgttcttggtacttaggacaaggactgatgggcgaccatctcgcgttgatcgtggaccggctgctgacagagtcgacgctggaggcggcgatcggcggtgggaagcacatggtcgatctgcgtcaggagacggtggacgtcgagtactgccatcgcgggctaggcggcggctcggcgacgaaggtggtggagtgcaggatttgccaggaggaggactgggacacctgcatggaggccccctgcgcctgttgtggcagcctcaagtatgcgcatcggaaatgcattcagcgctggtgcaatgagaaaggcgacactatgtgtgaaatatgcctgcagcaattcaggccaggttatacttctccacaacagctgtttcactatggaagtataccaatgaatttcagagggaactgggagattgccaggcaagatctcaatgattcccagataataacaatgatgcccacggagcgtgattttatggacaattacgatgactactttcctatcaggacaagaagcagcaccttgtgttgccggacaattgccataattttcatgtcactcctggtccttcgccacactcttcctcttgtgattggtgacaatggggagtactcattggccttattctcgcttctggtgctgagaactgcgggaatcctctttccaatcctggtgatggtgagagcattggcaagcttccatcatcgacggcggcagcagatcatttaacactgcaggaaagccaggaagcatatatatcttcatcagagagcgaggaggaagaggaagagtatacagttgccaattctgcacaaacaaactactcgcaaccgcgcttcataccagtctactgacatggccaagaacaagccttccaacctcacatctgacagggaattccagcgcctgagtttagctgacagatgcaaggatgaatggatgatcacaaggggggaaattacaaaattgtgaatgtggtgacatagtaagatagcctgaagccactcgcttctatgcccatagagaagaatgtagtggccctgctacttgtacataggagagagtacagcagcagagtgctgacaaacccggatactgtgactcgagtctctactgcagtaacccttgtgcactgctctccccgtctcaaattatttgttatgaccttacgtagtttttgttatgcatctagatatcaactatatctagatacatcacaaaaatatttacctaagaaagttaaataatttataatttgaatttaaggtc

SEQ ID NO: 22485 - DNA, 1101 bp, Zea mays
  Clone ID: LIB3587-217-A1_FLI
tctccgtctccgtctccacaccgtgccgtagctgctgctgtccgtgtccctcgcctcgaagaagacaactccaacactgttgccgcgtgactgctgaattcgctccacacacacgcgcgaacccagcaaggcaagaacacgaacgagagagagagagagagaggcagggaggggtcatccatccatcagaccatcacccatggacaaccttaaggaggtaagacgggccagcgacctctgccccccctgaacaaccctttccttgctaggctcggccacgggtccctgctgcgagcgcgatccgtgcttgcgttcgtccttccttctcactagctcctcatcactccgtgcgctggtgcgtgcgtgcgtgcgtgcagcagcggggccacgatgccgcgggcgccaacagcggcgtctggatgacggtgccggcgttcggggactgggacaccaagaacggcgcgctgccggactactccatggacttctccaagatccgcgagatgcgcaagcagaacaagaaggagctctcccgcgccagcctcggcagcgacgacgacctcctcgcccacgcccacgcccacgcccagaagccgcaggccaacagcgcccagcccaagctcggccgcccctgccccgccgccgaccgccgaccgctccacgcccgcgaccactccccaacgggagggaagaagttcctgagctacttccagtgctgtatcaaggcctgaagaggagctgccgcaatgctatgtctgtgtgcctgtgctttgtcgcagcagaacactcgtgagcaactaggtcccggctttgttaagtatccaaaaaatgtgcaatgtatttgccctgatggtcactcgttgggcctgttagcctgtatgaagaacaagtcagtttatgggggtaggcagcggtctatctgtacatggcaccatcgatttgtttgcgactggtggtacaatgttgccctgtaatcattgtattggatgggaatttgcaccgcctccgtatttttgaacgatcacaaggggcatggttcgtttggattggttttgtaattacttatgatgggaaaatacggaaacaacaaatgacccctgc

SEQ ID NO: 22486 - DNA, 974 bp, Zea mays
  Clone ID: LIB3587-217-H1_FLI
cctgtttcgtgtgtctgaggatctcctgatctcctcctcccccctcccctgctccctccccatcgtcatccacctcctccacccatcccctcctcgctcgctctctcgcggcttccctctcctcctctgacctgcgcatctgaagcatagatagcaagcaaggaccctgctcagtgctcacctcgccggaggtgctgctgctacggcggcggcggcgtactactactactacgacgagtcactgacaggttcgctgcgatttcgcctcgacccggctccacggtccgtgctccgtcgcccccggcgggcggacccgattcccgggtctccgccgccctcttcgcctcgctcccgaggtcgtctccacgtgctctcgggaactctgcgcgcagctccggatctcaaccgtttcgttcccctcaaccaccttttcgtttacccggattcctttttttttatctcgttcgtcgtcatggatcgatgatcaaggtgtccgccttcccttcgagtacaggcagcaaggggggaaggaaatcgcggcagttaattccgagatctgtgccgatttttagggcccaagctggaaagattcgactctgcgcgcgcacaagcccacaggagtgcagaattgaccgcgcgcacgacgacgacgaccaccaacagcaacaggagagaggaggagatcgataagggatggagggcggcgagacgacgctgtccgggttcggcggtgccggggcccccggcgtggacaccaaggtgctgcacgcgttccagaccagcttcgtgcaggtgcagacgctgctggaccagaaccgcctcctgatcaacgagatcaaccacaaccacgaatccaaggtgcccggcgacctctcccgcaacgtgggcctcatcagggagctcaacaacaacatccgccgcgtcgtcgacctctacgccgacctctcctcgctcttcgccgcggccgacggcgg

SEQ ID NO: 22487 - DNA, 906 bp, Zea mays
  Clone ID: LIB3587-218-A9_FLI
ctggccacagcagggtatggcgtgtttggtatcgattatgagggccacggcaagtccatgggtgccaggtgctacatccacaagtttgagagcctcgtggccgactgcgacatgttcttcaagtccatctgtggcatggagggatacaggaacaagagccggtttctatacggcgagtccatgggcggagccgtggctctactgctgcacaggaaggatccgaccttctgggacggtgcagttcttgtggcgccgatgtgcaagatatcggagaaagtgaagccgcacccggtggtggtcaccctgctgactcaggtggaggagatcatccccaagtggaagatcgtccccaccaaggacgtcatcgactccgcattcaaggaccccgtcaagcgcgagaagatcaggaagaacacgctcatctaccaggacaagccccggctgaagacggcgctggagcttctcaggaccagcatggatgtggaagacagtctgtcagaggtgaggatgccgttcctcgtcctgcacggcgaggccgacgcggtgaccgaccccgaggtcagccgcgccctctacgagcgcgcggccagcgccgacaagaccatgaagctctacccggggatgtggcacggcctcaccgccggcgagcctgacgacaacgtggagctggtgttctccgacatcgtctcgtggctcgacaagcgcagtcgccactgggaacccgacgagcgggtgagaagggctccgccggagactgagaacaagcgccgcgtcaccagcagcagcagtcaacggcccggcagcttcctctgcggactaggctgccgatgccggcaacaccagcaacagtgtagtaggatgtagatatggaaaacacttgcttttcctccctaaagttttttttgg

SEQ ID NO: 22488 - DNA, 801 bp, Zea mays; identical to SEQ ID NO: 22443
  Clone ID: LIB3587-219-A3_FLI

SEQ ID NO: 22489 - DNA, 1595 bp, Zea mays
  Clone ID: LIB3587-219-F12_FLI
cggaacgcacacaccgcccgtccccgatctccgatcccctcgtcgatccaaagatgcagatcttcgtcaagaccctcactggaaagactatcaccctcgaggtggagtcttctgacaccattgacaacgtcaaggccaagatccaggacaaggagggcatccccccggaccagcagcggctcatctttgctggcaagcagctcgaggacgggcgcacacttgccgactacaacatccagaaggagagcaccctccaccttgttctccgcctcaggggaggcatgcagatcttcgtcaagaccctcactggaaagactatcaccctcgaggtggagtcttctgacaccatcgacaacgtcaaggccaagatccaggacaaggagggcatccctccagaccagcagcggctcatttttgccggcaagcagctcgaggacgggcgcacgctggccgactacaacattcagaaggagagcaccctccacttggtgctgcgtctcaggggcggcatgcagatcttcgtgaagactctgaccggcaagactatcacccttgaggtcgagtcttctgataccattgataatgtcaaggccaagatccaggacaaggagggcatccctccggaccagcagcggctcatttttgccggcaagcagctcgaggacgggcgcacgctggccgactacaacattcagaaggagagcaccctccacttggtgctgcgtctcagaggtggcatgcagatcttcgtgaagacacttactggcaagacgatcacccttgaggtggagtcctcagacaccattgacaacgtcaaggccaagatccaggacaaggagggcattccaccggaccagcagcggctgatcttcgccggcaagcagctggaggatggtcgcaccttggctgactacaacatccagaaggagagcaccctccacctggtgctccgcctcaggggtggtatgcagatttttgtgaagacattgactggcaagaccatcaccttggaggtggagtcgtctgacacaatcgataatgtcaaagccaagatccaggacaaggagggcattccaccggaccagcagcgcctgatctttgctggcaagcagctggaggatggccgtaccctcgccgactacaacatccagaaggagagcaccctccacctggtgctccgcttgcgaggtggtatgcagatctttgtgaagaccttgactggcaagaccataaccctggaggttgagagctccgacaccatcgacaacgtgaaggcaaagatccaggacaaagagggcatccccccagaccagcagcgtctgatcttcgctggcaagcagctggaggatggccgcaccctagcagactacaacatccagaaggagagcactctccacctggtgctccgcctccgtggtggtcagtaagccatggttcatttaagctgctgctgtacctgggtatctgcgtcgtctggtgccctctggtgtacctctatatggatgtcgtcgtctaataaacatctgtggtttgtgtgtcatgaatcgtggttgtggcttcgttgtttaatggacctgttgtgtcctctgtgttgt

SEQ ID NO: 22490 - DNA, 710 bp, Zea mays
  Clone ID: LIB3587-220-A6_FLI
atgatgctagaaggacataccgaaggatggtattccttagatttgaaccaaataatcagacatacctctcactcatcaacggttatgtctcaactgagaaatactttagtgtgctcatactgtggacagaagtaaggaggagggggattgaattcaaccatgagttgattgatgcctttctttatgctttggtaaaaggagggttctttgatatggcgatgcaggtgattgaaaaggcgcaagagttcaaaatatttatcgataaatggaggtacaagcaagcattcatggaaacacacaaaaaactgaaagtggcaaagctaagaaagcggaacttcaggaaaatggaagccctagtggctttcagaaattgggctggtatcaacacataacatcgcaaccttgattttatcaacctgtcatgtgtcatgactgaatttatgatcttcagaaagctgtagcaagcgctatggatctttagagatggttaaagtaaagcagctgtttggctgtggtaaatttgcattttgcaacaaggttagataaaaattggctcgcttgtgttctctatgttatttataggactggatgtttactttgtactttatagctatactgacctgtctaggcactggtttgcagtaggaccccattcaaacttcagaccatgtgtagtactggaatgatcaatgacaagtttctcttgaaat

SEQ ID NO: 22491 - DNA, 432 bp, Zea mays
  Clone ID: LIB3587-220-C2_FLI
tttggcagtgctgtcagctacggtgtatacttttacaatgctactaggggtagcttaaccacacttagttctctcactttcttgacccccatgtttgcatccgttttcgggtacctgtacctgggtgagaccttctcaacagtacagattggtggtgcgcttctcacactggttgccatctacatggttaactacaaaagcattataggtgagaaataagaggctatcacctacttgtgcgacgtttatcacataagggtggttgggtgctgcatgcggcacctattgccacttgttgggttcaggaatctgaagattaagtacagtcatgaagactcaggcaatctaataggattgtcgaaggagctgatgaaacctatttggttttgtgccactttatactgcatttacagtctaggttctagatacgcg

SEQ ID NO: 22492 - DNA, 959 bp, Zea mays
  Clone ID: LIB3587-220-G1_FLI
tgcgattcctctcccctcgcctcctcgtctccccctaggggatcgtcggagaggaatcgcaaagagggccgtctcatccgagttaaggaagccatggagcacaaggaggctgggtgccaggcccccgagggacccatcctctgcatcaataactgtggcttcttcggcagcgcggcgaccatgaacatgtgctccaagtgccacaaggagatgataacgaagcaggatcaggccaagctggctgcctcctctatcgacagcatcgtgaacggcagcgacgccgtcatggagccggttgttgctggcagcaacacggtagtagctgttgcccaagttgagttgcaaacaatgaacgtgcagcagcccgctgatgttgccggacccagcgagggggtggcggcgatctccaaaggggggaaggtagggccgaaccggtgcagcgcctgcaggaagagggttggacttacgggattcaactgccggtgtgggaacttgtactgcgcactccaccgctactccgacaagcacgactgcaagttcgactaccggactgctgccagggacgccattgccaaggctaatccggtggtgaaggcagacaagctcgacaagatctagggggggttccctacggttgggtatcaggaagattgtaaaccgcggtaactcgtcatgcggaactgctgccttgccccccgcgcctttctcttccatgtttgctgctacaatcttgttgttgggcattgcagtgcacggtgcacacttgtgtagcccgcctcgagaattcctgcctctgcatctggtcagttctaaaatgatttgcatgttggctatgttgtgtaagctctatttatggtggtctcgctgagacgggtatttggcttcgcagttatctagctatgtgatgtactgttgtcttgtccctgggtattatatggtacactgcagccagtaatagt

SEQ ID NO: 22493 - DNA, 1031 bp, Zea mays
  Clone ID: LIB3587-221-D9_FLI
tgacaagtcgggaaagctcgtccacttccagttccactccgctagaaagcttgaacttggatgccgagcctataaatggcgaccgaccccggccacttccactcaccgcactccagcgttcagcattagacacgagagctcctagtagccagaccactagtcccgcgaccctgtcgagagaaacagacagagcaacatggcgcctgcattgtcattcccgatcatcgacatggggctgctcgccggggaggagaggccggcggcgatggagcggctgcaagatgcgtgcgagaactggggcttcttcgagattctgaaccacggcatctcgacggagctgatggacgaggtagagaagctgaccaaggagcactacaagcgggtgcgcgagcagaggttcctcgagttcgctagcaagacgctcggggacggccgcgacattgcgcagggcgtgaaggcggagaacctggactgggagagcaccttcttcgtccgccacctcccggagcccaacatcgccgagataccggacctggacgacgagtaccggcgcgtcatgaagcggttcgccggcgagctggaggcgctggcggagcggctgctggacctgctgtgcgagaacctcggcctcgacaggggctacctggcgcgcgcgttccgcgggcccagcaagggcgccccgacgttcggcaccaaggtcagcagctacccgccgtgcccgcgcccggacctcgtcagcggcctgcgcgcgcacaccgacgccggcggcatcatcctgctgttccaggacgaccgggtgggcggcctccagctgcttaaggacggcgagtgggtggacgtgccgcccatgcgccacgccgtcgtcgtcaacctgggggaccagctggaggtgatcaccaacggcaggtacaagagcgtcatgcaccgggtggtggcgcagcccagcgggaacaggatgtccatcgcgtccttctacaacccgggcagcgacgcggtcatcttccccgcgccggcgctggtcaaggccgagg

SEQ ID NO: 22494 - DNA, 1021 bp, Zea mays
  Clone ID: LIB3587-221-H1_FLI
tttcaattatctcaaacctgtgcgtctgcccctttccagctttcctctcaaacggagagatgtactcggatcagatctccaccgggcgcaagcgctccatccatgaccgccttgacggcgacctccctgccggcacgggcgccggcggccgtgtccgtcacacggtgtccaagaggcaacgacagatagatgaaaaatggaagcatgatctgtatcgggaagatgatgaaccagcttcaaatccgaaggatttgcgattgaagcttcagaggcgaagttttcaacaagattttaccagcacaagaagttctggtgtgcgtgatctacgtgagaagctatctggtataatgaacccacagccatcaaatgctgacccaccaaagccaaagccaaagccagtatcggaggttgttaacatctcaaggcgtcaaattgctgatgaaatgcatgcacgccaaaataagaaaccaccaaagcagacttcatcgaagaagacatctcagccaaaggctgaaagtccactcgacagtttcctgagttcccttgggcttgagaagtactcaattaccttccaggcagaagaggttgacatggcagccctaaggcatatgacggacagtgatctaaaagctttgggcattccaatgggtcctcggaagaagattatccttgccttggaatcgagagcataagggaatgacaagggagtacagtgtaggaaggtgggggatatgctaggcatgctcgtgtgcaagttcgacaaaaactttgtatccacatatcttggaaagggtacaacaacaatgattttatgggtctcttgtaacgcataccctgtcctgttgagcatgttcagcgaagtttaggattgctagaaggcaggccacggcgtctattgctgtaacttgtttccgtgttaattaagtggtgcggtatacatgttgaggcagttgggttcgtcttggaatgctatatcctataactacttgggtgtttggttcgaagaatgagatattacatc

SEQ ID NO: 22495 - DNA, 1387 bp, Zea mays
  Clone ID: LIB3587-221-H11_FLI
gcaccctccacttggtgctgcgcctcaggggaggcatgcagatcttcgtgaagaccctgaccggcaagactatcaccctcgaggtggagtcttcagacaccatcgacaacgtcaaggccaagatccaggacaaggagggcattcccccagaccagcagcggctcatctttgctggaaagcagcttgaggacgggcgcacgcttgccgactacaacatccagaaggagagcaccctccacttggtgctgcgcctcaggggaggcatgcagatcttcgtgaagaccctgaccggcaagactatcaccctcgaggtggagtcttcagacaccatcgacaatgtcaaggccaagatccaggacaaggagggcatcccaccggaccagcagcgtttgatcttcgctggcaagcagctggaggatggccgcacccttgcggattacaacatccagaaggagagcaccctccacctggtgctccgtctcaggggtggtatgcagatctttgtgaagacactcactggcaagacaatcacccttgaggtggagtcttcggataccattgacaatgtcaaggccaagatccaggacaaggagggcatcccacccgaccagcagcgcctcatcttcgccggcaagcagctggaggatggccgcaccctggcggattacaacatccagaaggagagcactctccacctggtgctccgcctcaggggtggcatgcagatttttgtgaagacattgactggcaagaccatcaccttggaggtggagagctctgacaccattgacaatgtgaaggccaagatccaggacaaggagggcattcccccagaccagcagcgtctgatctttgcgggcaagcagctggaggatggccgcactctcgcggactacaacatccagaaggagagcacccttcaccttgttctccgcctcagaggtggtatgcagatctttgtaaagaccctgactggaaaaaccataaccctggaggttgagagctcggacaccatcgacaatgtgaaggcgaagatccaggacaaggagggcatccccccggaccagcagcgtctgatcttcgccggcaaacagctggaggatggccgcaccctagcagactacaacatccaaaaggagagcaccctccaccttgtgctccgtctccgtggtggtcagtaagtcatgggtcgtttaagctgccgatgtgcctgcgtcgtctggtgccctctctccatatggaggttgtcaaagtatctgctgttcgtgtcatgagtcgtgtcagtgttggtttaataatggaccggttgtgttgtgtgtgcgtactacccagaactatgacaaatcatgaataagtttgatgtttgaaattaaagcctgtgctcatt

SEQ ID NO: 22496 - DNA, 1787 bp, Zea mays
  Clone ID: LIB3587-222-A10_FLI
cgcggaacttggattgaactgtagcatacatgtgtttatgcctttgatcatgttcattctgcattttgttgcttattgtggtgctcaagttgtacaaacacttcctggacctcagaagtccggtgcaaagtgatgcacaagtttagggggagctgtgttacaacttgaccctttgagactaaccatatgcttgagtttgcttgatttagtctcgaaggagaattgatagggaaaaggtggacttggaccatgaaagacttccactgcactccgatgagagggtaacttattccaagtccatctaataaactcttattgccatttgctcttaattgatgatttttggtgaggcaatggggttaatgggccaaggttgatcccgttttggtgcttgatgccaaagggggagaaaataaaggccaaagcaataaatggatcagctaccacttgagaaattttgaaaatagtgaaatagagctttttgttttgtcaaaactctcttattgtctcttttgtcaaaagacggcttcttgtggggagaagtagtgattatgggaaaagggggagtttttgaaatcgttgatcaatatcttttggaatgactctccttatgcttcaacatgtgtgtttgacttagagatagagatttgagtttgatttgcaaaaataaaccaagtggtggcaaagggatgatccatatatgccaaaattaaatagaactcaaatttattctatttgaagtgattttgcacttgttctagttgctttatgttgtgttggcataaatcaccaaaaagggggagattgaaagggaaatgtgcctttgggccatttctaagtattttggtgattgagtgccaacacaagtgtttaaatgtaaatctatgcccatggatggacaagttgcaaatcacgagtaaaggtatgtttctaagtctcagtacattggttttgtgtactaatatatttgtctaagtgttagaaacagagagaagaagaaaaggagaatgttggctgtgtacagccaacaggatgtttcggtctggggcaccggactgtccggtggtgcaccggacagtgtccggtgcgccaggctgcctcgacccgaagacgccgctctcgggaatttgccgacggcgtacggctaaaattcaccggacagtccggtgtgcaccggactgtccggtgagccaacggtcggccgcggaatctgcgcgcgacacgtggtctggccaacggtcgggagggggcaccagactgtccggtgtgcaccggactgtccggtgcgccagatctgcaacggtcggcaacggtcggctgcgcctgttcaggaaagaaatcgggcaccggacagtgtccggtgcgcccgacgacagaaggcaaggatggccttccagatttgttctcaacggctcctagctgccttggggctataaaagggacccctaggcgcatggaggagacccccaagcattccttgagcactcttgatcactcacacatcaatcttgcgcacttgtttgacattctagtgatttgagctccgttctagtgtgctagtctcttgagctcaagtctgggacttgtgtgtgcgtattcgctgtgatttttgtgtcgtgtgtgagttgctaatccctcccttgctccgtgattctctgtgaacatcttttgtaagggcgagaggctccaagttgtggagattcctcgcaaacgggattgaagaaagaaaaacaagaacactgtggtattcaagttgatcattggatcacttgagaggagttgagtgc

SEQ ID NO: 22497 - DNA, 1312 bp, Zea mays
  Clone ID: LIB3587-222-F4_FLI
ggcatgaaaccctagggcgcccgcctcccctccgcaatttgccattgcgctccgcgatgcaggcatccgcgcgcctctcctactccgtggcctccaggaaagtgatcgcgggtgtctctatcgcgtccccacggtcgtgctatcggacctcccgggggaaggcgcatgcggcgccgctgcctgcgcaggagccgccaccgaaggggcagaagaggattacaaagcaggagcggagggttcgaatagtggaatttgttgagaattatagggcttcaaacgaaggcaagtttcctactgtaaaaaatatctgtcagcaaattggaggtggttactatgcagtgcgtgagttacttcaagaaatgaaatataatcatgcaaaattaccactgggtaatgctaaggcagctccacttcaaacaacagttgaagtcactgaacaccccatgcctaaggatgaagctagagtggttgaaagtcaaggaatactagaagtttctgagcactccatgcccaaggatgatgctgaagtggctcaacctcaaggaacagctgaagtttttgagcacttcttatctaaagatgaaggtaaggtggctcagtgtcaaggaacgtttcactttcctgagcactcaagacctaaggatgacagcggaaagactgctcgacatgatatggacacttcagaaacctgtaagactgcagatgccccagctttatctgatctaacagagaatgagggaattttatctgaccaaacagagagtgaggacaaaccagatcctggaaatcagcaaagagaaatagaagctaacaaatttgatttgaagaatttcgaaaaaaatctgaatgcaaatgatttaaacgcatcagatcaaagtggaagtgatatggtgaatgaggcaaagacacatgccaggggagacaacccaaagcttgaggaatccgcgaacacgggtcttttgggcagcctgagatcttttgcttatggcatcagaaacttctggaaaaatatgtaaatctgttgttttttttttgccgtgagtcacctaaaattgaaaaggctacagaatcgagaacttgcctctttgtcacgggcttttggttgcataggatcggagaggagagggcttttggttggagaggattgatggtttgtttgggagcaaggggagagcctctccaattcacttgctcccaaacaaaacaagccatgagacataatcccttgctattactagctattactagtaagagattatgtctctaaattcccttcaatccttatgcaataaaagccccaagcgtttgtgat

SEQ ID NO: 22498 - DNA, 1556 bp, Zea mays
  Clone ID: LIB3587-223-C4_FLI
gtccactgcattttatccttcctggtgctctgtccacctctctcgctctgggccgccgccgccgccctaagccacgtgctgaggctttcgttggtctcttcgccggcgacgagcacccagcagttctgtagaaatggctgatggtgaggacatccagcctcttgtctgcgacaatggcactggaatggtcaaggctggttttgctggcgatgatgcaccaagggcggttttccctagcattgttggccgtcctcgccacactggtgtcatggtagggatgggacagaaggacgcatatgttggcgatgaggcacagtccaagagaggtattcttacgctcaagtacccgattgagcacggtattgtgagcaactgggatgacatggagaaaatctggcatcatactttctacaacgagcttcgtgttgccccagaggagcaccctgtgttgctcaccgaggctcctttgaacccaaaggccaacagggagaagatgacccaaattatgtttgagactttcaatgttcctgccatgtatgttgcaatccaagcggtgctctcactctatgctagtgggcgtactactggtattgtactcgactctggtgatggtgtgagccacactgtgcccatttacgaaggatatgcccttcctcatgccattcttcgtttggatcttgctggtcgggacctcacagactccctcatgaaaattctcactgagaggggttactccttcacaacctcagccgagcgagaaattgtaagggacatcaaggagaagctagcatatatagcccttgactatgagcaagagttggaaactgccaagaacagctcttcagttgaaaagagctatgagctacctgatggacaagtaatcaccattggtgcagagagattcaggtgccctgaggtcctcttccagccgtcgatgattggtatggaggctgctggaatccatgagacaacatacaattcaatcatgaagtgtgacgtggatatcaggaaggacctctatggtaacattgtgctcagtggtggttcgactatgttcccgggtatcgctgatcgtatgagcaaggagatcacttcccttgcaccaagcagcatgaagatcaaggtcgttgcaccgcctgagaggaagtacagtgtctggataggagggtcgatcctagcctcgctcagcactttccaacagatgtggatatcgaaggaggagtacgacgagtctggcccggcaattgttcaccggaagtgcttctagggtttcacaagttcctcgtcgttacctagtctcaaattatgtcccctccatttctcgagatatgtgtggcagatttgcatgatacgtttgtttgtttccatcggacctgaagtcttcttggggataggctcccccctttgtatgttgtggctccaatccatgtgcgagcacgctgtgtctgtcgtgacacctggttcgtgagatgggttgtcaaacttgattggtttgttgtgcgtggctggaagagctgatagttatatatttggcttggactgtgccgcttgtatgt

SEQ ID NO: 22499 - DNA, 1281 bp, Zea mays
  Clone ID: LIB3587-223-C6_FLI
ctttgggattggaattggattactcccctcccggacaaaacggggcgagagcgcatggagagcagagaggaggagaggaagggcagcggtggcgccgccgccggcggcggctcgacccctggggcgaatctaagggacctggtgtcgagggaatactacggccacaagaagaaggtgcactctgtagcatggaactgcctaggcacaaagcttgcttcaggatcgatcgatcataccgcacgtgtctggagcattgatccacatgtccattctaaggttaaagatattgaactgaaaggccacacagatagtgtagatcagctttgctgggatccaaatcatcctgatacagttgctactgcagctgctgacaaatctattcgtctttgggatgctcgaagtggaaaatgtcaagttgttgaacttagtggagaaaacatcaacatcacatataaacatgatggcactcagatagctgttggaaacaaggaggatgagctgacgatattggatgttaggacacttaaagttgctaagaaacacaagtctacttacgagatgaatgagattgcttggaataaagctggagatctattctttattactactgggttagggcacgttgaggtggttaaggatcttgagtttttaaagccctgcaagctgaatgctcatacagcagggtgttattgcattgcaatggatccacttgataggtatttcgctgttggaagtgcagattcacttgtcagtctttggaatgtcaaagagttgttatgcattagaactttcacaaaacttgagtggcctgtaagaacagttagcttcagtcatactggagaattcattgcatatgccagtgaagatcctttcattgacattgccaatgttgagactggacgatcaattcatcagattccatgtaaagcagctatgaatagcgttgaatggaatcctaagtacaacctcctggcctatgcgggagacgacaagaacaagtatatgactgatgaaggtgttttccgggtatttggcttcgaaacacataattgatgctgacttagactaccctcatatagaatggtttgcattgtagattcactttcgaattttgtttacactgatacattttgtagatgttcagtgtaacttggatgctaatcaatcttctgccggcttgaactgaacgtcattgttgtagtgtatcacaggatacccatgtgactaacgtatttccgggatccaattctattttttattatacttactttttattatagt

SEQ ID NO: 22500 - DNA, 1717 bp, Zea mays
  Clone ID: LIB3587-223-D5_FLI
ccgggagtagtcgacgcgccgtcactgaatcctcagatcacggctagccgtaatcacgccactctgctgactcccggcgagcagtgtaacattttccttcagccatgggcaaggagaagactcacatcaacattgtggtcattggacatgtcgactctggcaagtcgaccaccactggccacctgatctacaagctcggcggtattgacaagcgtgtgattgagaggttcgagaaagaggccgcggagatgaacaagcggtcattcaagtatgcctgggtgcttgacaagctcaaggccgagcgtgagagaggtatcacaattgatattgctttgtggaagttcgagaccaccaagtactactgcactgtcattgatgcccctggacaccgtgacttcatcaagaatatgattactggcacttcccaagctgactgcgctgttcttatcattgactccactactggtggttttgaggctggtatctccaaggatggacagacccgcgagcatgctctccttgctttcacgcttggagtgaagcagatgatttgctgttgcaacaagatggatgccaccacacccaagtactccaaggcccgttatgatgagattgtgaaggaagtctcttcctacctgaagaaggttggatacaaccctgacaagatccactttgttcccatctctggtttcgaaggtgacaacatgattgagaggtccaccaaccttgactggtacaagggcccaaccctacttgaggctttggacttgatcaatgagccgaagaggccttcagacaagcccctgcgtctccccctacaggatgtgtacaagattggtggtattggaactgttcctgttgggcgtgttgagactggtatcatcaagcctggtatggttgttacctttggtcctagtggccttactactgaggtgaagtctgttgaaatgcaccatgaggctctccaggaggcccttcctggtgacaatgttggcttcaatgttaagaatgttgctgtgaaggatctgaagcgtgggtatgtggcctccaactccaaggatgaccctgccaaggaggctgctagcttcacgtcccaggtcatcatcatgaaccaccctgggcagattggcaacggctatgccccagtgctggactgccacacctcgcacattgctgtcaagtttgcggagctcattaccaagattgataggcggtctggcaaagagcttgagaaggagcccaaattcctcaagaatggtgatgctggtatggtgaagatggttcccactaagcccatggtagtggagaccttttctgaatatcctcctcttggtcgctttgctgtccgtgacatgaggcaaacggtggctgtcggagtcatcaagagtgtggagaagaaggatccaactggagccaaggtgaccaaggctgccgcaaagaagaaatgatgtgtctggctggttctgtgtttgcttgagggatacctagtggaaacgtaaaatatctcgtcttgttcacgtcattgtctgaactatgctcgcaacgtttgcctggtcgatttagaactgttattttcgttaaaaccagagtgttatttaagacttatccgaacatctggtgagccatatatggttactagttttgttactacccttgttggtgttgtgtgcttctttagcaaatgtgctgtttctaaattgctcattatttgctcgtc

SEQ ID NO: 22501 - DNA, 505 bp, Zea mays
  Clone ID: LIB3587-223-F7_FLI
aggttgtttcaggaggtgtcgcatcaaacaagtatgttaggactcgcttgaatcatgttgctgggaataatggcctacaacttgtatctcctcctccaagtctttgtactgacaatggtgtcatgattgcttggactgggattgagcattttgttgccgggaggtttgaggacccacctgctgctgatgagtctgatgatatgcagtatgagctgcggccaagatggcctcttggtgaggaatattcagaaggaagaagtgttgcacgatcattgaagaccgctcgagtccatccatcactaacgtccatgatacagggctcccttcaaaagtagttgagttggaagttggaaactaattattggtctcaactgctttatgcagttgagtttcccgtcttctagttttgggttcacaaatcagctgctttatctgtattcgctgaattgaagtaacaaacctgcaaaagggccgaactagtttaatagtagatgaggctatatac

SEQ ID NO: 22502 - DNA, 1097 bp, Zea mays
  Clone ID: LIB3587-224-B3_FLI
cgcccatcactcagccaccgccgccgccggagtgatggattcccgcggattcgattccgccggccgcatcttctccagtgccacagagatgtggacggaagagctcggttccagcatcacggcttccaccgcgggggaagctgaattcaccccggcccccgccgccgccgccgaagccagcgaggaagggggcggagacggaaaacgcaaggagtggtactccaaggctatcgcctactggcaaggcgtggaggcgtcgaccgagggggtcctgggaggttatgggtgtgtgaacgacgcggatgtcaagggcagcgacgccttcctccgccctctcctcgcagatcggttcggcaccgcgaagcgtcatctggttgcgcttgactgtggctcgggtattggacgcgtcacaaagaattttcttcttggtcatttcaacgaggtagatcttgttgagccagtatctcattttcttgaagcagcacgggaaaatcttactggatgtatggaccaaggagaagactcacacaaggctgccaacttttactgtgtgcctcttcaggacttcactcctgaggaaggaagatatgatgtgatttggattcagtggtgcatagggcaacttcctgatgatgatttcatttcattttttaatcgtgccaaggtcgggctcaaacctgatggtttttttgttctgaaagagaacattgcaagaaatgggtttgtgttagataaggtggataacagtgtcactagatcagacgcatactttagggacctatttaaaaggtgtggattatatatccttagtgttaaggaccaaaaggaactcccgaaggaactatttgctgtcaaaatgtatgcactggtgaccagtcaaccaaaaatccagaatagtggaaagagaagacggcctagaaattcacctcgtatgatccgctcttgaagaatgcccggtactaggtggccattgagctgctgggcctgtctggtcatgtattgccactggattgtgctaaaagttgctgggacatcagtttttgcggtgattgttttgtttctatacattttatttctttacaagcacaaatttcttt

SEQ ID NO: 22503 - DNA, 1556 bp, Zea mays
  Clone ID: LIB3587-224-D10_FLI
ctctacaacctctacggtatgactccgccctgcaatagtgtttcgagcgtcgtggatttcgtccccaactacatcaaggcgaaaatagagcgccacaagctcgccaagaagatcaaggagctcaaggagcgggtgaaagacgtgggcgagaggcgggagcggtacggcgttaccgtcccgcccacacaggccaagaagaggtcggaagccgggactagtgcaggcgacaacctggagacgaagagaaaggaaaggcaagagttcgatcaagccttacgagaggaggaggcgttctttgatgagaagaaggacgaggcggcaggtctctcttcgccttccacgtatatctctaacatggtgaggagatggtggatatctcgtccaccatttgaccaggccatccgcaagcttgcgcctgagcttgcaccttacgctcgcaagatacgtggagccctcctcaagcacaaggctggtggcatgaggaagaatcacgacggtcgacggttccatgtccatgacgacaccgtcgtcgccatctgcatggagatggtcctccgtgctcttcacgcttttcctcaaagccgtgttggcaaggagaaagaggaagagctaaacaaactcatggaggccttgcacgtcgcagaccttcccaatcgggtgatgaccttctgctacagcgagctgaccacggaagagaagagctgcctgcagtacctggctgccttccgactcgaaacaagcatcagcaggacaagcttggtccggcgcattgcagcggaacggctcgtgaaagaggacaaggagcaccagctaagcatggagcagagtgccgagagatgcttcgaggagcttctctttcggggattcatctccgctgatgccaccggcgccgctggcaaagtcaagtgctgccggttcaggagtgaatcggtcaagcaattcatcgtggacatgtgcaaggccgagaactttgtgggtggcggcttgccggttcaccttcgaatccagaatgacattcgttctgcggcgttggaaggcaagcagcagcacgatgatcccgtcaacaagatgctacgagagctggacttgctcccaaaaagctatcgtctcaacgtcatggatctgggaggctccatgggaatactgaagaagagccacctggcaaacatctgcaagttacggacactcaagtacctcagcctccggtatacggatgttcgtagcctacccagtcaactccaggagctccgtctgctggagacgctggacattcggcacaccaatataccacgtggctcccgcaacactcaagcacttcttccacccagcctcaagcatcttctagccggcaacgtcgactctcagggtgacgcccccaacgccacagtgagaatgcctgacagtatccaggaaatgccatgcctggaggttcgtaaccgtacgttctattatattccctctagctagctctgaatataatcttgtggaaatactgtctctgatctgaagctgttactaataattaatagaagaaataaacaaaagaacattattgc

SEQ ID NO: 22504 - DNA, 1299 bp, Zea mays
  Clone ID: LIB3587-224-F4_FLI
acctctcctcactcaccccgtccgacgtccttcgtcaccagcctccttcctcgcgccgaccgccgggatccggcgcccccgtctacgcccgcctcggtctagatctctgagaaaatggcgagaagtgcgagagctaggaggcatgtggctcatcggatcaagtccacccatcccattccttcataccgatggaaggcaaaggcaatgaaaaaatccaaccgaaagcaagtgttgccagccttgcaaaagatggactgggaagatgccaattgctctgtgtgcatggaatacccacataatgctgtgctcatcctctgttcatcccacgataagggctgccgtccttacatgtgtggaactagctaccgccactcgaattgcttggatcagttcaagaaagcatacaccaagggggcattgcttgaggaagttcctgcaaatagcgttggcactgatctggattcagcgccattggatgcagaaaaaatcgagtccattgaccttgcatgtccattgtgtcgtggcaaggtgaaagggtggacagtggtagaaccagctcgaagctacctcaatgggaaaaagagaacatgcatgcaagacggttgctcattcgtggggacctacaaggagctccgcaagcatgtcaagttggaacaccctcttgcaaagccaagggaagttgatcctgtccttgagcaaaaatggagattgctcgagattgaaagagagcgacaagatgcactcagtacgatcactgcaacaatgggcagagctgttgttcttggtgattatgtgctagacttggaggatggagtggatttggaggatgttgacagcgatgttgatgttgatgatgaccgtgggacagaaaacactcgaaggatgctactttttattatgcggcaagttgctcaacatcatcaacaccaaaggcttcataatgtgaccggtgcatctgagaatgtcgaggacaactatgtggtgaacaatggtgccaatggaaccaccccatactcctatcccttggaaggggaggacgagaatgatatggttttggccggaggtagaagcaccgatgtgctcagaccagagaggaggcgccgtcgacgccgcaggaaccgtggaaggttgtttttaggtgctaattgagaggacaggtggcctggtggggtttaaccacctgaggagtacatacacatgcttccctggtgcctgacattcatcaatttcggcctcaatttacttgttcatgatcacgtaccaagtagttatgttaacatcagctcattgcttgccatc

SEQ ID NO: 22505 - DNA, 877 bp, Zea mays
  Clone ID: LIB3587-224-H2_FLI
cgcaggccaaggccggatcggcggcctctcagatctcgccggccgccgtgagacagagaccgaagggggggttgaccggtgctcgggaggaagatgtttagcgggacgcagcagaagtgcaaggtgtgcaccaagacggtgtacccgatggaccagctctccaccgacggcgtcgtcttccaccgctcctgcttcaagtgccagcactgcaagtctaccctctcactgagcaactattcctcgttcgaaggagtgccgtactgcaagacccatttcgagcagctgttcaaggagaccgggagttacaacaagagcttccaatcacagtcacctgcaaagattactccggaaaagttggcccctgagctgaccagatcaccaagcaaagctgcaaggatgttttcaggaacacaagacaagtgtgcgacttgtggtaaaactgcgtatcctcttgagaaggtaacagtcgaagagaagtcctaccataagtcatgcttcaaatgctcccacgggggctgcgcgattacaccttccaactatgcagccttggagggcatcctctactgcaaacaccatttctcccaacttttcaaggagaagggaagctacaaccacttgatcaagtgcgcgtccgtcaagcgcgctgctgaagcacagccagaacaaccggcctctgattcctcctcctgaccacgccatttaaacagtgggggtttggaggcgagagagttgggaagcctcctgtttctacttaaaaccgcgtgatgtatgttattccatctatgccccgaggatactagactactctatttcggtatcctctgctgtgctagctggatcatatcagcgaaccatggaattgctgtcattttcaatg

SEQ ID NO: 22506 - DNA, 1542 bp, Zea mays
  Clone ID: LIB3587-224-H4_FLI
ggaacagcaggaccgcttaaagaagcttaaatcagagcatgggaaggttcagcttggaaacataactgtggatatggtccttggtggaatgagagggatcattggaatgctttgggagacatccctagtcgacccagaggagggtattcgttttaggggcctctcaattccagagtgccgaaaagtgctgccaacagcagttgagggtggtgaacctttgcctgagggtctcctctggcttcttttgacagggaaggtcccaaccaaagatcaagttgatgctctatcaaaagaattgcttgcgcgctcaactgtcccagctcatgtctataaggtaatagatgctctcccagtaactgcacatcctatgacacaatttaccgcaggaataatggctcttcaggttgagagcgaatttcaaaaagcttacggcaatggattgccaaaatcaaagctttgggagcctacttatgaagactgcttaaatttgattgctcggcttccaccagtggcttcttatgtttaccggagaattttcaaggatgggaaatcaatagaagctgataattctctggattatgcggcgaatttatcacatatgcttggttttgacgaccccaggatgctggagctgatgcggctccattgatcatgaaggcgggaatatcagttctcatactggtcatctggttggaagtgctctgtcagatccttatctttctttcgcatcatctgtgaatgggttagctgggccactacatggccttgcaaatcaggaagcgcttctatggctcaagtctataattcaggaaacagggagcgacgttacgacagaccaactcaaagactatgtctggaagacactgaagagtggaaaggttgttcatggatttggtcatggagttctgcgtaggacggacccacggtatctatgccaaagggagtttgccctgaagtatttgccagaggatccgcttttccaactgctgtccaagttatatgaggtcgtgcctccgatcctcactgagctgggaaaggtcaagaacccatggcccaatgttgacgctcacagtggactcttgctgaaccactttggactatctgaaacacggtatcacactgtcttgttcggtgtttcgagaagcatgggggtaggatcccagctcatctgggaccgtgcccttggcctgccactcgagaggcccaagagcgttaccatggagtggctggagaactactgcaagaacaaggctgcctgaagcttttcacaaatgcctgcttttttccccccagccttggctgttaatgattaaacatgagttgtagaactattctttttcccccattggccgttgaataacgcaatagcaacgtgctgctctcggacgctagaattctgtatcttccgtcacttggtggacgtccagatagacagttcatctgcggcaacactgtgcagaagagattaggacatgctgattgatctttgtatgccgacacttgagcttttgtttaacgttatgtttggcagagttgattggt

SEQ ID NO: 22507 - DNA, 1068 bp, Zea mays
  Clone ID: LIB3587-225-G2_FLI
ctgcttttctcccccttgtctgtctctctcctgtccgtggcgtgcgcaaagatttgattttttttttttctcggggaggagccggagtccgagcaggagtggcggcgggagggaggagatcctgatctgttgtcgcagcggggaggggaggaccggaggaggaagatggctgcgcaggagcaggagcaggagcaggagaagcagcaggcgaagacgagcaccacgagctcgctcccctccagcagcgagcgctcctccagctccgctcgcaacaacctcacggaaggaggggcggagagcgacgaggagatacggcgggtgccggagatgggcggcgcgtcggcgtcggcctcgtcgggcgccggcgcggacgagcgtcccaagggggaggacggcaagcaggggcaggtggcggcgggggcgcagcctccggcgggcgggaagaagcgcgggcgcacggcgggggacaaggagcagaaccggctgaagcggctgctgcggaaccgcgtgtccgcgcagcaggcgcgggagcggaagaaggcgtacctgacggagctggaggcgaaggccaagggcctggagctccgcaatgcggagctggagcagcgggtgtccacgctccagaacgagaacaacacgctccgccagattctgaagaacacgacggcgcacgcgagcaagaggtccggcggcggcggcggcggtggcggcaagggcggagacggcggcaagaagcaccacctcgccaagagctagtgagaaacgagagagggagctggttcgtgccctgctcgcgctcgcctgatctgaccattgctggcgtgttgctgttcctgacgacgccttctctttttcttcttttctcctactgttacccgtgggtttcgtctcttgcctcgctgatgcactgttttaactgttagccatcccgtctactcaccagtgaacactgctgctagttaatttctcggtggtttagggtgccgtgccagaacgccgtgtaacttcgttcttgtactgtcttgtagttcagccttgcggtttggcaattcgattcaagattactgt

SEQ ID NO: 22508 - DNA, 1629 bp, Zea mays
  Clone ID: LIB3587-225-G3_FLI
ggggcaatgactgagtgacagttccttagcagttagcagtctgctttgtcctcttgttcttctgttatatattcttgtttgcacggaatgcatgccactgttttttgtgctacctgatttgccgtcgataaaagaggtatcaactaggtagagtgaaggagaattatcgctggatggtaatatcaaccaaaaatatcgaacttcggtccatagactgaattccttttaacttgtttttttctctcgccaggatttcatagcagcacacctttaagaaatgtttctcgcaactaagttctttggaatgtaattagctacaacaagcatgggtcaattatgattctggcagtaacttgtattcctttcaactagtttggctgcagtaccggagaaatacttagtgtactggtcattgacgacagtaaatttcgtggatttaattggagacctctttataatgctaacaacatagttatctcatgaagcttattactgcagaaaatagcaggagagggtccaaccgtgattattacatttttgtttcagaatttaaatttattaccatttccaaactacaaattaaaagagaggcttagtttttcaggttgtgctaactcccacacatttggccatagttatggaatatgctgctggtggtgagctatttgaaaggatctgtaatgctggaagatttagtgaggatgaggcgagatttttcttccaacaactgatttcaggagttagttattgccactcaatgcaaatatgccatagagatttgaaactagaaaacactctcctggatgatagtatagcacctcggctaaagatatgtgattttggttactccaagtcctctgtgctgcactctcaaccaaaatcaactgtcgggacaccagcttacattgctcctgaggtccttgctagaaaggaatatgatggaaaggtcgccgatgtttggtcatgtggagttactctgtatgtgatgcttgttggtgcctatccctttgaggaccccgacgaaccgaagaatttccgcaagacgcttactcggattatcagcgtccagtacgcggttcctgattttgtccgagtttcaatggagtgcaggcatctgctgtctcggatctttgtggcgaaacctgagcaacggataaccatcccagagatcaagaaccacccatggttcctgaagaacctgcccatcgagatgaccgacgagtaccagatgaacctacagctagtcgacatgaatgtcccctcgcaaagcctggaggagatcatgtccatcatactggaggcccggaagcccggcgacgggctgaagcatgcgggacagctccccggccttgggagcatggagctggatgacattgatgttgacgacatagacgttgaggacagtggcgactttgtatgtgccttgtgacgcggttcaggctgtccggcaccgttgctgcggtggactctcccccactctcctggtctttgtgtcttgctgttattccatgttgtttgtttcagcgagctccgagctcccattttgttgttgtaatatcacatgttttgtgtaaccaaggtagtgacgctgtggataaataatagacgttatgtgttgtattcttgctg

SEQ ID NO: 22509 - DNA, 735 bp, Zea mays
  Clone ID: LIB3587-225-H1_FLI
actcctcgcatggcgcgccccttcgcagcaaagtcccgcgcatctcgtcggccgcaggatccggagcttccgacgggggacgagaacgacttcgccggcagcgaggttgccgcccccaccgagagcatcgacaagccgctggccgaggtgctaaaggagctcgggaagagggttccggactccctcgtgaagacccgcgtcgaggataatggcttcactatgaagtacatcccatggcacatcgtgaacaaaattctcaacatacatgctccagcgtggtcgggtgaggtccgcaacattgtgtactcatctgatgggaaatcagtatctgttgtttatcgagtgactcttcatgggattgatgcagagatctatagagaggccactggaactgcttctgttgatgatacaatctatggtgatcccgtacagaaggcagaatctatggcttttcgtcgcgcttgtgcgcgtcttggtcttggacttcatctctaccatgaagatatgtcatagatgactaatgttagtttttgtggcatgcttccagtttgttgcggaccattgtcccttaatggctactcattttcaccgggcatgcttctttttctttaatgtgatatggatgtgcaagtgtttgaaatttaggctgtcgtgctatatgtaagttaccaaagtaccaatgcaactactgttctgagctgtttgcttgttaagcagcagcttgttccaatgtct

SEQ ID NO: 22510 - DNA, 1335 bp, Zea mays
  Clone ID: LIB3587-225-H12_FLI
gaaatatacacgtaggtagagcatacgtgtatcctttcctttcttgctagctccatccactccactccactccactctgctactccacctacctcccggctcccggatccggcgatggagaagatgctccactcagccccggcccacggcaggctcccggagtgcttcatcttcccggccgacaagctcccgcaggccaaggccacctcagcgacggtctccctgcccatcgtggacctctccctcggccgcgacgaggtgcggcgcgccatcctcgaggccggcaaggagatcggcttcttccaggtggtgaaccacggcgtctccctggaggcgatgcaggacatggagacggtgtgccaggagttcttccggctgccggcggaggacaaggccgggctgtactcggaggacacggggagggcgacccggatctactccagcaccatgttcgacacgggcgccgagaagtactggcgcgactgcctccgcctggcctgctccttccccgccgtcggcgacagcgccgcggcctggcccgacaagccccggaggctccgggaggtggtggagaggttcacggtgcagacgcggggcctggggatggagatcctgcgcctgctgtgcgagggcctcggcctccgccccgactacctggaaggggacatcagcggcggcgacgtcgtcctccacgtcaaccactacccgccctgccccgaccccaacgccacgctcggcctgccgccgcactgtgaccgcaacctcctcaccttgctcctccccagcatggtccctggcctcgaggtcgcctacaggggcgactggatcagggtggagcctgtgcccggcgccttcgtcgtcaacttcggatgccagcttgaggttgtgacgaacgggatcttgaagagcatcgagcaccgggtgatgaccaacctgggagtggcgcggacaacggtggccacgttcatcatgcccaccacggactgcctcatcggccccgccgccgagttcctcagcgacgacaacccgccgtgctaccgcaccctcaccttcgccgacttcaagcgcatctacagcgttgtcaagctgggctcgtcgctaaacctcaccacaaatctcaagaacgttcagaaggagctctgatcatccatcaaactttgtagcctccctcgaattggcggcgaggacctagctagctagctggcaagatgtagtctgtgtcatcactgtcatgttactgcccggacgtcatggtgatgataggaatgacggaataaaaatgaaatggcaaatatgcgtgtttggcgcacgcatattcttgctaagtacttactc

SEQ ID NO: 22511 - DNA, 656 bp, Zea mays
  Clone ID: LIB3587-226-A12_FLI
aaccctagcagccgcccggtgctccctctctgcagatctcccttcgcagccgccgaggaaccccttcacagcgcggaagatggctgaacaggaggccccagtcgtggttgaggcaccaaccccagttcttggggagcctatggacttgatgactgctctgcagctcgtgatgaagaagtcaagtgctcatgatggacttgtgaagggtctccgtgaggctgccaaggccatcgagaagcacgccgctcagctttgcgtgcttgctgaggactgtgaccagccagattatgtcaagctggtgaaggcactctgcgcggagcacaatgttcacctggtcactgttcctgccgctaagacccttggcgagtgggctgggctttgcaagattgactctgagggcaaggcaaggaaggttgtaggctgctcctgtgtcgtcgtcaaggactacggtgaagaatctgagggccttaacatagtgcaggagtatgtcaagtcgcactagatgtgtgacatgtttcagtgatactcttgatttggacctgggcttaaaattatgcttttgcatctggggcttgcctaggagattagaacattttactagaagagccgaagaggatatgtatgaacaatttggacatctgaatttttttttgttt

SEQ ID NO: 22512 - DNA, 908 bp, Zea mays
  Clone ID: LIB3587-226-H2_FLI
ctagcctctcataggttctcgcacgccgaaaactccgtataaaacacacaccgccctcctacggatcaaaccacccctcggaaaaccccaaaaaagcgtcagaaaaagaagagagagctgggggatggacacgcacgtcggcaaattaatcgactcggtgggctccatcttccgcggcagcgacgtcctgccctggtgcgatcccgacatcatcgccggtttcgagagtgaggttgctgaggctgcaaatgaagaacagaaaaccgagagcctgatgaggctctcctgggcgcttgttcactctagacagcctgaagacgtcaaccggggcatcggaatgcttgaagcttcattggacaggtctagcagcccagaggaaacaagggagaagctctacttgttagctgttggtcgttacagaactggggattatacaagaagccgacagcttttggaaagatgcttagagatccaacatgactggagacaagccataactttgcaaaggctcgttgaagaaaaaaccaaaagagatggtatgattggcatggctatcatcacaggcgcctttggagttgtgggtcttgttgctggtggtataattgctgctgctgcttcgtcatccaggaagagatgaggatatcttctctgttgaagtgaataagaaaaaggcgggcaaaagcttggtggtgggtgacagtgctcatcattttttgctccgtgtgaaggggtgctcacttgtcttttttcgcgcgagagaccaaccttgtattgcgtccaaacgagagatatatgtattgttaaacagtagaggtcgaggctgccgaacattccgactgtttttactaccaaccttgtattgcgttcaaacgagatatatgtgttgtataacatgtttttttcaatgc

SEQ ID NO: 22513 - DNA, 1575 bp, Zea mays
  Clone ID: LIB3587-227-A11_FLI
ttccgcccaccgatcgaccttcacgccagtctcggtctcttccgaaggcgtcgcgcgcggttgtttgagaggagaggaggaagatgagggagtgcatctccgtccacatcgggcaggccggcatccaagtcggcaacgcgtgctgggaactttactgcctcgagcacggcatccagcctgatggccaagtgcctggagataagaccgcgggacatcacgatgatgccttcagcaccttcttcagccagattggtgctgggaagcacgttccccgtgcaatcttcgttgatctagaacccactgtgatcgatgaggtgcgcactggcacgtaccgccagctcttccaccctgagcagctcatcagtggcaaggaggatgcagctaacaatttcgcccgtggccattacacaattggcaaggagattgttgatctgtgccttgaccgtatccgcaagcttgctgacaactgcaccggcctccagggcttcctggtcttcaatgccgttggtggtggcaccggctctggccttggttctctcctccttgagcgcctgtctgtggagtacggcaagaaatccaagctgggcttcactgtgtacccatctccccaggtgtcaacctctgttgtggagccttacaacagcgtgctctccactcactcactgctggagcacactgatgtctccatcctgctcgacaacgaggccatctatgacatctgcaggcgctccctcgacattgagaggcccaactactccaacttgaatcgccttgtgtctcaggtgatctcatcgctgactgcttctctgaggttcgatggtgccctcaatgtggatgtgaacgagttccagaccaacctggttccttacccgaggatccacttcatgctctcctcctacgcaccggtgatctcttctgcgaaggccttccacgagcagctgtctgtggcggagatcaccagcagcgcgttcgagccggcttccatgatggtcaagtgcgacccacggcacggcaagtacatggcttgctgcctgatgtaccgcggcgacgtggtgcccaaggacgtgaacgccgcggtggccaccatcaagacgaagcgcaccatccagttcgtggactggtgcccgacggggttcaagtgcggcatcaactaccaggcgccaactgtggtgccgggtgccgacctcgccaaggtgcagcgtgccgtgtgcatgatctccaactccaccagcgtcgtcgaggtgttctcccgcatcaacagcaagttcgacctcatgtacgccaagcgcgcgttcgtgcactggtacgtcggcgagggcatggaggagggggagttctccgaggcacgcgaggacctggccgccctggagaaggactacgaggaggtcgccgcagagggcggcagtgatgacggtgacgaggaggaggaatactgatctgcttgcatgaatctgtttggctgtcgagccaggttgtggtgttgaaaaacctttgtttgtgtcctggccccctgggtaatgtttgggtgtttccttccatcatcacttgctgaactgctctagtatttgcatttgt

SEQ ID NO: 22514 - DNA, 1632 bp, Zea mays
  Clone ID: LIB3587-227-C1_FLI
ccaagatccaggacaaggagggcattcccccggaccagcagcggctcatcttcgctggcaagcagctcgaggacgggcgcacacttgccgactacaacatccagaaggagagcaccctccaccttgttctccgcctcaggggaggcatgcagatcttcgtcaagaccctcactggaaagactatcaccctcgaggtggagtcttctgacaccatcgacaacgtcaaggccaagatccaggacaaggagggcatccctccggaccagcagcggctcatttttgctggcaagcagctcgaggacgggcgcacgctggccgactacaacattcagaaggagagcaccctccacttggtgttgcgtctcaggggcggcatgcagatatttgtgaagactctgactggcaagactatcacccttgaggtcgagtcttctgataccatcgacaatgtcaaggccaagatccaggacaaggagggcatccctccggaccagcagcggctcatttttgccggcaagcagctcgaggacgggcgcacgctggccgactacaacattcagaaggagagcaccctccacttggtgctgcgtctcaggggtggcatgcagatcttcgtgaagacacttactggcaagacgatcacccttgaggtggagtcctcggacaccatcgacaatgtcaaggctaagatccaggacaaggaaggcattccaccagaccagcagcggctcatctttgctggcaagcagctggaggatggccgtacccttgcggattacaacatccagaaggagagcaccctccacttggtgctgcgtctcaggggcggcatgcagatcttcgtgaagacacttactggcaagacaatcacccttgaggtggagtcctcggacaccattgacaacgtcaaggccaagatccaggacaaggagggcatcccaccggaccaacagcgcctgatcttcgccggcaagcagctggaggatggtcgcactcttgcggattacaacatccagaaggagagcaccctccacctggtgctccgcctcaggggtggcatgcagatctttgtgaagacattgactggcaagaccatcaccttggaggtggagtcgtctgacacaatcgataatgtcaaagccaagatccaggacaaggagggcattccaccggaccagcagcgcctgatctttgctggcaagcagctggaggatggccgtaccctcgccgactacaacatccagaaggagagcaccctccacctggtgctccgcttgcgaggtggtatgcagatctttgtgaagaccttgactggcaagaccataaccctggaggttgagagctccgacaccatcgacaacgtgaaggcgaagatccaggacaaagagggcatccccccagaccagcagcgtctgatcttcgctggcaagcagctggaggatggccgcaccctagcagactacaacatccagaaggagagcactctccacctggtgctccgcctccgcggtggtcagtaagccatgggtcatttaagctgctgctgtacctgggtatctgcgtcgtctggtgccctctggtgtacctctatatggatgtcgtcgtctaataaacatctgtggtttgtgtgtc

SEQ ID NO: 22515 - DNA, 1310 bp, Zea mays
  Clone ID: LIB3587-227-H10_FLI
gagacgacgacgtcaccatcaaggtgctcttctgcgggctttgccacactgacctccacgtcatcaagaacgagtttggcaacgccaagtaccccgtcgttcccgggtaactatacatgttcaccaacacccaagccattccattttgcaagcgaggacagggatttactcagacggccgcagcaaagcaacaaattaaccaccctaggctcgctcatcctttcgggcgcaggcacgagatcgtcggcgtcgtcaccgacgtcggctccggcgtcacaagcttcaagcccggcgacacggtgggcgtgggctacttcgtcgactcctgccgcagctgcgacagctgcagcaaggggtacgagagctactgcccgcagctcgtggagacgtccaacggcgtgagcctggacgacgatgacggcggcgccaccaccaagggcggcttctccgacgccctcgtcgtccaccagcgctacgtggtgcgggtcccggccagcctgccgcccgccggggccgcgccgctgctgtgcgccggcgtcaccgtgttcagccccatggtgcagtacggcctgaacgcgccggggaagcacctgggcgtcgtcggcctcggcggcctcggccacctggccgtccgcttcggcaaggcgttcgggatgaaggtcaccgtcatcagcacgtcgctgggcaagcgggacgaggccctcggccgcctcggtgccgacgcgttcctggtcagccgcgaccccgagcagatgagggcggcggcgggcaccttggacggcgtcatcgacacggtgtcggccgaccaccctgtcgtgccgctgctggacctgctcaagccgatgggccagatggtcgtcgtcggcctgcccaccaagccgctccaggtgcctgccttcagcctcgtcgccggcgggaagcgcgtggccgggagtgccggcggcggcgtcggggagtgccaggccatgctcgactttgccggcgagcacgggatcaccgcggatgtggaggtcgtcgggatggactacgtcaataccgccatccagcgcttagagaggaacgatgtcaggtaccgcttcgttgtcgacgtcgcgggcagcaagattggaggctaggcatcaccattcctagtgttctgtcgatcgacgtgtgatttgcttcttcctcgagcgtgtcttattgttctggttggagcacgtatgcggccatcacacgcaggcgtggacaataaacaaggtagagtttcgggttgtgtcgtttctggatgtatggtgccggtggataataaacaagcttaattggcgtggtcg

SEQ ID NO: 22516 - DNA, 1293 bp, Zea mays
  Clone ID: LIB3587-227-H4_FLI
ggcgttccttcttaggctctgcctcaaggtgcagaatgcaacaggggtgcctcgctctgagctgcagaaggagctcaagatatgggcagtcagctccatcccggtcttccagaaccaccgattcttcgggatcttgctgaacatgctcttgaactctccactgcctgtttactctctagtgagtgctgatgatgaaatcttgttgagagatgtcctttatgattctcttatcctggtggactattctttcattaacaatggtgttggagttgatcttttgcctatatacgtgttgagattggttatcactcttgatgctgtcaatgatgccaggaggaaaggtgatcaagggagagcagtgtcttttatcaatgctttctcaacctcaaatgttcccaattttctcatcaagtgggctacttttcaatctggctctggtgcactcagcaaaccaattaccaatacaccacaatctattattaagtggcttgtcgaccttgaagtcaaggggctcaaagtgtttggagactacagttcttgtattatggagaggtttgcttatgatggggtcaagaatggccatgggaacatgattcattcagatgcggaccttttcttttttgataagcagagtggtatggagtttatggacaccaaaggcagcgaggatgaagctgtggaggagatggagactgcaggtaatgcttttatggctgctgcccagtcaatgaagggggtgactgacggcatgaggaagaggaagagctgcggatatgaagatgcagcagctgtgaagtttgtgaagtacaaggttgaagacagctcgctgaaggactacctgtcagcagctaatggcataagcagtggcagtgaggtagagaacccgcagtctgatgatgagatggaagaatcaaactgatgcataggaacaagatcacccgctaatgcttactttggacagttgcttttgagagttccttggacagccgccttttttggagccaggaccagtcttgtttcagctgccgcttgttaatgatgccgtgcagaatctgtaagactgccccatctccagctaggcattcggatgtagtagtaaccgttagctgaccatacttgacatggagcatatgatgtttgctatgggccatatcgtgctctctgttgttataacgcagctatagtagagacctaaaaatgtagtcttgcttcaagttacttttgtaatagctgggtacttcgttatcccacggaaccagttggaagtaatgaaatcttaaccttctcctgtgt

SEQ ID NO: 22517 - DNA, 1320 bp, Zea mays
  Clone ID: LIB3587-227-H6_FLI
acacacacaccttccaccgggcttggctttaaagctgtacttactatttatttctccctccccccacaaacctcatctcttctctcccgccgcgcgccactgaaaaaaacaaaacaaaagaagagaaaaaaccctccatgtgttccatatttccttcgcattcagtcatcggcgtatcgtcgcaggcgcaggctgctggcggcggcggcggcgggtttcagagcccagagagcagagccagcagcatgagcagcggcagcggcggcggcggctctctgccctccccttccggcggacctgcctgctccagatcatggtccatcagcgaggactcgctgcggaggtacgtgggctacgcgagcgagagctgcatccaggagctgctggcggcgtcgtcggactccggccgcggcggcgacgacgacgacgggtggaaggtgctggtgtaccacaacggcgtcgagatatccaagcggcggacggggccggcgcacgtcttccggagcaggtggctgctgcaggacgtctcgccggagcagttcatggccgccgccagcgccgtcgacgcagccaagcagtgggagtcggaccagctggtggagtcttcgtacatcagggagctcggcgacgacctgagcatcatccacctcaagttcggcgacgcctcctcctccaccaggaggcccgcccggcgccgtgacctggtcgtctatgagcggcgccaggccatggacgacggcacgctggtggtcgcggtggcctcgctgcccaaggagatcgccgcggggctgctaccgccgcccgcggccaccggcaagggcggcggaggctccgtcgtcggccgcagcctgctgctgcagtccggctgggtcgtcgaaaggctcgacggcgacgccggctcctgcgtcgtcacctacgtcgtgcagctggacccggccgccgggtggctgccgcggtgcatcgtcagccggctcaacagcaagctcgtcatgatcatcgccaagctcaggaggatcgcgcaggccaccgtgcctgccgccgccgcagaggtgtgacgtgcatagctaccagcaagtgatcgaaatcgaactagcagcatcgggtcagctgcacgtttagttgcattgtgtgtgtgcctaagtaaatactccctagatatatacgtactatatgtcttctttttgtagggacagagggcatgcgtctatcttgggatgcacccgcatctgtatacgtactgctacaagactatgtcagtgagaattactatgtgtgcacgttttagtgttatagaattcgcctacacgactgttgatcttt

SEQ ID NO: 22518 - DNA, 1641 bp, Zea mays
  Clone ID: LIB3587-228-A5_FLI
tcaccctcgacgccgcgctcctccgcatcgccaatatcgccgacctctcccacctcccagaccacctcctcatcgatctcttccgtgtgaaatcatatcacagtcacagccacacaggagtgtgcgggctgatgtcctcttatgcttatgctgcagaggattcaacattagaacacattttgtaatgtgctcttgcatttttattgcagagaaccctcagtgctggtaagctgacagagaaagttctcaagttgtttctagcaaccggctgtgaggatatcatattggctgttcggttgctcaacattaagcagccactcgtaccagtccttcccacaaggtgctctgagagattctagacctgctgccgttcacattgttttgattacctgagaagatgcctttggaaattcaagatagtgaggttgacattgtgattgcggcactccggcccaacctgaccactttctttgaggcatggcgaccatttttctcccgtttccacatcattgtcgtcaaagatccagacatggcagaggatcttcaaatccctgcaggttttgatctcaaggtttacaccaagtcagatattaatgggttgcttggtgcctcctcatccataaacttatctggtcactcatgccgttactttgggtatcttgtctcacgcaagaagtatgtgatttcaattgatgacaattgcctcccagcgaaggacactgctgggtcgactgttgatgttgttgcacagcacatggtcaatctgaaaacacctgctacacctttctttttcaacacactctatgatccatacaggaaaggtgctgactttgtccgtggttacccattcagcctgcgtgagggggttgagtgcatgctctcgtgtggtttgtggcttcataatgctgactacgacccgatgactcatgttgtgaagagaaatcaacggaacacaacatatgtggatgctgtgatgacggttccgcttggtgccatgctgcctgtgagcgggataaatgttgcattcaaccgcgatgtgctggggcctgctatgttcccaggcctgcgtctacgaaacgaagggaagcacagatgggatacccttgaagacatatggaatggcttatgtgctaaagtagtctgcgacagcttgggatatggtgtgaagaccggactgccttatgtgatgagaagtgatgcagaagcaggtaaagctctggagagcttgaaagagtgggaaggggtaaaagtcatggatgatgttctcccattcgtccagtcgctcaagctatcgaggactgcagttactgttgacgattgtgttaaggagcttgctggagttgtccgtgagaagctaggacctaagaatgcaatcttcaccaaagcagccgatgccatggtggaatggaacaatctctggaaagtgcatggtgctcagaatgcatagtttgggagtttgcatgtttcctacagagcatctaatagttgtttggagtgcgcgttttacagttctaaattttccctgtggaactcatgaagctgaaataaacaacagtcctttatgccgtgaatttggcatgaatagctgagcatctcattgtatacgcttaagaattatgtaatgtaatgcatcaaaagaac

SEQ ID NO: 22519 - DNA, 780 bp, Zea mays
  Clone ID: LIB3587-228-B7_FLI
ccgagccgagcgggagtagcgcgtcaggcaatggctccggcaccggtggccgctcccgtggcttcggtctcccgcgcggcagctgcgctcgcccccgccggcgccgtccgctccgccagggtagcctccctgcaccctttccactcttccaatccgccaggcagaggcggcgcttggcggcacggagcagcacctcggagagcagcacggatgactcccaatccccgaaacaagagaaggcgccgttcgggtacacgaggaaagacgtgctgctgatcggcctcggcgtcaccgccttcggcgtcggcctcaagtacgggctcgagctcctgggagttgaccccttgcaggccggcaacgtcgtgcagctgctggtggtgctcgggatgacggtggggtggatctccacctacatgttccgggtggccaacaaggacatgacctacgcgcaccagctcagggactacgagaagcaagtcatggagaaacggctggagagcttgtcggaggctgagctgcaagctctgctcgagcaagtggaggaggagaagcagcgcgtgcctcaggtcccggaagagcctaacgctattaccttcaggaagaaatgatgatcgttctattatctgccaaatggacaccgacctagcttgtttatagcatagcttcgccttcaatagctagctccatcgatattttaagatctgtacaatacgccccgctaagccactagtgctgtcaaacatgaaattatccattttctgccgcgcgccgttatgggac

SEQ ID NO: 22520 - DNA, 1139 bp, Zea mays
  Clone ID: LIB3587-228-B8_FLI
cttccgctgcctgttccgaaacggaagtgggaggatcaggtcaatggtgttgtgccctgggagtcctccgtaagcacgctgcagaagaagtctgaggcgcatgctgcgaagcagatgaaagtggagaagcaggtgaaggtggaggagacgggggtggacccgaaggtgctgaagagcgcctttcttaagatggtgaaactgatgaatgagaatgaagcggataagaagaattactgggccaatgggaagctttcccagctgaagtgccctgtatgtcaaagggattctgtagatttgcatgcactcctcaatcatgcatactatgcaaagaatcaggagcatcgtgctgatcacttagggtttcacaaagccttatgtgttcttatgggttggaattattccgtagcccctgttcacaaaaccgcttaccaagcattatcaactgtcgacgctgaagccaatcaaggagaccttatcttatggccaccaacagttataattgagaacacatacaagtcaaagaatgatggagaaaaggatgtcatgagtgataaagaggtggagagcaagcttagagaaatgggctttgccggtgtcaatgtgcagccgctccctgggaaggacgggcagaggtcggtgcaagctaagttctccgccagcctcgatggtctgaacaacgcgtcacggctcgccgagttgttcgagcgccaaggccacgggcgagcagcctgggctcgcgtccggagcgccgtccccacaggcggtgggggcgataacaaccccatgctggtcaaggtggatggcaagggagagcggacatgggtcctctacggttaccttgccacggcatgggacttgaatgtcctggaccctgagtcgaagcagaacgccactgtgaagagcaggaaggaactggatttagattaggacccacctgaatacctgatcctgctagagttgtgcatgttacctgacgagttatgaatccatggacagtgtgattcgagtgtttgtgttcacggcacagcatttaagttcgagaagaaattctttgctgaggaatcagcttcgtggataccgctgtgcaaataatgaccctctatatgtcagttattcgtagtgtattaatctactttggt

SEQ ID NO: 22521 - DNA, 882 bp, Zea mays
  Clone ID: LIB3587-228-E2_FLI
atcgctactgcctcattcatccaagttgccaggatacagtgcagagtccctgaatatggatggacaacccaaaaggtcttccagttcctgaatttcgtggtcaatggggccaggtgctctatctttgctttccgtcgccaagtgcaacaagtgaaccctccggtttggacgccttaactttgtcctatctttcagcatgttattcttgatcttcctgggcttgcattcttcactacctatgcactgttagcgcttttctgggccgagatactttaccaagcacgtggaataatgactgatcgacttcgatcaggtttctacatcattaattgtgttgtttatgcattgcaggtctttcttttttcactgccttgggttttctgatctatggaggaaggcttttcatcatgctgaaatattttcctattgagtcaaaagggaggcaacaaaagctgagagaagtcggcagagttgccaccatatgtttctgttgtttctcggcgcgatgcataatgatgtgcttcaatgcatttgacgaggaagctgacctcgatgttcttgaccatccagttctgaatttgttctattacctgcttgtggagattctcccttcatctcttgtcctgtacattctaaggaggattcctgcaaagctacgactatcccagtatcaccccgtcagcagcagctagagacgaggcattaccatctgctgagccaaaaatggtgactgctgtcaagctatgaaaaatcaactgcaacgccctctatataatatttgtattggtagcctctctgcaaaatatatatagggataagacttgcctcggttatttcttttctagaccctactcacatggaagccatccaatatttttccgt

SEQ ID NO: 22522 - DNA, 991 bp, Zea mays
  Clone ID: LIB3587-228-H3_FLI
cccaccgaattccctgcgattcctctcccctcgcctcctcgtctccccctaggggatcgtcggagaggaatcgcaaagagggccgtctcatccgagttaaggaagccatggagcacaaggaggctgggtgccaggcccccgagggacccatcctctgcatcaataactgtggcttcttcggcagcgcggcgaccatgaacatgtgctccaagtgccacaaggagatgataacgaagcaggatcaggccaagctggctgcctcctctatcgacagcatcgtgaacggcagcgacgccgtcatggagccggttgttgctggcagcaacacggtagtagctgttgcccaagttgagttgcaaacaatgaacgtgcagcagcccgctgatgttgccggacccagcgagggggtggcggcgatctccaaaggggggaaggtagggccgaaccggtgcagcgcctgcaggaagagggttggacttacgggattcaactgccggtgtgggaacttgtactgcgcactccaccgctactccgacaagcacgactgcaagttcgactaccggactgctgccagggacgccattgccaaggctaatccggtggtgaaggcagacaagctcgacaagatctagggggggttccctacggttgggtatcaggaagattgtaaaccgcggtaactcgtcatgcggaactgctgccttgccccccgcgcctttctcttccatgtttgctgctacaatcttgttgttgggcattgcagtgcacggtgcacacttgtgtagcccgcctcgagaattcctgcctctgcatctggtcagttctaaaatgatttgcatgttggctatgttgtgtaagctctatttatggtggtctcgctgagacgggtatttggcttcgcagttatctagctatgtgatgtactgttgtcttgtccctgggtattatatggtacactgcagccagtaatagtaatctgcaactgtgcgtt

SEQ ID NO: 22523 - DNA, 887 bp, Zea mays
  Clone ID: LIB3587-229-G5_FLI
aggttaactgaagcatcaaattttcacataatgctatgtcgagctcgaccagcaatcaatagtagtacatgtgcatatgaagctggcgctagctggctcatcaagcgcccaaattcactaatcaatccgtagactttgccctgtaataacgcactgctgacgctaatctaccccccatttcattaatcctatcaataatcatgctactgctactgacacaatcagagtagggcgctatgtacagtgaccaagacaaggaacctaggatgggggcggattcattaacaaggaggggggccctaatcccctgccggtctgcacgggcaataatctagtcagaccccgaggtcagtagaggcggaggacgcgtcacggtccgtcactaaccccaaatcccacaacaggccaagataatcaatcgaatcatcaagcaattaaccaaccaaaccatgggatcgaggcgggtgggcgggcgccccgatccaccgatcgatcgtcgtccagccgtccaggggaaggcttcagtacttccagaggtccgcgaggttcaggaccgggtcgtcgaactcgggcaggaactggtgcgacgacgacggggtcaccgccgacgagatctccgcgttggggtcggcgctcagcccggtctcgcgggacgggctgacctccgacgccgccgtctgccccgacaccacctgctgctccgccttgcagtacctccggatcgccgggggaaggacgtcgccggagttcatcgccggcagagagaagtactggctcgagtagtaggacgtcgggggcggcggcggctggtactgcatgtgcagcagcgcgtgctcctccatcttgaccgggaggtggctgtggctcgtgcccggcgcgccggaggt

SEQ ID NO: 22524 - DNA, 693 bp, Zea mays
  Clone ID: LIB3587-229-G9_FLI
caaagctctagttctagctagctagcaaagggggggaaaatggctccgcttctcgctgctgccatgaaccacgctgcagcccatcctggccttaggagccacctagtaggacccaacaatgagagtttctcacggcaccacctgccgtcttcttctccacagagcagcaagcgaaggtgtaaccttagctttactacacgatctgcaagagtaggcagccaaaatggagtccaaatgttgagcccctcggaaatcccacaaagggactggttcccctctgacttcaccttcggtgccgccacttcagcgtaccaaattgaaggtgcttggaatgaagatggaaagggggaaagcaactgggatcacttctgccacaatcatccggaaaggatactggacgggagcaattggagcttccagcagtaaaaaggcacatcagtgaactgacacaacgttttgccggtcgaaagataatgcttggtgttgatcgacttgacatgattaagggaattccacaaaagattctggcatttgaaaagtttcttgaggaaaacccagagtggaatgaccagattgttgtatcaataagaactgacgtccttgagtgcatgaacgctttttgtgttctaccttcatttgctaatacttaatgcaagtctgcaagcatgtgtgcagcatagaagggtcagaaat

SEQ ID NO: 22525 - DNA, 1279 bp, Zea mays
  Clone ID: LIB3587-229-H7_FLI
ttccaaagctccaactacgacgagaaccgccactcctcgaaatctccaaggattttctgcggcgaaccccttcgtgacgtgacccaatgggagaggcctcgccgtcgatcgccaaggacgtcaccgaggtgaccgatgggtgcgtcggccgcgtcgccgccaagctcgagtccatggagccctgctccagcgtcaaggataggattggctacagcatgatcacggacgcagaggagaaagggctgattactccaggcgtgagtgttctgattgaaccaactagcggcaacacaggcattggactggcctttatggctgctgccaagggctacaaacttacactcacaatgcctgcctccatgagcatggagaggaggatcatattgaaggcttttggtgctgaacttgtccttactgacccactcctgggaatgaaaggagctgtcaagaaagcggaagagatacaagcaaagacacccaactcgtacatccttcaacaatttgaaaatccagctaacccaaagattcactatgagactactgggcctgaaatctggaaagctacagcaggaaaaattgctggccttgtatctggtatcgggacaggaggtaccatcaccggtactgggcgatacctcagagagcaaaatcctaatgtcaagctctatggtgtggagccagtggagagtgctgttttgaatggtggaaaacctggaccacacaagattcaaggaattggagctggttttatccctggagtcttggatgttgatctccttgatgagactctacaggtttcaagtgatgaagctattgagactgccaaggctcttgctctgaaagaagggttgttggttggaatctcttctggtgcagctgcagctgcggcagttaggcttgctaagaggccagaaaacgccggaaagctatttgttgtcgtgttcccgagcttcggcgagcgctacctctcatcggtgctgttccagtccatcaagaaggaagcggaaagcatggtggtcgagccctagagcacacagttctgggcttctggcaaactatttcctgagacgttcatcatttccatcacagaaaaataaagctcgggtgccttctgttgatttcgacgtacatttccctgccgatggtgtccagcccactgttgtcgctggagaacacgtcgtttttagacttgtgatgttttactactgttttgacactcgttgtatttctgtatatcgcgtcagactgtgaaataaaagcagtacagtgtgtttcttgc

SEQ ID NO: 22526 - DNA, 1321 bp, Zea mays
  Clone ID: LIB3587-230-F8_FLI
ggttaaaacagtgcatcagcgaggcaagagacgaaacccacgggtaacagtaggagaaaagaagaaaaagagaaggcgtcgtcaggaacagcaacacgccagcaatggtcagatcaggcgagcgcgagcagggcacgaaccagctccctctctcgtttctcactagctcttggcgaggtggtgcttcttgccgccgtctccgcccttgccgccctgcctctccaccgtcgccggcgacgagcaccaccaggtgtttttgagtctctgttgcgagtgttgtggccatgtccatgttcaataggatcttcgggaagcccaaggagcaggccaactccaatgctttggccactctggacaagttaaatgagacacttgatatgctggagaagaaagaaaaggtgctggagaaaaaagcaaacgctgagcttgagagagccaaggagttctcgaaagcaaagaataaaagagcggctatccaatccttgaagaggaaaaaactttatgagcaacaaattgagcagcttggaaattttcagttgagaatccatgatcagatgatcatgttagaagcagctaaagctacaacagagactgttgatgcattgagaactggagctgcagctatgaaagcaatgcaaaaagcaacaaacattgatgatgtcgacaagaccatggatgaaattaacgaacagactgaaaacatgaaacaaattcaggatgctttgtcagctcctcttggagcttttgctgatttcgacgaggatgaactggaagctgaacttgaagaactggagggagcagagttggaatctcagcttcttgagcctgttgcagctcctccggtgcatccagtgcatgtcccagccaacaagcaaccagctcgccctgctccacagaaagttacagctgaagatgatgaacttgctgcactgcaagcggaaatggcattgtgatcaggttctcatggagaggtgaaacatgtaaatgaagatgaaagctgagtcatctatactatatttgctatgcgtgtacaaacttggccggatatttggcaaccgcagcagagaaaagaggctgctccagcccagtgcttgtttcagtgactttggaatctgttgtcgatcgatgacagttcttctgttaatgtcgctcggttagctctacgctaattattcagatcacccaacgtgcattgtttcagtgttttgcttaattggcccatattgtctggagccgtgcatgtaaaagtgttgcagggttcacgtttgatgtggctgttcgcagcgctttcaacctcaggcaagatatgtttccttttatc

SEQ ID NO: 22527 - DNA, 1875 bp, Zea mays
  Clone ID: LIB3587-230-G4_FLI
ctgggccacaggtggttggaaatcatgtaggctcaaaggtaaaagtagtccagttcatagccgagccgcaggagagaagagaagcaccgcaaccctaggtcgccgcctcttttcctctccactcgtccgcgggacgcgacgcgacgacaccggagggttttctgcggggatttgtttgtcgccaactcgccggcagccaagatgaggccggtcttcgtggggaacctggactatgacacccgccactcggagctcgaccgcctcttctaccgctacggcagggtcgagcgcatcgacatcaagtcaggtctgcctgcccttgcattccctccttttgcccacccccttgtttatcttcgtcttcggccggttttagattcgatctcatcttattgtgtacctagccacttggtatatcttcatgtttaaatttcaacgaattgaagaaaaaaaaggtggtggagtaagatactctgatactttgcggttgttgtgctgctccatgcgatgtaactgcagttgcaggcacagatgtttaaatctttactctggcgcaggaactaccagggcaaaacatagcttccccagggctcttcaactccttccattcaataacctggccatcatttccttcacttgaaaccatctgttcatgtgccctgatgcaaactgttactgctgctcgagcatgtttagcgggatcgtgccatcagtaccatcatgccttaccatgccacgactagaagtatcaccaacatgacaacatgctatgtgtactacattgataagcaagagttctatttatggcgaagcatgtccaatgtctccggtcattctttcttactttggatataagttgttcaacaccatgcttaggtcttatcatgaatggaatctaccactctagtgctcttcataccatcagaactatgcaggtgcagtacatttctgattattttaggcttgggtatactcatgtgttgagttgttaattgtaaaaacagaggtgcaactattctcgtgattgtttagacatttgttattaattttcatcgttctgacttgcacgtttacatctgtaggctatgcttttgtctactttgaggatgaacgtgatggcaatgatgctatacgggctcttgatggttatccatttggccctggcagacgcaggctttcagtagagtggtcacggggtgagcaagctggtagacgtgatggcaacaaaccagaagcaaatactaagccaactaggacactgtttgtcattaactttgatccaatgaacacaagagtcagtgacatcgaaaggcacttcacaccatttgggaacatatcaagtgttcggataaggaagaactttgcttttgttcagtttgaaactatggaagaagcaagaaaggctcttgaagctactcatgctaccacccttttggacagggtgatttctgtcgagtacgccttcagggatgatagtgaagtgagtgataggtacggcagcccaagaagaggtggtggctatggtaggcggggtgatagcccagtgtaccggtcacgtcctagtccagactatggtcgcccagcaagtcctgtatatggttcatatgacggtcctggtcctgttcgtgatcgctatcggagatctcctgcttatcgatcaaggtccccacctgcgaaacgaagagcatatgactaatcgagaaccctctgttatgccatatatggcctaggaacaccctgtagcaagaacttactgtacctgtaccggagcgtcaccttaatgtccttaaattcccgtgtttaatggtctgtacatggttatgctatgcgactgtcaggtttcactgcatgcaatattgtcatttggctgctacc

SEQ ID NO: 22528 - DNA, 1050 bp, Zea mays
  Clone ID: LIB3587-231-A4_FLI
cacagtcgtgaccagagcgcgagagctagctagagggccgtgaaaatgccgatcaataggatcgccctggggagccaccaggaggtgtaccacccgggcgccctcaaggcggcgttcgctgagttcatctccaccctcatcttcgtcttcgccggccagggctccggcatggccttcagcaagctgaccggcggcggcccgacgaccccggcgggcctgatcgcggcggcggtggcgcacgcgttcgcgctgttcgtggcggtgtcggtgggcgcgaacatctccggcgggcacgtgaacccggccgtgaccttcggcgccttcgtgggcggcaacatcaccctgttccgagggctcctgtactgggtggcgcagctgctggggtccaccgtggcgtgcttcctgctccgcttctcgacgggcgggcaggccacgggcaccttcgggctgacgggcgtgtcggtgtgggaggcgctggtgctggagatcgtgatgaccttcgggctggtgtacacggtgtacgcgacggcggtggacccgaagaagggcagcctgggcaccatcgcccccattgccatcggcttcatcgtgggggccaacatcctggtgggcggcgccttcgacggcgcgtccatgaaccccgccgtgtccttcggccccgccctcgtcagctgggagtggggctaccagtgggtgtactgggtcggccccctcatcggcggcggcctcgccggcgtcatctacgagctgctcttcatctcccacacccacgagcagctcccctccaccgactactaaaagccgaagccgaccgacccaggggtgcgcagcgcagcgcagctagcatccagcgctctctccccgctcgccgccgtttagtttctctcgtgcacgtgcatgcatcgtagactgtctcaggccgccgctgcgccggcgccgctcgcatcgtttgcttccttggaccagcagtcgtcgccgtcaggctgaactgcttgtaaccgtgaattccggacccgtttgcttctgtaagatttgtgcatttgcctgagt

SEQ ID NO: 22529 - DNA, 993 bp, Zea mays
  Clone ID: LIB3587-231-B7_FLI
cgttgggctcggctcgcgcggcgccgtcctctcccactctctacgcacgaacacagcacgcgccgcaccccgctctctctctcctgcgttcccatctgccatctgcggcggcggggagtgagcacattgaggacggtctactcctcgttcgcgtgcggttcgtcccgagcgatccggcaaccatgaacatcttcaagaagaaggtcgaccccaaagaggctctcaggaccagcaaacgtgaaatggcggtcgccacgcggggagttgagagagagattggttccctgcaaatggaggagaaaaggctggttgcagagataaagaagactgccaagactggaaatgaggctgcaaccaaaatattagctcggcaacttgtcaggctgaggcaacaaatcctcaatttgcaaggcacacgggcacagattcgtggagtagctactcacacacaggcaatgtatgctggcacttcaatctctgctggaatgaaaggtgcaagcaaagctatgtcagcaatgaacaagcaaatggaaccggcaaaacagataaaggtcatgaaagaattccagaaacaatcaacacagttggacatgacgcttgagatgatgtctgatgctattgatgaaacacttgacaaagatgaggcggaggaggaaacagaagagcttacaaaccaggtccttgacgagattggcgtcgatgtggcttctcagctctcttcggctcctaaagggcgcatcggagctactaacaagaaagtcgataacggtcaagcacgtcctgcaaggaacgtggcggctcctgctctagaaccctcctctgctgaagttgaggatctggagaggcgactggcatctctgcgccgtatctgagtctgagctgttgaagaaagaacttgtttgtaatactagcagttattcatctatatatgtaaagttggtttatatgtgtagggaaaacagcgagctgcacatgatacggttgaacctacct

SEQ ID NO: 22530 - DNA, 1569 bp, Zea mays
  Clone ID: LIB3587-231-C1_FLI
gcgcctccatttcggcctctgtcccttgcaagttcaatctcacctccaaccatgggtaaagagaagtcccacatcaacattgtggttattggccatgtcgactctggcaagtcgaccaccacaggacaccttatctacaagcttggaggcattgacaagcgtgtgatcgagaggttcgagaaggaggctgctgaaatgaacaagcggtccttcaagtacgcgtgggtgctcgacaagctcaaggctgagcgtgagagaggtatcaccattgatatcgctctgtggaagtttgagaccaccaagtactactgcacggtcattgatgcccctggacaccgtgacttcatcaagaacatgatcactggtacctcccaggctgactgtgctgtccttatcattgactccaccactggtggttttgaggctggtatctccaaggatggccagacccgtgaacatgctctccttgcgttcacccttggagtgaagcagatgatttgctgctgcaacaagatggatgcaaccactcccaaatactccaaggcacgttatgaagagattgtgaaggaagtctcatcctacctcaagaaagttgggtacaaccctgataagattgcctttgttcccatttctggttttgagggcgacaacatgattgagaggtccaccaaccttgactggtacaaaggcccaaccctgcttgaggctcttgaccagatcaccgagcccaagaggccttcagacaagcccctgcgtctgcccctccaggatgtgtacaagattggtggtattggaactgtaccggttggtcgtgtggagactggtgtcatcaagcctggtatggtagtcacctttggtccaactggcctgactaccgaggtgaagtctgttgagatgcaccacgaggcacttcaggaggctcttccgggtgacaatgttggcttcaacgtgaagaatgttgctgtcaaggatctcaagcgtgggtttgtggcctccaactccaaggatgaccctgccaaggaggctgccagcttcacctcccaggtgatcatcatgaaccaccctgggcagattggcaacggctatgcccctgtgctggactgccacacctcccacatcgctgtcaagtttgctgagctcattaccaagatcgacaggcgctctggcaaggagcttgagaaggagccaaagttcctgaagaacggtgatgctggtatggtgaagatgatacccaccaagcccatggtggtggagacattctcagcgtatcctccccttggtaggtttgctgtccgtgacatgaggcagacggttgctgttggagttatcaagagtgtggagaagaaggacccaaccggcgccaaggtgaccaaggctgctgccaagaagaaatgatgcgatcctgcgcctgctttagcaatacctagttttcatcattacaagttttgtttgtggtcgttgctgttattgtgtgaactgttgagctctgttagcctgtgcacttttatctatttatttggtaccttcttgctatttcaccttctgcaatacaagaatgctgtaagagct

SEQ ID NO: 22531 - DNA, 1608 bp, Zea mays
  Clone ID: LIB3587-231-D1_FLI
caaagatgcagatcttcgtcaagaccctcactggaaagactatcaccctcgaggtggagtcttctgacaccattgacaacgtcaaggccaagatccaggacaaggagggcatccccccggaccagcagcggctcatctttgctggcaagcagctcgaggacgggcgcacacttgccgactacaacatccagaaggagagcaccctccaccttgttctccgcctcaggggaggcatgcagatcttcgtcaagaccctcactggaaagactatcaccctcgaggtggagtcttctgacaccatcgacaacgtcaaggccaagatccaggacaaggagggcatccctccagaccagcagcggctcatttttgccggcaagcagctcgaggacgggcgcacgctggccgactacaacattcagaaggagagcaccctccacttggtgctgcgtctcaggggcggcatgcagatcttcgtgaagactctgaccggcaagactatcacccttgaggtcgagtcttctgataccattgataatgtcaaggccaagatccaggacaaggagggcatccctccggaccagcagcggctcatttttgccggcaagcagctcgaggacgggcgcacgctggccgactacaacattcagaaggagagcaccctccacttggtgctgcgtctcagaggtggcatgcagatcttcgtgaagacacttactggcaagacgatcacccttgaggtggagtcctcagacaccattgacaacgtcaaggccaagatccaggacaaggagggcattccaccggaccagcagcggctgatcttcgccggcaagcagctggaggatggtcgcaccttggctgactacaacatccagaaggagagcaccctccacctggtgctccgcctcaggggtggtatgcagatttttgtgaagacattgactggcaagaccatcaccttggaggtggagtcgtctgacacaatcgataatgtcaaagccaagatccaggacaaggagggcattccaccggaccagcagcgcctgatctttgctggcaagcagctggaggatggccgtaccctcgccgactacaacatccagaaggagagcaccctccacctggtgctccgcttgcgaggtggtatgcagatctttgtgaagaccttgactggcaagaccataaccctggaggttgagagctccgacaccatcgacaacgtgaaggcaaagatccaggacaaagagggcatccccccagaccagcagcgtctgatcttcgctggcaagcagctggaggatggccgcaccctagcagactacaacatccagaaggagagcactctccacctggtgctccgcctccgtggtggtcagtaagccatggttcatttaagctgctgctgtacctgggtatctgcgtcgtctggtgccctctggtgtacctctatatggatgtcgtcgtctaataaacatctgtggtttgtgtgtcatgaatcgtggttgtggcttcgttggtttaatggacctgttgtgtcctctgtgttgtacccaaaactcttctgcagcagtatggcttgaatccttatgaagtttgatgtttgaactt

SEQ ID NO: 22532 - DNA, 1111 bp, Zea mays
  Clone ID: LIB3587-232-A9_FLI
gggcaatcccagggccctaactatggccaacctcagtatccgcaacatgcacctcaacagaactacagccatggctatggtgatcctagatacaatgccccccctccgaaccagcagtactatggtcagccaccgatggccccgcagcaaggctatcctcaacagccagatccctatgctaggcctccatacagtggacctggtcaatggacccccaggggtgctcccgccgcagatggctcctaccaggcgccaccttcatcttatgggccaccgtctcagcaacctcctgcttatgggcaaacatatggtgcagcaacgggacctgatgggtatggtcaacagggttacccacagcagggtggccaggtaccagcttcatatggtcagagtgcaccagcagctccaggatatcctcagcaaggcacgcagcaaggtggctatgcacagtacccgcagacccaaccagcatatggtgatcaagcagctcaagccaatgcgaactatgggtaccagggagctccagcagatcccaactacggaagtgcgtacccacagcagccagggtatggtcctcctggtcaggcaactggtcaggctggttatgcatcctctgcgccagcggccagccagcctgtgtatggccaggctggatatacccagccacctacaaatcctccaagttatgatcagtctgcagcaccagcggcgactcagagcggttatgctgcgccccctgcaaatccacaacagcctgctgcagcaaaaggggtctcgccacagcctgctgctgctgctgctgctggatatggtgctagcgggcagtggacggcatgagcctcgtcttccgaacttcgatgacagcaaggtcaggttggatatccgcttttggcgcgtgtttgaatgtttgcatcttttggatgtctgtggacgcatcatgtagggcttgaccccgttatcgaaagagattgtaaccccttgagttgtgatactggacatcttctgtagtatctacgagtagttgcttaatgtgacttttaaacattctattcagtttggatgttccttgtcttgctacttcacagcttgccaagccagtaatctttggatt

SEQ ID NO: 22533 - DNA, 1191 bp, Zea mays
  Clone ID: LIB3587-232-D4_FLI
cgatgggcaaggacgacgtgatcgagagcggcgctggcggcggcgagttcgctgccaaggactacacggaccctcccccggcgccgctgatcgacgcggctgagctggggtcctggtcgctgtaccgcgccgtgatcgccgagttcatcgccacgctgctgttcctgtacatcacggtggccaccgtgatcgggtacaagcaccagacggacgcgtcggcgtcgggtgccgacgcggcgtgcggcggcgtgggggtgctgggcatcgcctgggccttcggcggcatgatcttcgtcctcgtctactgcaccgccggcatctcggggggccacatcaaccccgccgtcaccttcggcctcttcctggcgcgcaaggtctccctggtgcgcgcgctgctctacatcgtggcgcagtgcctcggcgccatctgcggcgtcggcctcgtcaaggcgttccagagcgcctacttcgacaggtacggcggcggcgccaactcgctcgcctccggctactcccgcggcaccggcctcggcgccgagatcatcggcaccttcgtgctcgtctacaccgtcttctccgccaccgaccccaagcgcaacgcccgcgactcccacgtcccggttctggctcccctccccatcggcttcgccgtgttcatggtgcacctggccaccatccccgtcaccggcaccggcatcaacccggccaggagcctgggcgccgccgtcatctacaacaaggacaagccctgggacgaccactggatcttctgggtgggccctctcgtgggcgctgccatcgcggccttctaccaccagtacatcctccgggctggcgccatcaaggccctcggctccttcaggagcaacgcgtgatgagcggggcttggctgtggagcaatggcgggcgacctacgggcgggggaagtcgtgagcgaggagaatgacatcatcgatcgacttgggtgccggtggttggttcgggtcgccttttttgtttcagcagctgctgcgttgcgcgcgtgcgtgagatttggtttggtttcgttcccctgcaatgtaatcatgtcgtgactctcaagggattattccgctctgctcttatggtctctgttttctatttaatgattgttattaccatgtagcagtaaccatcgtcatcagtgagaaccttgttgcttctgtctaaatc

SEQ ID NO: 22534 - DNA, 1672 bp, Zea mays
  Clone ID: LIB3587-232-E2_FLI
gggaattgggtgtttggtgtttatcatccatccgaaaagcatgcaagaagccaatcaagatcatcacataacatcacatgtttttcgtcgtgacgtctcacactcccactagttgattgaggaagagacctgctcgcttctccctctccccgagtcgatcggtccagtccgagggaagaaggcaagaagctcccggcgcgcgcgcgcaagcgagaggaaatggcgaccagcaacggctcaggggtcgcgcagggggaggaggggaagacgccaccgcctgcggggtcgatcggcgggtacgagtccctgcacaggctcctggaggccaacctttcccccgatctattccaggaagcaagtcgattgctgctgggactgaattgtgcacgacctcttgaggctatctcactgcctgacgccacaaccactcttgcggaaacacacagttttgatttgcaggcattccgttttagtgcagacaaagagtttctgaggcaatcaagagttgttcgagtaggtctaattcagaactcaattgctgttcccactacttgtcactttgctgaccaaaagaaggcaatcatggacaaaataaaacctctaattgatgcagccggcgcttctggtgtcaatattatgtgcttacaagaagcctggacaatgccttttgccttctgcacacgcgagaaaagatggtgtgaatttgctgaaccagttgatggagaatctactcaattccttcaggaacttgcacagaagtataacatggtaatagtgagcccaatccttgaaagggatataaaccatggggagactatttggaatactgctgttgttattggaaacaacggcaacataattggcattcatcgaaagaatcacattccaagagttggtgatttcaatgagagcacatactacatggagggtaacactgggcatccagtgtttgaaacagcttatggcaaaataggagtgaacatttgttatggaagacatcatccccttaattggcttgcgtttggtctcaatggagctgaaatagtgttcaacccatctgcgactgttggtgaactgagtgaaccaatgtggcccattgaggcaaggaacgccgcaattgcaaacagctacttcgttggatcaattaatcgggttggcacagaagtgttccctaatcctttcacatccggtgatgggaaaccgcaacacgcagactttggccatttctatggatctagccatttctcagcacctgatgcctcctgcaccccatctctatcacgctaccgagatggcttgatcatctccgatatggacctcaacctatgccgccagatcaaagacaagtgggccttccgcatgactgctcgctatgagatgtatgcatccttgctctcagagtacttgaagccagatttcaaacctcaagtcattgttgatcccttgattaataagaaggcataaaaactgaggtatgctggatacttgggcttaaaaggaggtcatttgtgtattgacatgaacaggaaaaggtttaccatttagcagaataatgtctacgatgaagatgcaaaatggaggaagtttctttctttttttttcctttacatttccacatactgtaaaaatgtgtttggtgtagtttgagcttcttttactcaatattcgaaac

SEQ ID NO: 22535 - DNA, 802 bp, Zea mays
  Clone ID: LIB3587-232-E3_FLI
aggacggtgaccaagcagagtgacgacgacgcgacaatcaagtccgtagctccggcggtagactttgatatggctttagctcgtctgtgcctcaacagggccatcgctggccgcgcgcaggcgctggcgaggccggcgctcgccgcagccccggcgacagatccgaaacttcactcgcttctctcaacctcggcagccgactctgccgcctcaggcgaggcaaaccgccgagatgtcgccgtgtcggagcgctccgcccccaatcgccgctgggcatggcgagacctccgcgacttcaccccgttcagcctcgtggacggtctcgggagcgcgctgtcgcaggtggcggagaccctgggccgcccgctggagcgcctggcgccgtcgcggctgctgtccgggaaggtgcgcgaggacgaggcgcggtaccggctgcgtttcgaggtgccgggcctcggcaagggcgacgtgcgcgtggccgtggaggacggggtgctggtcatcgagggcgagaagcgtgagcacggggaggagggcgacggcggcgagtggtggtcgaccagcgggtaccacgccagcctgctgctcccggacgacgcgcgcgccgaggggatcaccgccgaggtgaaggacggcgtgctgtacgtcaccgtgccgcgcaccggggagcgcaagcggaacgtcaccgaggtgaaggtgcagtgatgcgtgtcgtgtcactcaactcttgtgagtgcttcttgtttgtgagcccgtgactgttgtgtattttctccggaaataaaatacgtatcgtgtacag

SEQ ID NO: 22536 - DNA, 1157 bp, Zea mays
  Clone ID: LIB3587-233-B7_FLI
acatagtggcttcttctccctaatagctaccttcttcctatcaggctggagttcatcaaggatttgaacctggaactggagcccacaagcacacagaggaggaagaacaccaagactggttcccaacctatccaaggtagaagcgagcaacgttagtgtggtagtaacatggtgactgtgagagaggagatgcgtaaggggccatggacagagcaggaggacattcagctggtatgcactgtccgcctgtttggtgaccatcgttgggacttcattgctcaagtctcaggcctcaacaggacaggaaagagctgccgcctgcgctgggtgaactatcttcaccctggcctcaagcatggccgcatgtcaccacaagaagagcgcattatcattgagctccatgctcggtgggggaacaggtggtctaggatagcaaggaggctgccagggcgcacagacaatgagatcaagaactactggagaacacacatgagaaagaaggcacaggagaggaagatgggcatgccatcaccttcatcctcatcctcctcactgacataccaaacctgccttcttgacaccattccagtcattgggatgggcagtggtgacactcacaatggtagctgtgtcaccagcaccctcgagaacacacagagtgtcatggatggatatcccatggatcagatatggaaggagattgaggcaccacatgcacctaacttgctgagtattgctgaagggaaagagaagacgtgcagcagtatcccctgtcatctaccatcacctgtaatgtgggactacaaatgccctgagatattctggaagatgggagatcaagaaatcatgatgtgatggaagatgaaatcaagatgttggctgcacgatttggttatgggcttatggtaaataaggccatcgctattgaaggctgaaggaatacatttatattggtcaggccactcagctatctgcctagcagatttgcagtatttgtacttcctaactatgcttgcattagtatgcagtatttttaaatctagtgtaacactggtggtatgctcataatgtatgtatctatgtagtgtgaaaaatagtttgtatcagtttgtgcaatagtgtggacgctctatatgcatgatatatctatttatctc

SEQ ID NO: 22537 - DNA, 1713 bp, Zea mays
  Clone ID: LIB3587-267-C11_FLI
gatacactactgccgtgcccccctcccttctctctctcttcgccgcagcgtcagccgacggcaaaaccctagatctctctccctcttaaaccctctcaacaagtgcgggaggatgtcagagccgtccaaggtaatccacatccgcaacgtcgggcacgagattgccgagtctgatctccttcagctgctgcagccgttcggcatggtctccaagatcgtcatgttgcgtgccaagaaccaagctcttctgcagatggaagacctccatgcttccgtgagcgcgctgcaatattacacttctgttcaacctagcataaggggaaggaatgtatacatgcagttctcatctcaccaagagcttaccactgaccagagctctcatggaaggaattctgatcaggggtccgaacccaaccgaatacttttagttactatccaccatatgatctatcctataacagtggagattctacatcaagtattcaaagcttatggatttgtggagaagattgtcacatttcaaaagtcagctggttttcaagctcttattcagtatcactcgcgccaagaagctgtggaagcatttggttctttgcatggaaggaacatatacgatggttgctgccaactagatattcaatattcaaatctcagtgaactgcaagtccactacaacaacgaccgatctagagatttcacaaatccatcgttgcctacagaacaacgtcctagggcctctcagcaaggttatcttgacccagctaatctctatgccttccaacaagctggagcttcatatgcacagatggggagggttgcaatgattgcggctgcatttggtggaactttacctcatggagtgactggtaccaatgaacggtgcacactcatcgtcagtaatctgaatactgataaaattgatgaggataagcttttcaatctgttttccttgtatggaaacatagtacgaatcaagatactgcgtaacaaaccagatcatgcacttgttgagatggctgatgggttgcaggcagagctagctgtgcattatttgaaggggtctatactatttgggaagaaactggaagttaactactcaaagtatcctaacatcacacctgctcctgacgcccacgactacttaaactcaagcataaaccggttcaacagcaacgtggtcaagaactaccgacattgctgctctccaacgaagatgatccacatttctgccctccctcaagatatctctgaggaagcaatcctgaaccatgtgtctgagcacggcactgttctcaacacgaagctattcgaggtgaatggcaagaggcaggctctcattttgttcaagagcgaagaggaggctaccgaggccctcgtgtcaaagcatgccagcacgctcgagggtaacacgatccggatctctttctcccagatgcagagtatataagccacctcaagggaaagcccctgccgtcctcactcgccccacttcgagctctatttaggaagcatttcagactaagatgtgaatcctgtgcaccattctccaagactgatgctgtctgagctgtacctcccctgaccttgtttttttttttcacgcaacactggactttcaccaaaaggtttgtgtttctttccaaatcctgttggttaggatatcatttactccttaatcttcatgtcctgacattctaagttggaaggcctgtt

SEQ ID NO: 22538 - DNA, 1534 bp, Zea mays
  Clone ID: LIB3587-268-A7_FLI
gcattaccggtatttttagccaccggaggagacgggtagctgcgtagccacactagcgagagagagagagagagagagagagagagagggagggaggggaaaccatagctcctggccgttccgcgctcctcacggccggcctcagtcccttctgcctgcccatccaccgcggcgccggccggccgtctcccgtccacatccctcctcctctcctgcaaggttcctgtgtggtatggtatgctagctcggctccctgtggtttcccccctcatccggaatgtgatggcgcggtggatggtgttttgatctgtgttcgcttttggcggatctggtcgcgcgcagtagcgcagaggggtcggagtcggagtcggagtcggagaagatgatgggcgggttcctctccagggtcctcctgttggcttttggctatgcctatcctgcctacgaatgctacaagactgttgaactgaacaaaccagagattgcgcagctcatattttggtgtcagtattggattttagttgccctattgacagttttggagagattcggagatttcacaatatcatggctaccgttttactcggaagcaaagctgatgttctttgtatacttgtggtaccctaagacaaagggaactacgtatgtttatggaactttctttaaaccatatatttctcagcatgagaatgaaatcgaccggaatctccttgagctgagagctcgagccaccgacacagttgtactttattttcagaaggctgctttggcaggacaaagtactttctttgacgttttaaaatatgttgttgcccagtcaccttctcagaaatcaaggcaacgccttcatcaggaatcacagcagccgccacaacaacagcaaccacaagtgcaggtgcagcaggcgcaaccacaaaaacaagcggcacctgttatgcgcagagcatcatctattgctgctcggcaagcagcaatggcacaacaatctcaggagactaaacccgtttcatcttcgcccaagatcaagcgtcaaacatcagcgagatctggttcagtggcatccacaaagcctccggtagctgcatccgcgctaaaacctggtggtagcccaaagaaaggcgaggtcaaacctgctgccgacccagttcaaactccaaccacaggtgccgattcaccgaaacccgagcctagcgtcccatcactccctggagccgaaggggtggacaagatggccatcgacgaggccagtggtgacgccccagagggcgcagaagagcttgaccctgcgctcgaagaggagacgccgatggaggagacgatccgtgtgacgcgtgccaagctaaggaggcgcacgaccaccgaagatcctgctgggaattagctgcaggccatcgtttttcctttccctgcacattgtgttgatcttttattttttttggggggggggggtttaggctgtcatgttgtttggtggaatggagatgtgatgttgaattggttctttgtgacacagttgattatcctgtttctgtgc

SEQ ID NO: 22539 - DNA, 1212 bp, Zea mays
  Clone ID: LIB3587-268-E8_FLI
ggtgcgtcctgttcacccacgacgcctgcgtcgaccctgtccgaactggcgtgcagagcagtgctccacgacgccgccaccacctgccccagcagcggcacgctccgacaacggcgaccatggcggtgcgggtgcgggggctggggagtctgttccctgctagatccagtagatagccgactcatcgaggccctccgtgaacatcatctgcgccggtcgtctgctcggctgcagcggattaggtgagcgggattccggtagaggattgtttagtttgggattctaggttcctcgctcccgtgccggagacggcgctggacgatgaggccagggccgcggcggcgcggcgcatcgcggagaggaaggcgcgaaagcggtccgagtggcgcacctacctggtggccgccgtgatgtccagcctcggggtcacgtccatggccgtcgccgccgtgtactatcgcttcagctggcaaattgagggcggcacggtcccgatgagcgagatgttcggcacgtttgcgctctccgtcggcgcggcggtcgggatggagttctgggcgtgtgggcgcaccaggcgctatgtcacgcctccctgtggcacatgcacgagtcgcaccaccggccgcgcgagggcccattcgagctcaacgacgtgttcgccatcgtcaacgtcgtgccggccatctccctcctcggtgacgtcgcgagcagatacaccacatggacatgtttgagggcgtcccatatgggctcttcctgggaccaaaggagctgcgggaggtcggtgggttggacgagctggaaaaggagctcgcgcgaatcggccagaccatctgatggattcgtctggattccggcgcggcgatctccgctccgctccgtgattccggcgcagcctcatggttggggagccgacgaccagaacctccagaagggatttggtttggatgcgcgagcgtagatcttgacctgcatttcggatggtctatggaggcacagctcgtacctggagatgtctggtgccatggaattacttttcttttcttcttttcctgacattttcacgccggcgtctttatttgtggagacgtcgcacgttctggcccctgtattactattcttatggctaggattctgtatataacttgtagagacatgttatgaaccaccagctcaatgaagctaaaaattcggtggttggaaacagcgctg

SEQ ID NO: 22540 - DNA, 1295 bp, Zea mays
  Clone ID: LIB3587-269-D7_FLI
accgcaaggaatcaaatccgcccgccgcccgacatctcgcctcgccgcggcatttcctcaaacgccccgctcacagcgcccatgggctcccttccggtgccggcctcaacggaatgcaccccgcaggggcgcgccacggtgtcggcgtcggacctggcgccgctcttctccgcgcagcgccggcacctggaccacttcttcgaccgcctcgacatgtcgcaggcggcggcgttcgcgcaggtgctgctcgacgcgccgggcgccgtcttcttcacgggcgtcggcaagtcgggcatcgtggcgcgcaagaccgcgcagacgctggcgtcgctgggcttcgcgcgcgccggcttcctcgcccccgtcgacgcgctccacggcgacatcggcgcgctcttccccggggacgtgctcgtgctcctctccaagtccggcgcctccgacgagctgctcgcgctcgtaccctgcgcgcgcgccaagggaggctacctcgtctcggtcacctccgcggcctcgggggccgactgcccgctcgccgcggcctgcgacctcaacgtccacctcccgctgcagggggaggtgtgccccttcggcctcgcgcccgtcacctccaccgccatccagatggtgttcggggacaccgttatcgccgccatcatggaggcaaggcgactctccagggaccagtacgcctccaaccatcctgctggcaagatcggcaagaccctcattttcaaggttaaggatgtcatgaagaaacagaatgaacttcccctgtgcaaggagggagatatgataatggaccaactcaccgagctcaccagtaaaggttgtggttgtctgcttgtggttgatgaagagcatcatttgattgggaccttcactgatggtgatctccgccggacactgaaggcaagcgggccagctatctttagtctcacagttggagagatgtgcaacaggaatccaagaacaatcactgcagacgcaatggctgttgaagccatggagaagatggagtcaccaccttcacctgtgcagttcttgcctgttgtgaacgacaacaacgtcgtgtgtggaatcatcacactgcatggattggtctctgccggcctgtaaacttctgtggcaccatcaccttctgctggactgtaagctgacgtgccagcttacccagttcatacaacaagtggttctgtcgactcctcttcagtgtacgcttatgtatagtggtggataagaggaatatggtacactgctgttggttgtttatcaatgcttgcgttttgtacttt

SEQ ID NO: 22541 - DNA, 561 bp, Zea mays
  Clone ID: LIB3587-269-H11_FLI
gaagaatttggcttctgggccatcatgttttgtgacatcatggcaagcatatgacatcaatgggtacacaatctacactaaatcaaaagacatgaaaagtgttgcacaaaatagcggtgttcgtatcgatgcttttgacatacagggacagaagaccacatattttggattcatagaaaaaatatgagaacttgattatggcccaagcatgaaaataccctttatttaagtgtcaatgggtacaacatcccgtgggggtgataatgaataactacggaccacactggtactcacactggtatacttaaagaaagtagaatataaagatgacccgtgttctcgccgaatgtgttgcacaagtgttctatgtactcaatccagcagatgagaagatgcatgtagttatttctttgtcgacgacgacgagcgggcgggcggtggtggccttgcggagcttctcgaggcccgtctccgggcgaggcccggccaccacgtcgtcccacagcttctccagcatctcggtcgttcgctcttcgctgctccttttttttttctctccac

SEQ ID NO: 22542 - DNA, 1685 bp, Zea mays
  Clone ID: LIB3587-270-A3_FLI
ttcttgcgcgtagttgagctggagaagccgtgctattgcaatctcaaggtggtgaacaacagcgagcatcatgtcgcattcaaggtcaaaacaacatcgccgaggaagtatttcgtccggccgaacgcgagcatcgtccagccatgggattcttgcacaataacgagtaagcacctgtttctccatggaccatggctatgtttagcatcctccgtttggatttcgatgtgtgagtgtttgtgtctccctgccttctctcccatctggggggtacagttacgctgcaggcacagaaagattacccaccagacatgcaatgcaaggataaattcttgattcagagcacgaaggtggccgccagtaccgacatggatgagatcccccctgatacgttcaacaaggaagctgataaggtaatcgaggaaatgaagctcaaggttgtctacacattacctagctgcggaggttcagatgactctagcgtatcatctttaggaagccggagcttcaaagcagcgtctgacgatctgatgatgctgaagaatgcaagccttgaagaggtaatacgctctatgccaacaattcttaccattttttttactttgggacttcactgaaaacaagtgaattcatcacttttctctgacgaattcatagaacgaatagttttgctaacttgaatgttatatgcttgaagctttttatcatgatttaacatcgtgtggcacatgaacaatctgtttctttacacattgattgtgcattgagagaacagctacttctttcacgttggattcttaaagctatattgggataatgtcatggtggcattgattatgtggagcgtgtcaagtgcaagtctaaagaaataggaagatgttgaagcaacatgatttgacagttgaaaagtcataaagttgatcatgggggaaaggtacctataattgggaggtcataattgagggagggagggatgcccagaagcccatgagcatgtttcccttagttatgctctgcggacaaaatttggatctttttctccccttcctattgtccattccaaccagagtacctagctccctttaaaccgatggacatgttccaggtttctaactgaaaattcagagaacaatcgtgggttatccaaaggtattgtttcatgaaggaatctcattgcaacaggaagtttgtgcattagcactgatcaagactgtatgaacgagtaaacatcctttgggacaacttggtcatttttttctcacgaagttgtccccttttatcttactcagatccagacaattcagcggttgaaagaagaaagagacaacatgcttcagcaaaatcagcaaatgcaacgtgaattggatgtgcttcggaggcgcaggagccgcaaaggcgatgcaggtttctccctgacgttcgccgcgtttgctgggctaataggtctcatggtggggctcctgatgagcctcatcttctcgtccgcgccggctgatgcgtagtaagatgcaagaaaaggttgcagccaacggaagcgttgttgagttgagaccgacgtgggggaaaaggctcgctcgggggaagaagatgaaatttctgctctagtctccatttttctttcttttgctgtttgcatcctagttattattatacgaaatggcaacggggtgcagatctttccttcc

SEQ ID NO: 22543 - DNA, 999 bp, Zea mays
  Clone ID: LIB3587-270-H9_FLI
cccaccgaattccctgcgattcctctcccctcgcctcctcgtctccccctaggggatcgtcggagaggaatcgcaaagagggccgtctcatccgagttaaggaagccatggagcacaaggaggctgggtgccaggcccccgagggacccatcctctgcatcaataactgtggcttcttcggcagcgcggcgaccatgaacatgtgctccaagtgccacaaggagatgataacgaagcaggatcaggccaagctggctgcctcctctatcgacagcatcgtgaacggcagcgacgccgtcatggagccggttgttgctggcagcaacacggtagtagctgttgcccaagttgagttgcaaacaatgaacgtgcagcagcccgctgatgttgccggacccagcgagggggtggcggcgatctccaaaggggggaaggtagggccgaaccggtgcagcgcctgcaggaagagggttggacttacgggattcaactgccggtgtgggaacttgtactgcgcactccaccgctactccgacaagcacgactgcaagttcgactaccggactgctgccagggacgccattgccaaggctaatccggtggtgaaggcagacaagctcgacaagatctagggggggttccctacggttgggtatcaggaagattgtaaaccgcggtaactcgtcatgcggaactgctgccttgccccccgcgcctttctcttccatgtttgctgctacaatcttgttgttgggcattgcagtgcacggtgcacacttgtgtagcccgcctcgagaattcctgcctctgcatctggtcagttctaaaatgatttgcatgttggctatgttgtgtaagctctatttatggtggtctcgctgagacgggtatttggcttcgcagttatctagctatgtgatgtactgttgtcttgtccctgggtattatatggtacactgcagccagtaatagtaatctgcaactgtgcgttaaatggtc

SEQ ID NO: 22544 - DNA, 854 bp, Zea mays
  Clone ID: LIB3587-271-B7_FLI
gcaaggcttgccgagctgcctagccattataatgcttggtccttgaattgaagtcaattgatttccgatttaataaggcacagtttgtttgagcttctgctgtcgtcttcacatattttaatttttaatgcatgtggggattactgaaattgttgtgcagacatgtgttttgagattgtgtgttatttgtgcctgattttattgcacaggcagggtggtctatctcaaagatttttgaaagttgtttcttattatggtctcacgactctgccatataaactggtctgtaagcttgttggtgccaatctcagaaggtttgtgtgctgtcattaaaggaatatccaaattttaactttgttaaactttgttctctggtacaatgtccaggatgctctggaaccttacatgagaaagagaacagttgaacttcactggggtaagcaccatcaagattacgtggatggcttgaataagtagctggctaccagccctctgtatgtatatacactctggacgatctgataaaagaagcccacaacaatggtctcgaatcatcactttttctgggaatcgatgcaaccagaaggtggtggcttacctgagggaggtgtgctatagcagattgaaaaggattttggcttgtttactaattttagggaagagtttattcgttcagccttacaactattggggtatggttgggtttggcttgcttgtaagtttctttctattttctttgaagtacagacaccaccggttcaaactaccgatttcctgattgctctttctaaagctaatattctgccggatatttgttgcagtgaagagaaataagagaaagctttcagtagttc

SEQ ID NO: 22545 - DNA, 1543 bp, Zea mays
  Clone ID: LIB3587-271-E7_FLI
gtccgcatcggcgccgagacgtccggtgggctccggggctgacgccgttggcaagatgttccagggccctgagctatggagcaaggtcgcggccgatcccaccacgcgtggctacctcgaccagccggacttcgtgcagatgctgcgggaggtgcagcgaaaccccggcagactgaacagctacctttctgaccaacgaatggttcaggtgctcaccctcatgctgaacatcaagttccagaaccagagcagtggggcgcctgacccggcagcagcacaatcgaacccgccgccaccaaagcagcagccagaggcgaaggcaagagaaccagagccggacccggagcccgagcctatggaggtgacagaggaggataaggagcagaaggagaggaaagcgtcggcgcagaaggagaaggaagcaggcaacgccgcttacaaaaggaaggattttgataccgcgatccagcactacacagaagccatggagctcgatgacgaggatatctcctacatcaccaatcgtgctgctgtttaccttgagatgggaaagtatgatgaatgcattaaggactgtgataaggctgtcgagagaggaagggaactgcatgctgatttcaagatgatctcaagggcacttaccagaaaaggaactgctcttgccaaacttgctaaatcatcgcaagactatgatgctgccattgagattttccagaaggcgttaactgagcaccggaacccagatacactgaaaaaactaaatgatgcagaacgagcaaagaaggagctggagcaacaagagtactatgacccaagaattgctgacgaggagcgagaaaaaggtaatgagttctttaagcagcagaaatatccagaagcagtgaaacattacaccgaagctctcaggagaaaccccaaggaccccagggtatacagcaatagggctgcctgttacaccaagctaggggcccttcctgaaggtctgaaagatgctgagaagtgcattgagctagatcccacattctccaagggatacacaaggaaaggtgctatccagtttttcatgaaagaatatgacaaagcgctggaaacttatcaagctggcctaaagcatgacccgaaaaaccaggagttacttgatggtgtaaggaggtgtgttgaacagatcaacaaggcgagcagaggcgaactcagtgaggaggaactgaaagagagacagaacaaagccatgcaagaccctgagatccagaacatcctgactgatccgatcatgcagcaggttttgacggatctgcaggagaaccctcgggctgcgcaggcgcacctcaagaaccccggagtgatgcagaagatccagaagctcgtcagcgcagggatagttcagatgaagtagacggtggctggaatgtccgggttcagatctgggacctgtgctggaaatgctgtgaacttgatcattgtttcgcattttggaaactgaacccttttgtgcgaccatagtttggtcatggctgttaatgatccatatatgggttttcccatc

SEQ ID NO: 22546 - DNA, 1386 bp, Zea mays
  Clone ID: LIB3587-271-H8_FLI
cgagcttgcaagcgctgtgcgctgctggcctggtgtcagtcacctgagcaaggaagaaagatgaccacgctgcctcgcgggggcgccgcggcggcggactccgaacagcttttggtagaagcacatggctctacacgaacgctgattttgaataggccaaagcagctcaatgcactctcctctgaaatgattaaaggtctcctatggtatttcacagcttttgagaaagatgatggagtcagattgttgattatgaaggggaatagaagagtattttgctctggaggtgatattgctcaatgtgcccggtgtttatataatggaaactggaaatgggtcgatgatttcttccaaaatgaatatttgctaaattacatcattgcgacttacataaaacctcaggtttccattcttagtggaattgtcatgggtggaggagctggtgtttcaatacatggaagatttcgagttgccactgataacacgatttttgcaatgccagaaacagctctaggcctctttccagatgtaggggcctcttattttctatctcggctaccagggttctatggagaatatgttggtctaactggtgccagattggatggtgcggaaatgcttgcctgtggcctggcaactcattttgtcccgtcaaagaggttgccattgcttgaggaatcgcttaaaaagctggacacgtccagtacttttgctgtgtcgggtattatcgaccagttttcacagaggccattagtgaaagatagcagctctttaaataggatggaaaccatcaacaaatgcttctccaaaaggacagttgaagaaatcatagatgctcttgaacaagaaatctcaaatgtttcagacaaatgggttgctgcaacaatcaagtccctgaaaaaggcttcccccaccagcctaaaaatttctctgagatcgataagagaagggagaacacaaactcttggggagtgcctgcgtcgggaatatagagtggtttgccatgtcctgcgtggcaccttcagccgagacttgtctgagggatttagggctgtgctactagaaaaagacaacaagccagagtggattcctccaaggttggaacaagttcctgacgaggcagttgagcaatatttcttgagaattgatgatccccagtgggaagatctgaacctgcctgcgagacttccccaccgaagaaatattgagtccaagatttgattgaggtcttggacgaagagtgagcctcggtcaggataactcgtcaactcatgtttgaagttgtgtgcggaatgttgacgacgattgataaataataaacgcggactgaatatatgtcttataagttcacgtttatcgctaaataatttttgttgcttttgtgtg

SEQ ID NO: 22547 - DNA, 920 bp, Zea mays
  Clone ID: LIB3587-272-C7_FLI
agcccaccgaattccctgcgattcctctcccctcgcctcctcgtctccccctaggggatcgtcggagaggaatcgcaaagagggccgtctcatccgagttaaggaagccatggagcacaaggaggctgggtgccaggcccccgagggacccatcctctgcatcaataactgtggcttcttcggcagcgcggcgaccatgaacatgtgctccaagtgccacaaggagatgataacgaagcaggatcaggccaagctggctgcctcctctatcgacagcatcgtgaacggcagcgacgccgtcatggagccggttgttgctggcagcaacacggtagtagctgttgcccaagttgagttgcaaacaatgaacgtgcagcagcccgctgatgttgccggacccagcgagggggtggcggcgatctccaaaggggggaaggtagggccgaaccggtgcagcgcctgcaggaagagggttggacttacgggattcaactgccggtgtgggaacttgtactgcgcactccaccgctactccgacaagcacgactgcaagttcgactaccggactgctgccagggacgccattgccaaggctaatccggtggtgaaggcagacaagctcgacaagatctagggggggttccctacggttgggtatcaggaagattgtaaaccgcggtaactcgtcatgcggaactgctgccttgccccccgcgcctttctcttccatgtttgctgctacaatcttgttgttgggcattgcagtgcacggtgcacacttgtgtagcccgcctcgagaattcctgcctctgcatctggtcagttctaaaatgatttgcatgttggctatgttgtgtaagctctatttatggtggtctcgctgagacgggtatttggcttcgcagttatctagctatgtg

SEQ ID NO: 22548 - DNA, 1368 bp, Zea mays
  Clone ID: LIB3587-272-D12_FLI
gtcgctatctccgtcctactcctcctcatactttaccgcaaagcgcgcaccacgaattgcacctacccatttcgctaatctccctccacgagccgaccaaatcgaatcgattcgcgcgcagcgcgcccgcgcagcgattgccggcgatggcgagcctcaccctgccgccggcgatggcgaacccacggcaggacgccatcgacctccaaaaggccttcaaagggtttggctgtgacagtacaacagtgataaacatacttactcatcgcgattcagtgcagcgtggactcattcaacaggaatacagggctatgtatcatgaggaactctcccatcgcatttcatctgaactcaatggaaaccacaagaaagctatgttgctgtggattcttgatcctgctggacgtgatgcaactgttttgagagaagctctaagtggtgacactatggatctgagagcagccactgatattatatgttccaggacaccatcacagttgcaaataatgaaacagacttattatgctagatttggtacttatcttgagcatgacattggtcaccacacatctggcgatcaccagaagcttttacttgcctatgtggggattccacgctacgaaggtcctgaggttgatcctaccattgtgacacatgatgcaaaggatttgtacaaagctggtgagaaaaggctcggtacggatgagaagacctttatccgcgttttcactgaacgcagctgggcacacttggcatctgtttcgtctgcttaccatcatatgtatgaccggaaattagagaaggttatcaagagcgaaacatctggaaactttgaattcgcacttttagctatcctcagatgcgcggaaaacccagcaaagtattttgcaaagctcttacgaaaggccatgaaaggtctaggcactgatgacaagacacttataagggttgtggtgacgaggactgaaattgatatgcaatatatcaaggcagagtacttcaagaagtataagaagccattagctgaggctatccactccgaaacatcaggaaactatcggacattccttctttcacttgttggtcctggacattaggttatgtttcgaccatgggacatgatattccacccatccaccctaaatgcagcgacctacctggaaaacttatgatgttgccatttgtcagtggtgactcgtggattcgtctaacttccacatatgcggtatctagtatgcttgactaaagtattcgtgtttaagtttgtatctgggtttcttgttggaaaattctgtgcgggggcacaacagctgttgttggtcacagtaggcttgacttgtgtctccatgacatcaataatattatgtc

SEQ ID NO: 22549 - DNA, 463 bp, Zea mays
  Clone ID: LIB3587-272-H8_FLI
gctagagcaagcgcgatggcgagcaaggtgcctgctgcactgctctcatgtgctttcttgctcctactaggagccgcatgccaagcagcagctggtcactacagtcctccgagtcctgcttcgtgcgggctcaaggtggggtactacgaccacaagtgtccgcctgccgaggccatcgtcaagagcgtcgtcagagccgccgtccggcggaaccccggcatcggcgccggcctcatccgcatgctcttccacgactgcttcgtcgagggctgcgacgcctccgtgctgctggacccgacgccggccaacccgcagccggagaagctcggcccgcccaacaaccccagcctccggggcttcgaggtcatcgacgccgccaaggccgcggtggagcgggcgtgcccgggcgtcgtctcgtgcgcggacatcgtcgccttcgccgcccgcgacgcctcctccttcc

SEQ ID NO: 22550 - DNA, 1711 bp, Zea mays
  Clone ID: LIB3587-273-H6_FLI
ctctggcagcactgttggtgaatttgatgggcactcaaagagggttctgagctgtgacttcaaaccaacacgtccatttcgcattgtgacatgtggtgaagattttctggctaacttctatgaaggaccaccattcaaatttaagcattccataagggatcactcaaattttgttaactgtatccggtatgctcctgatggtagtaagtttatcactgtgagttctgataagaagggtttgatatatgatggcaaaactggagaaaaaataggagaactttccactgaaggcaatcatacagggagcatatatgctgttagctggagtcctgacagtaaacaggttctaacagtttctgctgataaatctgcaaaagtatgggatatcatggaagatgcaagtgggaaattgaatcgaactttgtcttgccctggtataggaggtgtggatgatatgcttgttggttgtctctggcagaatgaccacctcgtgacagtctctcttggtgggacatttaatgtgttctctgcaagcaacccagaccaagaaccagttacatttgcaggacatttgaagactgttagttctttggtcttctttcctcaaagtagcccaagaactatactatctactagctatgatggtgtcatcatgaggtggatacagggtgttggatttggtggcagattggtgcgcagaaacaacactcaaataaaatgttttgctgcagtagaagaagagcttgttacctcaggttatgataataaggtcttcagaattcctcttaatggaaaccagtgtggagatgctgagtcagttgatataggcggtcagccaaatgctttgaaccttgcaattcagaaacctgaatttgcactgatcactactgattccgggattgtgttgctgcacaattcaaaagtcatttctacaacaaaagttaactatgccatcacgtcatcttcagtgtctcctgatggcacagaagctgttgtgggtgctcaagatgggaaactgcgaatctattccatcagtggcgatacactcacagaagaagctctgcttgagaagcaccggggtgctatcacttccatacattattcgccagatgtttctatgtttgcttctgctgataccaacagggaagctgttgtgtgggatcgagcaagtagagaggtcaagctgaagaacatgttgtaccacacagccaggataaactccctggcttggtcacctgacagtcgattggttgccactggctcactggacacctgtgcaattgtctacgagatagacaagccggtagccagtcgcgtcaccatcaagggagcccatcttggtggggttcatgggttaaccttcctcgacaatgatattctggtgactgccggtgaagatgcttgcattcgtgtttggaaggtggtgcagcaataggccgctcttcattctggtgtgcaatgagaatgtctgtgctgttgattggaataaacttttttttgttggtttggtggctgttactcacggggtcatagcatggtttgttgctttatctgcgatttgtgctctaaatttcctttacaattctttttgagctgtattatttttgcttgttttttttcaggaagactcctttgtaagtggatccggtatccctgcatctgattttgttaggagttgtgagaatatagggatactgttgttgctttttct

SEQ ID NO: 22551 - DNA, 754 bp, Zea mays
  Clone ID: LIB3587-273-H7_FLI
ggcgtgctgggccgcgctcttcgagcaggtccgcgccgtgctgagggaccacccgggcctgcgcctcacccagggccgcaaggtgctggaggtccgccccatgatccgctgggacaagggcaaggcgctggagttcctgctccacgccctcggcttcgccgccgacgccgaccgcgacgacgtcttccccatctacgtcggcgacgaccgcaccgacgaggacgccttcagggtgctgcgcgcgcgcgggcacggcgccgggatcctcgtgtccaggttccccaaggacaccagcgcgtccttcacgctacgcgaccccgccgaggtcaaggagttcctgcgcaagctcgtcggcgccaacgacgacagctgatgatccggcccgcgattcgtttccctttcccgccgtgaccagctccgatccgcctgtgtcaagccgctaactcaacctcggctacctacctgctgcaccggcagagggcttccttgttgttgcaactgcatctccatcgagcagcttgctttgggacaagaacagacctagctagtagtacagtagagcccttttgtatcttcgttttttttttggtttccatctctcttgttcatcatgcatgcctgctgttgtttaccatttgcctcggctgaaaaggcttgtattttcggcgcccttcccgcgaggcactgtaactagttgctttgtctgctgtacgtacgcgtaccatgttgaaataatatgtcatgttgaggagct

SEQ ID NO: 22552 - DNA, 1126 bp, Zea mays
  Clone ID: LIB3587-274-D3_FLI
gaagggagaaggatcttccggatacaggccgagcaaatcaagatcgccaacgagatgacaaacctatacatcccgggttacacctacctaccaaccaagccgaacagaaggatcaaggcaaacgcacgcgaggtcgaagcgctgctgagaggcatcatcaccaagcgggagaccgccatgaagaacggccatgccgacgacagcgacctgctcggcaagctaatgcagtccaacgttgaagaggcccatggaggcggaggaagctccaagccgatgatgaccatggaagacatcatcggcgagctcaagctgttctacttcgccgggatggagacgacctcggcgctgctcgcgtggacactgatcgtgctcagcatgcaccccgagtggcaagaccgcgcgagggaggaggtcctggaggtgttcgggaagaacgagcccaacatcaatggcacaaatagtttaaaagtggtgaccatggttctatacgaggtccttaggctgtacccaccgatcatagatcttgagcggcaaacgtggaaggaaatggagctgggaggggtcaggtacccacccggagtgacacttctgctgccgatactggccattcaccatgacccggacctgtggggagaagacgtggaccagttcaggccggagaggtttgccgacggcatatccaaggcgtccagagacacgccggcgttcttccccttcggctgggggccgcggatctgcgtcggccagaacttcgcgctgctggaggccaaggtagcgctggccatgctgctgcaacgcttctcgtttgggctctcgccgtcctacacgcacgcgccgttctccgtctccaccgtgcagccggaacacggggcgcagatcgtggtcaagaaaatttaatcattttattgtatgtacttattacatatagtatggtcatcctgtcgtgtatgcatggatttatgtcgcttctctctatagataaataaatggtgtgtctgaaaattaaattatatgctagttttacttttacgtgtgcacaaacttagtagatgtattgtcgtgctgtactactgtacaacagcacggaatattgtgatgacatatagcatttgatttggctgaggtg

SEQ ID NO: 22553 - DNA, 1018 bp, Zea mays
  Clone ID: LIB3587-275-A8_FLI
gtctttcggtactcgcgcgcgccagctcacttctctacttcccttccccagatctacctccattcttccctcaaaatcacagatctctctcggccccgtgcccagcgctccgaaaccctagcgccgccgcgggtgccaggccgcgagcgtcgccatgggcatcgtgtttacgcggctcttctcgtcggtcttcggtaaccgcgaggctcgcatcctcgtcctcggcctggacaatgctggcaagaccaccatactctatagactgcaaatgggagaggtcgtctccacgatcccgacaattggattcaacgttgagacggtgcagtacaacaacatcaagttccaagtatgggatcttggtggtcaaacaagcatcaggccatactggcggtgctactttccaaacacccaggctatcatatatgttgttgattcaagcgatacagataggcttgtaacagcaaaagaagaattccatgccatccttgaggaggatgaacttaaaggtgcagttgtccttgtgtatgcaaataagcaggatcttccaggtgcactcgatgatgctgccattacagagtcattagaactacacaaaattaagagccgccaatgggcgattttcaaaacatctgcaataaagggagaggggctcttcgaaggtttggactggctcagtaacacgctcaaatctggaagcagctaaggagcctccgcctcgtcatgaatcatttgctggatggtaaagaatagccgatgcttgcaagtcagcgcgcaaatcccattctctttgttttaactccagaagttctacaccgccatcaattatctgtaaagtgcgtgttaaattttttggatactacattagatgtacccccaggttgagatcaagaataggtctgtggaaaatgacgagcaaactgtgctactgtctttacccgtaaatctcatggatcatgacaagtttttttttgtaccccaatatgattaaacttactccacatttctatgttttcgtatc

SEQ ID NO: 22554 - DNA, 1236 bp, Zea mays
  Clone ID: LIB3587-276-A2_FLI
gcagcctgctagctgagaggatcggatcgcatggaacttgccgggacatggaggaaggtgatgccttacatggccatggtgtttcttcagttcggcttcgccggaatgttcctcatctccgtcgcgtccctgcggcagggaatgagccactatgtccttgttgtctaccggaacgtagtggcagccattgtcatggctccattcgcgctatggtttgagaggaaaacaaggcctaaaatgagcctaccggtgttcatcaagatccttgctttgggattactcgaacccgtgcttgaccaaaacttcatctacatgggagtgaatagcacatcagcaagcttctcctctgcgttaaccaacatattgccagctctaacttttgtaaatgccatcatactcaggatggagaggatagtgattaaggagcgacgaagccaggctaagattgcaggcacagccataacagtctgtggtgccttgcttatgatacttttcaagggccccatcatcaacttcccatggagcaagcacgccagccacgccgtatctgacagcggcgtccacaacagcggacactggctcatgggcacgttcatgatcctgttaagctgcttctgctggtctgccttcttcatactccagtcatatacgttgaggagttacccatctgagctctctttaaccactctgatatgcgcaatgggcgccacggagagtggcgcggtcgccctagtcatggagcgtgacaccaaggcttggtccatcgggtttgacatgagactcttcacggccatatactcgggaataatgtgctctggagtagcttactacgtgcaagggatagtgattaaggacaggggcccagtgttcgtgactgcgtttagcccgctctgcatgattttagtgactgtgctaggctccttcattctttctgaggtcgtcactttaggaaggctcattggtgcgacagtcattgttgttggactctatgcgctcatctggggcaagaacaaggaccatgtgaagtcgcaaaacagttttgacaagcacgacacatttgagctgccgttctctacttctgccgttaacaatacaaccggtcccgtcctggcaacatctatttaaggctcgtgtccatgtgacttcctgtatcccgcacccatcgatttaaggctagctagcggcctagcatgtaatcgccaaatttccattaaaaaagaattctaggatttgcat

SEQ ID NO: 22555 - DNA, 555 bp, Zea mays
  Clone ID: LIB3587-276-E1_FLI
gtttcactcccactgccgtctcggcaacctcccctgttccacgcttcgtcctcgcgttcccaaccaagctctcccgcctgccatggccgcgacctcccccttcgactgcgtcctcctaggtgagcgtcgaccgccagctcgcatgcagtttagtcgccgctgtcgatggttttacaatatgtaactcgtgcggtttttttttattttattttgcccgtggcccgccggcgcagacctcgacgacaccctgtacccgggcgacacgggcatcggcgcggccctgaggcgcaacatcgacgagttcctccaggccaagctcggcgtgtcggccgacgaggccgccgccacgcgcgccgagctcttccgcgcgcacggcagctccctcgccgggctcatcgtacgtgacgacgttcccgacaaatactaataagcttctccgaccgtgtgtgttccggattctgacgactggtacaacgacgtgccgtgttcttgtttcggttcccgcaggcgctcggctacgacgtgcacccggacgagtaccacaggtcagcacgc

SEQ ID NO: 22556 - DNA, 742 bp, Zea mays
  Clone ID: LIB3587-277-B2_FLI
catggatgtggacatgatgcacatgttgctatgctgttgggatctgctaagattcttcaggagcatcgtgatgagttgaagggtacagtagttcttgtcttccaaccagctgaggaaggtggcggtggggccaagaaaatgatagaagacagagctgtggaaaacatagatgccatttttgggcttcatatagctgactctgtgcctattggtgtgctggcatccaggccagggcctattatggctgggagtggattctttgaggccgcagcccgaggcaagatggttctccagaacgacattgatctgctcaacccgccggcagaactcgagaagctcaagcacaagaaaaagagactcgtccagtcgcccaactccttcttcatggatgttaagtgccaggggtgcttcagcataaccactgttttcagccactcccagactgttgttgtgtgccctggctgccaaactgtcctctgccaacccacaggaggaaaggcaaggctcactgagggctgctctttccgcaggaagggagactagagcggatgtggtcttcaagttttgctctatgccagatactagcgtcatgaactgcctttagctaagattttccataagttgttctcgagcagctatgtgttgcatgttggctacttccaaacttatatctggtttggtttggattgtgatgaactaatggctctttgaatttatattatgatgttgacgatatttggtg

SEQ ID NO: 22557 - DNA, 828 bp, Zea mays
  Clone ID: LIB3587-277-C12_FLI
caggatcaacaccctttgcaccaatgtgaagcaaagtggtggacaataccacgtcctgttgataattgcagatgggaagttgcaggacgccatggcagccttgccccgctcccccaacagcgcccgcctgcccctttccttgcgcgacgcgagatggatcggcgaatccatggcagcttggtggagcacggcgtcctttttgaaaatggtttggtcatacacaaacttgtggggtgaaatttcggcttcggcctccttctgcgaggtggatttggatagcgcggcgcagaaaaatggcggcttcagctctccacctctgccgcctccccaagccatggcgggtgtgaagcttcagcagaggcagttgcgcccgatgagccatgcagggtggtctatctcaaagatttttgaaagttgtttcttattatggtctcacgactctgccatataaactggatgctctggaaccttacatgagaaagagaacagttgaacttcactggggtaagcaccatcaagattacgtggatggcttgaataagtagctggctaccagccctctgtatgtatatacactctggacgatctgataaaagaagcccacaacaatggtctcgaatcatcactttttctgggaatcgatgcaaccagaaggtggtggcttacctgagggaggtgtgctatagcagattgaaaaggattttggcttgtttactaattttagggaagagtttattcgttcagccttacaactattggggtatggttgggtttggcttgcttgtaagtttctttctattttctttgaagtacagacaccaccggttc

SEQ ID NO: 22558 - DNA, 1644 bp, Zea mays
  Clone ID: LIB3587-277-E2_FLI
gccagcctccgtccgaccgtcctcgacctcccgtcccgccgcctcccacagtcgcaaccctagtcccacccgccgtcctcccgccctcccgcttcccattttcagtcgccgagccgcgtacagcgcacgcactgcacgcgcatcggcacttccagcgacgcgtcgtgagctcctcccttcgacccttcctgtggcgcgtcgtaagctctgtgcaggcgacggcggcgcgctaccagtgacggggggatacggcggcatcgtccccctcggcccctcctccatcccggtgcggcggcgccagcctacagggcaggagtaccaccaagcgagcgcgatggtgagctccgcactgaggcgctgtctcccctgccatgcctctctctgtcatgccttccctccccatccgctgctggccgctgccggcgtcttccgtcgttcattccagtccggggatggtgagactatggacgaattcgaagaacggttgtttgggggcaaggacacagacaaaggatcactctacgagaagctcgatagggctgagaacactggtaggagatacaatatgggctctgggatgggtggtttgactgggttaagtgacaagagcagatctgggttgtccaagggtggtttcacttggttaagtgacagtagcagctctggtttccctgggtttcctgcatctggcgacaggagcaattcaggatggatggatggttatgattcttttaatgatggcttaaatgatacgattgctaatgcggcacgcaacatccaaatggaggaggacgaggacgtcgacggtgactgggaagatgactttgagttcaggcctgatgtgcggtttaggcaaggttcaacgtattctgttcgggaccttgaccttagaaaacctgcagccgcaaagaaccctcctagacgacagtttgaaacaactacagcggaggtactgaagaaggctgattttaggaatgttagattcctctccaactttcttacggaagctggaattatcatcaagagaagccagacccgtataagtgcaaaagctcagcgtaagattgcaagagagatcaaaaccgcacgtgcgtttgggttaatgccttttacaacaatgggtagaagaccattcatttttggcagaagtgcggaggagcattattgggatgatggatatttcggctatgtgaagcagaaggatggtgagcctgttgagaatgaggatgctgagccaaatgtggaggctgtgtaaacattctgaagcatccttttgcaagcgctccgttcagtttcttctggtgccttcatgacacaagtcacacaatgcttgttttgcgtcttcagatcatagcgtagctcagcttgaataaaactgtaacatcacgcaagttttgtgaaactcgtgccttgctcaattgtgccactttagcagacatccccagctcacctcatcctggctggagatcatatgcagatatgaaatggaacgtgggatcagagttttagttgacgctcaaaattttgagatagcagcactgatttcagtttctgttggataatgattgtttggctgttcaacgagaaaaatattgtatgcacgtacaaaacgttagattttttaacaacgaaaatattttcttc

SEQ ID NO: 22559 - DNA, 854 bp, Zea mays
  Clone ID: LIB3587-277-E4_FLI
agaagcacaagttcttagctttagatctgcacaaaacatatggattttcgatagcctagctgcatgccactttgacacctaggcgaaagccaccaacaaaatgcaccaaaagaaccccaaaaaaaaaagttcgcagaagactagaaatgaagccatcgaccgatcgacagaaccagaacaacgcagcgaggagcggcggcctgcctgcatctgcatgcatggcagatgcggcaactgggatgtcccgatcagaagaggacccacttggccgcggcggccctctcctcgagcgtcttgctgccaggcgcggccagcgagcaccctcgatccttcttccctcctcctgcccgcgccgcgcgcagcagcttggcccagaagctcgtggccgccgtcctcctccgctccctcctcgccagcaggaacgccgccacggcgtcggcgtccccgacgacccgctcgtgccgcatcagcaacgacacccgcgccgcgcgcctcacctcgtcgtggaacctcggctcaccgggcgccgggctggcgcactccgacgccgacgccacgctggagccctccgaggagtaggccgtggacacctcggagcatgaggacgatgcctcctcctcgtggtatctgctgtgcctgtatccctcctcctcgccgcagccgcgcacgacggacggcggcagcgacaggtgggacaggcgctcccgcaggcagcacgcgcagacgcccgccccctgctgccggtgccgccggcaccgcgcgccctccgccttgcccatcaccatgcggaaaccgaaccgcaactagctcgccgacgacgggaccagaaacgctaccgccacttctcgtgtaac

SEQ ID NO: 22560 - DNA, 1167 bp, Zea mays
  Clone ID: LIB3587-277-F12_FLI
tatatatataaactgatacacatgattttgctctgtattccccaccagataaatgttgcttctggtccaagctgcaggccgctgaagcagaagataccgtgaggtagcatagagagagagaaagaggaagggaagccggtgtcggtcgccaggcatgtcgccgccgctcctgtcgaggctgcggctggtgacggtggacgtgacgggcaccctgatcgcgtacaggggccagctgggcgactactactgcatggcggcgaattaagcacgccaagatgccgtgcccggactacggccgcgtgcacgagggcttcaagctcgcctaccccgacatgggcaggatgcacccgtgcttcggccacgccgccgccatgcccgccgccgcgtggtggaggatgtgcgtcagggactccttcgaattcgtcagggccggctacgactacgacgacgagacgttcgacaggatattccggcggatctactccacgttcggctccgccgcgccgtacgcggtgttcccgtacgtacgcgcggcgcttcctccggtggctgcgcgcgggaggagggcctcgtcgtcggcatcgtcagcaacgccgagcaccggtacagggagggacgtcgtcctgccggcgctggggctcaaccaggggtcggagtgggacttcggggtgttctcgggcgtcgtcggcgtggagaagccggacccgaggatctacgaggcggcgctgcggcaggcggccggcgggggcgggggcgtggcgcccggggaggcgctccacatcggcgacagcatgcgcaaggactacgcacgccccggcgcggagcgctggcggcggtccggcgcgcccgtgctcccggacctcgttgccgcgcaggagtggctcgccgggggggcacggtcacagggaggaattgaagggcagctagcacctggacgtccggtcttgctcgctcgatcgagcaagtgcctgggacaacagacacgcatcggcgccattattcctgctctcggaataacagaatgccccgatatagatgtcgtcgtgtaatcgagatgaaccaaacaactctagctcctagagatccggagtttctggagcgggcaagagcaatgcagcatggggtgtcatcgtgcctcatcaaccagattttcagaacagctggacc

SEQ ID NO: 22561 - DNA, 1003 bp, Zea mays
  Clone ID: LIB3587-277-F2_FLI
gaagcccaccgaattccctgcgattcctctcccctcgcctcctcgtctccccctaggggatcgtcggagaggaatcgcaaagagggccgtctcatccgagttaaggaagccatggagcacaaggaggctgggtgccaggcccccgagggacccatcctctgcatcaataactgtggcttcttcggcagcgcggcgaccatgaacatgtgctccaagtgccacaaggagatgataacgaagcaggatcaggccaagctggctgcctcctctatcgacagcatcgtgaacggcagcgacgccgtcatggagccggttgttgctggcagcaacacggtagtagctgttgcccaagttgagttgcaaacaatgaacgtgcagcagcccgctgatgttgccggacccagcgagggggtggcggcgatctccaaaggggggaaggtagggccgaaccggtgcagcgcctgcaggaagagggttggacttacgggattcaactgccggtgtgggaacttgtactgcgcactccaccgctactccgacaagcacgactgcaagttcgactaccggactgctgccagggacgccattgccaaggctaatccggtggtgaaggcagacaagctcgacaagatctagggggggttccttacggttgggtatcaggaagattgtaaaccgcggtaactcgtcatgcggaactgctgccttgccccccgcgcctttctcttccatgtttgctgctacaatcttgttgttgggcattgcagtgcacggtgcacacttgtgtagcccgcctcgagaattcctgcctctgcatctggtcagttctaaaatgatttgcatgttggctatgttgtgtaagctctatttatggtggtctcgctgagacgggtatttggcttcgcagttatctagctatgtgatgtactgttgtcttgtccctgggtattatatggtacactgcagccagtaatagtaatctgcaactgtgcgttaaatggtc

SEQ ID NO: 22562 - DNA, 1282 bp, Zea mays
  Clone ID: LIB3587-278-C11_FLI
gctgtcagagtctgacatcgcttgggcgtctggacggtcaacgttaaccccacgcacgcttcttctcccccagttcaagtgccacaccggccgctcgtcgccttcccatctcgccgcgccatggatttctgcagccacctccgtctcgcggctgtgctcgcgctcctcaccggatgcgcttctgcggcgagccggggcgctggttccttcgacccatcccgcgtggttcaactctcttggcgccccagggcgttcttgcacaagggtttcctgttggatgcggagtgcgaccacctcatcgcgctggccaaggacaagctggagaagtctatggtggcggacaacaagtccggtaagagtgtccagagtgaggtgcgcaccagttccggcatgttcctcgagaagaagcaggatgaagtagtaacgaggatagaggagaggatatctgcttggacatttcttccaccagagaatggtgaagccattcagatattacactaccagaatggtgagaaatatgaaccccactacgactacttccatgacaaaaataatcaggccctgggcggccatcgcattgccactgtgctgatgtacctatcaaatgtcgagaagggtggagagaccatcttccccaatgcagaggggaagctattgcaacccaaggacgacacttggtctgattgtgcaagaaacggatatgcagttaaaccggtaaagggtgatgccctgctgttcttcagtctccaccctgattcaacaacagactctgacagcttgcacggtagctgccccgtcatcgaaggccagaagtggtccgcgactaaatggatccatgtgaggtcatttgacctcaccgtcaagcagccgggtccctctgatggatgtgaggacgacaatgtcctctgcccccagtgggcggccgtgggcgagtgcgccaagaaccctaactacatggtggggaccaaggaagcacctggcttctgccggaagagctgcaaagtatgcgcagagtaaggtatcggtcctctgcgtctgatgagtaatcgtggcgtacgtgttacgtagttgctgtcaccattttaccagggtttagatacgaccgagtacagcgtgtataagacagtacaacccggaagaatgaatcgtaaaagttaggggacgggttaccgagttaaagctgagcaatctaatcaatggcaacagttcgagcaaatcttgtttccttcatttgtcatggtaaacttgtcctgttggaaatgaaaagcttgttggcgagggc

SEQ ID NO: 22563 - DNA, 1985 bp, Zea mays
  Clone ID: LIB3587-278-F1_FLI
ttgtctggtcctggagcaattccttctctgaaaatgggagaatattgatcatggtattaacaaatgggagaaggtagtgcacctgttctagtattatacctgtccagattttgtaggcctcactaccaaaatttgttagctatttaacttttattattgctggaatatgacaactctgaatcatgctatgtgcactttatttgctgagatatatatattttttatttttactagtatgtgctagagaagaaccataagtaatatttttgttgtaattatttagtattcagcagttcagcatgaactgttgattccacatatagttggcttaacaatgattaatgaaagtggttcttagtttgttctggtagggtacagctataatttagctggactattctctgggtgacaactgattttagtccatcagatatgagcaagcacccaattttttattgttacatgtggaaagaaaatctcccttgaccctgttcttgaaattttacagtcatgacaatagtttctaagcactctgcttgagttttcagttgatttagagttcttttttccactgttgaggattaagtataatgccccctggcattggaactagttttgatctcatgaactagtgaacttattttggtgggatatctgagatgcttttctaaatttaatttttgccaggctttaatatctgaatgaatatgaactagttttttttattcaggtatttggctcggaaacatcttgtagatgtcactgaaatttttagacaattaagtgacgagaagaagtacaggatgatcaagcttgccttctacttctgcctatttattataactatttacaggtttgacttaggttatatcttaattaatatttgagggaatcggaatacaatatgcattcatttgctagtgctaaatgatatcagttattaaaaaacatctaggacattatgaaaccatgataaatggccatgtctccataccgttccttccatgttgtaagaacagaaatttctttatattaatgtttttattctgtaagtcaacttagttttctcattggaaaatattctgaagtctacacacttgttggtggtttgaagagagtactgaagggttagtgagaatatgacttgggaaatcaaatatggtgttgtcttcactctgtcttcaagcatacaaacaaccatgagcaatattattcagtattataggcgtggccttagatatacctaccttactgattttggtagtggcagattaattgtttgcatatgctgttacttattttggaatttgttctagcaagtagttccctgccagctaagaacaatatgttgcataatctaactgctcgcattttctattgaatttaacaggcttgtaatgacagctgtgatgttgtttattgatgaggacataaatttggcagaaactaggagtatctagacttcgccaccaacttgtcatggggatggagcaggtactcagccacgttttgttactggcaaatgcatatgaaaatgtttatggtataatgggttgaagttgtcgtgttgcagagttgtagcttgaaccagggagaccacaactcaatgccttgacttagttgtgagaaacaagatcagtttgtgccctgtagctggaggagctaacctggtactccttttaccctaaatcgtaagttgttttagttttttctagatgcatagcttttacgatgtatcctccagatgcatagtaaaagttatatatttagaaaaaacagaacaacttataatttggaatggagtattcatttcatccatcagattgtgatgtacaatgaattcccatagtttggtccatcggtaccatgtttgtaaattgggcagtcaatgatgtgcatcactgcaggatgaacgcacgtttggtaattgttgtgcaattctttgtacttgtggacaagtgctgtattctacacattgtttgcat

SEQ ID NO: 22564 - DNA, 1309 bp, Zea mays
  Clone ID: LIB3587-278-F9_FLI
ggtagatataagttttcttattatggtatactcattgagattcaggcatttgcactgattccaacgatgcaaacattagttacatttcttctccgtgcgttgttgccattatatttgacttctctccctcaattctgtaagtggttagtggtgtatgcttaattggcatgattttttccatgtagttttacgggggatatgcttaccatggcaactcgtttgagcaaacataccgttgttatccagcatcgttttttgataagccacacctggaaggcggtgataaagtaataatgccaccttctgcccttgatcgtcttgcttccttgcacatcgagtaccctatgctatttgagctgcacaatgatgcaacccaacggatttcacactgtggtgttttggagtttgttgcagaagaaggcatgatcatcatgccctattggatgatgcaaaacatgctgcttcaagagggtgacactgtccatgtcaaaaatgcgactcttcccaagggcacatatgtgaaattgcaacctcacacaactgattttctggatatttcaaacccgaaagccatcttggaaaagactttaagaaatttctcctgcttaaccacgggagacagcatcatggtagcctacaacaacaaacaatattatattgatattgttgaaacaaagcctgcttcagcagttagcattattgagacagactgtgaagtggactttgcacctcctcttgattataaagaacctgagaaactacgacaaccaacagttcttgcaagcaaggcacctgctgaagatggcaacactgcagcagaggatgaaccaaaattcaaaccatttactggttttggaaagcggttggatggaaaagcctcaaaactgcaagcatcagaggttccttccactgcactttctgcaccttcagattcaaacaaaagagcaaatcagcaaatctcagcaccggcagcttcaggagctagcagttacagtcgacagaaaactggaaaacttgtttttggttcaagtgcaagcaacaataaggaaccacaaaaggctcctgctaaagaggagcaacccgcaaagaaggacgacgagccgaggttccaagcgttcagcgggaagagctattcattgaaacgttagctgcttcagttaaccttgaaattcgccgctactctttcgtttgttgcatggtgggtgttctggcacctggtcaccaccatgtagatatgaattgaagtatgtatatgcttatcttgatggaaacatgacagtctgtttatttaagcccaaaagtttaaaac

SEQ ID NO: 22565 - DNA, 1095 bp, Zea mays
  Clone ID: LIB3587-279-A1_FLI
tggtccgttccattgggattgggtgggtctggggacctaggcagaccagatggccgggctattcaccgagcaggctgctgtgtacgccgcagcacggccggcgtacccgaaggatctgtttgccaagctctcggcgctcactgctcaccaccgccgcgcttgggacgtcggtactggcaatggccaggcagccatcggtgtcgcggagcactacgacagcgtggtggccacggacgtgtccgcggaacagctgcggcacgccacgccacaccccaaggtccggtacctgcacacccgcgacgccacgccgggggaggaggacctcgtcgccatgctgggcggcggcgaggccagcgtggacctcatcacggtggcacaggccgtgcactggttcgacctcccggcgttctacggcgccgcgcgccgcgtcctgcggaggcccggcggggtgatcgcggtctggggctacaactaccgcgtgagccccgtggaggacatgatggcgcgtttcttcagcaccacgctgccctactgggacccccgagctcggtattgcactgacggataccgggacctgccgttccccttcgaggacatcgggctcgggaaggaaggagagccggcgagcctcgacgtggagcacgagatgtcgttcgagggcctgattggcatgctgaggtcctggtcggcggtgacgacggcgaagcagcagggcgtggacctgctgggggcccgcgtcgtgaaagagctggaggaagggtggggtggggcggagctggtgcggaaggtcacatacaaggccttcctcctggcaggcaccccggggcccatggctgatgagtaatcaatgaggacctgtttggaaatatagttttctcgttctacagtatttcaatactatagtatgtcgtatgttataacataaaactgtagttttagcaaaactaaagtaaaatcaaagtagttcttcatacatagcactgtttggtagcatatagtttttggcttatataaataaggaagataagtttaaattcaaatagctacaacttatgatgggctgcatcatcggtaagacaagtttaaattcaaaac

SEQ ID NO: 22566 - DNA, 1565 bp, Zea mays
  Clone ID: LIB3587-279-E12_FLI
cgtcgcgctgccctccgccttcctctacctcacctcctccgcggccacccgcgccaccctcctcgacctcaagcccttctccgccaggtgcgcgcccgcagtcgcgccgctccgcgtcttcatgtacgacctgcctgcgcgcttccacgtcgccatgatgggggccgccgccggcgcggggttccccgcgtggccgccgtccgcgggcgggatcaggcgccagcacagcgtggagtactggatgatggcgtcgctccaggatgggggcgcgggaccggagcggggaagggaggccgtcagggtgcgggatcctgacgccgccgacgccttcttcgtgcccttcttctcctcgctcagcttcaacgtgcacggtcgcaacatgaccgaccctgacaccgaggccgaccgcctcctgcaggttgaacttgtggatattctctggaagtctaaatattggcaacgttctgcgggccgtgaccatgtcattcctatgcatcaccctaatgctttcagattcctgcgagcaatggtgaatgcatctattcttatagtttcagactttgggagatacacaaaggaactggcttccctgaggaaagatgttgtggcaccatatgtgcatgttgtgggttccttccttgatgacgatccacctgatccatttgaggctcgccatacactgcttttctttcgaggccgtactgtcaggaaagatgaagggaaaatccggtcaaaacttgagaagatattaaaaggcaaggaaggggtgcgctttgaggatagcattgccacgggcgacggcattaacatatctacagaaggtatgcggtcatcaaagttttgtctccaccctgctggggacactccttcctcatgccgcctgtttgatgccatagtcagtcattgtgttcctgtgatagtcagcagtcgaatcgagctcccttttgaagatgagattgattacagtgagttctcccttttcttctccgttgaagaggctctaagacctgattacttgctgaacgagctcagacaggtccccaaaaggaagtgggttgatatgtggttgaagcttaagaatgtctcccatcattatgaattccagtatccccccaggaagggcgacgcggtgaacatgatatggaggcaggtgaggcacaagatccccgcagttaaccttgctattcacaggaacagaagactgaaaattccagactggtggggataatgattggtggtgaatcgtgtacatattaccatatccactgttagtcctggttattttcggtgcgttatgatggaaacattgctcaccgtcctttgtgaaccaaagtgttcatcttaagatccaaggaccgagtccacaactatttgctgacaggaactgagattatcacctcttttttggtcgatttttgtgacggcttcctatttccccccctgatgctacaaaatagaggggacaaataaacttacagtaacattatagaggagtcatgcctgacaaataggatctgtagcttctttgtgctcccacactggaagtttaaatatataattcatat

SEQ ID NO: 22567 - DNA, 978 bp, Zea mays
  Clone ID: LIB3587-280-A2_FLI
ggttttttgattttagccgccgccgctgctcatctcacatccctcgagaagacgcctgctcctcgccgatcgatacgatggccgtcttctccgacctccacaccgccgacggcctcaagtccctcgaggctcacctcgccggcaaaacctatgtgtctggtgactccattactaaggatgacattaaggtcttcgccgcggtgccgtcgaagcctggcgctgagtttcctaatgccgcccgctggtacgagaccgtctctgcggctgtagcctcaagattccctggtaaggctgttggtgtaaatctgcctgcgggatcagctcctgcggcagctgctcctgcggatgaggctgaggatgatgatgaccttgatctttttggtgatgaaactgaggaggacaagaaggcagctgatgagcgtgccgccgctgccaaggcctcttctaaaaagaaagaaagtggtaaatcctccgtccttatggatgtcaaaccatgggacgatgagactgatatgaagaagctggaggaggctgtccgcagtgtccagatggagggtctgacttggggagcatcaaagcttgtgcctgttggatacggcatcaagaagatgactatcatgttgacaattgtcgacgatcttgtgtccatcgacactctaattgaggaccaccttacgcaagagcccatcaatgagtacgtccagagttgcgacattgtggctttcaacaagatctagagttcagtttctgagattgggcaacggcagcggctcagctcgtcaagtttgtgctgggatgccagtttatcccttctagtctattacagaaatgttgttcggagctgagtctattataaacatcttggtctgagtttattgttgagtggtgccagtttttttcaatatacatttatcttaaaaacagcggtactgatgtttttttgtctaaagttaatgagtttgcaatggttctgagtct

SEQ ID NO: 22568 - DNA, 1475 bp, Zea mays
  Clone ID: LIB3587-280-G11_FLI
accgcctacgacagtgtagtatatatatacactacacagtgtagctagtatacctcgcccactctaaagcgaagcagcaagcgctctgtgaccgactgtgatcacacaccacgcgtccatggtcgtcatgggcaagcacgatgacgatgagaagcagcagcaccagcagatggagatggaggacgtacatgaagtaggagccgtcgaggtgctgccgctggagaatgaggcggaggcggcgctggtgcgcaagatctccggcctggccgccgccatcgcgaagctgccgtcgctgagcccgtcgccggaggtgaacgcgctgttcacggacctggtcacggcctgcatcccgcgcagcaccgtggacgtggagcgcctgggcccggagctgcagcgcatgcgcgcggggctcatccgccgctgcgccgacgccgaggcccagctggaggcgcactactcggacctgctggcggccttggaggacaacccgctggaccacctgccgctcttcccctacttgggcaactacctgctgctgggcgagctggagcacggcctgctggcgcgccacgtcccgggcccgccgcccgcccgcgtcgccttcgtggggtccggcccgctcccgctcagctccctcgtgctcgccgcgcgccacctccccgccgccgccttcgacaactacgacatctgcgcggaggccaacggccgggcgcgccgcctcgtgcgcgccgacgccgcgctcgccgcgcgcatggcgttccgcacctccgacgtggcccacgtcacgcgggacctggccgcctacgacgtcgtcttcctggcggcgctcgtgggcatggcggccgaggagaaggcgcgcgtggtggaccacctcgggaggcacatggcgcctggcgccgccctggtggtgcgcagcgcgcacggcgcgcgcgccttcctgtaccccgtcgtcgaccccgacgagatccgccgcgccggcttcgacgtgctcgccgtgcaccacccggagggggaggtgatcaactccgtcatcgtcgcgcgtaagcccgtgcccgtccccgtcgccggagtggggcacgcgcacgcgcacgcccacgggcacggcgccgtgctcagccggccctgctgcctctgctgcgagatggaggcccggacgcaccagaagatggaggaggtggccatggagcagctgccgtcctaggcaggcaggcacacggcacacaccacaagcatggatgccagttttacatctatctgatcgatctagtaaatagtaatcccctactacgtctatgtgcccacaccgcatggatatggtaataatccgcacagggtgcgcctaatttatatccgctagctaagggcatgtacagtagagagacaccaaaacggttctccaagcacaggagacaactaagagactttattgtacaatgaagtgtctataaacgtagtctattaataaatacagaatt

SEQ ID NO: 22569 - DNA, 976 bp, Zea mays
  Clone ID: LIB3587-280-H10_FLI
gagcccaccgaattccctgcgattcctctcccctcgcctcctcgtctccccctaggggatcgtcggagaggaatcgcaaagagggccgtctcatccgagttaaggaagccatggagcacaaggaggctgggtgccaggcccccgagggacccatcctctgcatcaataactgtggcttcttcggcagcgcggcgaccatgaacatgtgctccaagtgccacaaggagatgataacgaagcaggatcaggccaagctggctgcctcctctatcgacagcatcgtgaacggcagcgacgccgtcatggagccggttgttgctggcagcaacacggtagtagctgttgcccaagttgagttgcaaacaatgaacgtgcagcagcccgctgatgttgccggacccagcgagggggtggcggcgatctccaaaggggggaaggtagggccgaaccggtgcagcgcctgcaggaagagggttggacttacgggattcaactgccggtgtgggaacttgtactgcgcactccaccgctactccgacaagcacgactgcaagttcgactaccggactgctgccagggacgccattgccaaggctaatccggtggtgaaggcagacaagctcgacaagatctagggggggttccctacggttgggtatcaggaagattgtaaaccgcggtaactcgtcatgcggaactgctgccttgccccccgcgcctttctcttccatgtttgctgctacaatcttgttgttgggcattgcagtgcacggtgcacacttgtgtagcccgcctcgagaattcctgcctctgcatctggtcagttctaaaatgatttgcatgttggctatgttgtgtaagctctatttatggtggtctcgctgagacgggtatttggcttcgcagttatctagctatgtgatgtactgttgtcttgtccctgggtattatatggtacactgcagccagtaatagt

SEQ ID NO: 22570 - DNA, 736 bp, Zea mays
  Clone ID: LIB3587-280-H2_FLI
cgtcagcccctctcgtttttcatccgccttcgcctccaaccgcgtgcgctccacgcctcctccaggaaagcgagagcttctgcataagaacaacaaatcaaaagcgtgatcagctcggtgccaacaaaacctcaacaaccaagtttcatgtctgatctcgacgtccagcttccatctgcctttgatccgtttgctgaggcaaatgctgaggactctggtgctggtcctgaaacgaaggattatgtgcatgtgcgcatccagcagcgcaacggcagaaagagtctgactacagtccagggtctgaagaaggagttcagctataacaagatcctcaaggatctgaagaaggaattctgctgcaatggtactgtagttcaggacccagagctaggccaggtcattcagctccaaggtgaccagcgcaagaatgttgctactttcctagttcaggctgggattgcgaagaaagagaacatcaagattcacgggttctaagggacctgtaaatgcttgtgccctatattgtgtgcctcaacatattggggagcttgaagcatcgacagttgctagtcattgcttacttatataagaacataagtagtatttgctattgtcaagtgtgccttgcttgatgcaagttgtgttttcgtctcattattattatgcacggccatcgtacgtgtatggcttgtatgggttattgccaacttaataaaagcacactctgtttgcctat

SEQ ID NO: 22571 - DNA, 1045 bp, Zea mays
  Clone ID: LIB3587-281-G7_FLI
gactcggagctggtggagcggctgcaggaggtgctgcggtcgtcggacctcaacaccacgaccaccgctgccctgcgccgccgcctcgaggaggactttggcgccgacctctcccacaaaaaggccctcattcgggagcaggtcgacctcttcctcgccgaggtcgccgccaaggccgagccgcaggagcccaaggaggaggaggaggaatgcgaggatgagaatagcagcggcgcccggaagaagcagcggggtaatgatggcaaaaagaggggtggtggctttacaaaattatgcagtctttcaccggcacttcaagagtttgtcggcgcctctgagttagccaggacagaggttgtcaagaagctttgggcatatattcgagaaaataatcttcaagaccaaaacaataggaggaagattttgccggatgagagattgaagaagatcttcaatgtcaattccattgatatgtttcaaatgaataaagctttgaccaagcatatctggccattgaattctgagggtcctgtctctcctgatagatcaacacccaaagagaagccacaaaagagagacaggagtgaaggaaagaagcaaaagggtggctcttcaggagctggatctggttttctcgtgccccttcaactttcggatgatttagtaaaatttatcggcactggtgagagcatgttatcacgatctgatgtcgtgaagaaaatgtgggattacataaaagggaacaacctgcaggatccttctgaccggaggaaaataatctgcgatgagaagctgaaggacctatttggagtggaaacattcaccggctttactgtttcgaagctgcttgcccctcattttaccaagacgaagtagcaacctgccatccacatcttttaaaaccaaaacggcttggtaattttgtttttgcagaatgtgtaatcatggaacagttaggagctatgtgggtggtgtgatttttttttttaccaatgggagtcgatggcacttttcgaacattaccagtaaagtaggctccttcctc

SEQ ID NO: 22572 - DNA, 1954 bp, Zea mays
  Clone ID: LIB3587-283-D9_FLI
gaagaaggatggtatggagaaggaggaactggttgatgtaggtgaagagaatggtcagaaaaggaaaaagaagaagaagatgaaggatgactcagagatggacgaaccagatgatgaaggtgttcacatggatgaagagaatgatggagcagtcctggaatctgaggatggagtgtctaatgtggttgaactgcccaaagaatcaaaagggaagtatgtacctccgagtctgcgtaatgcttccaattcagaatcagaagaaattgcccagatgcgtcgcagagacttctgaacagactttcagagtcaaatgtggagtccattactcaggaaattgccacactttttcgatctgttccacgaagtgatggctcccagataattggggatgaggttttggctagttgttcccgaggacctcgtggcaatgaacagtatgccgctgtctttgcagcctttgttgcaggtatggcatgtttggtcggtgttgacttcagtgccaagatccttgcatctattgctaagtcatttgaggatgagtattcaaaagaagatggtctatctttgagaaaccttaccttactcttctgctatttgtgcatatttggtgttacctcaagcgatcttgtgtatgatcttctgtcgattctgagcaagcgcttgacagagctagatgtctctacagtgttgaccatcctacagtgctgtggaatgaagctgcggggagatgatccatgtgctatgaaagattttgtccttagtattcagaactctgtgaatgatcttaaattgcactctggtgttggagcagacgggaagactgatatacgtagcagaagaatggaatttatgcttgaaaccatatgtgacattaagaacaataagaaaaggcctaaagaggatccttcacaccatactcgaataaaaaagtggcttcaaaagcttaaggcagaagatgtcctcttgcgtgggttaacatggagcaggcttttggaccctgataagaaagggcagtggtggttgtctggggatgttccatctacagtagctaagattgaagatgttgcagctgttataagcaaggatgttgcagagacaaaaaaacttcttcagcttgcagctgctcaacggatgaacactgacatacgaagagcaatcttttgtattataatgagtgctgaagactatgtagatgcttttgaaaagctcttgaggctgggcctttctgggaagcaggaccgagaaattataagggtcattgttgactgttgtctgcatgagaagatgttcaataagtattacacagtccttgcttccaagctatgcaaccatgagaaaaaccacaagttcagcttgcagtactgcatctgggaccattttaaggagctagataatatggagtcaagtagatccatgaaccttgcgaagctagttgcggagatgctgttgaacttcacgctctccctcgcaactttgaaggttgttaacctggccaacccggtggagatgactccggcaagggtctcgcatttccggatgctgtttgagaccttgctacagaaagacgatgcacgcgtgtggaatgtcttcactcgtgtcgctggccttccagagctcgaggtattgagggatggcattgtgatgttcatcaagcagcacgtgatcgccgaggactcagggaaggacttggctagcaaattcaagattgcgaagaaggcgctcgacaatactgccggagttctgatgtaactctgcccttgtcgaacattctgggcatctccaagtaaaacaaagttattagaacattctgctggagtcctctgttctcgttttgccttgttattagaatgcttctccaagagacctttcatgggttttgaatgcttacccaaaaaaaaggctttgatggtcatacattgtaccatttcttagaagtactctctgtttattgttt

SEQ ID NO: 22573 - DNA, 1507 bp, Zea mays
  Clone ID: LIB3587-284-G6_FLI
gcgctagctagctgtcgtcttctccatcaagtagaaccagtagaggaagcaggagaatacaagctactgcccttagaaaaaaaaaaccctacgctagctagcatcctctttccattagccatcctagccttcgccccctcgacgagaagaaccacctcaaaaccgaacagccgcaaaagaaagctgctagctactctatacatgataactagaacaggaccgtgaagtaatatatatataatgacgaagtcaggggcgctacaacttgctcggagcaccggagggtcgcttagcaaggaccaagtcaaatccgccgttgatcagtatgtgaagtaccacgacctccacggaggcgaacaagaatcaagaaagtcaaattacgctgatttggcaaacaagtactatgatcttgtcactggcttctacgaatatggatggggcgactcattccattttgctggcggatatccgggtgaaacttcccgtgaagccattaagcggcaccagcattttatggcactacaattggggctcaagaagggtatgaaggttctggacgtgggatgtggaattgggggacctttaatagaaattgccagattcagctcaacttcaataactggattgaccaacaatgactaccatgtctcaaggggcaaggagcacatcttttcagcaggtttgagtgagcaatgctgctccttgaagggggacttcatgaatatgccaatagctgataacacctttgatgcggcctatgcaatacaggctacatgttacgcaccagaggcacaaggtgtctatagtgaggtctaccgtgtgctgaaacctgggcagtattttgcactggatgaatggtgcctgactgaccgatttgatcccaacaacgctaagcatttgaccgccaaggctgagattgagcttggcgatggcctgcctgacatccgtaccactcgccagtgtgtccaagctatgaaagatgcaggattcgaggtcatttttgcaaaggatcttgctcaagattttccttgcccatggtaccagacgatggatcctaactacttttcatgggctaacttccaatgcacacgcccaggacggataatcacccgtgcaattgtcaatacactagagttcctccgtattgccccagcaggcagcgtgggagcctacaacgtcctaacgagtgcctctgatggccttctaaaaggtggtcgggaaggtatcttcacagcgtccttcttcgtcctgggccgcaagcctctcaaggaaagtgaaatagtgaacggcggcaacctttgagctgcaacatgagtatggggtcgtacttataagagctatgaatcatggccaacgtgttacgtgctgaagtgtgtttaccggtttgtcttatggctcttgcgcgtgtggtgggtcatgttcacgcagtagcatactagcatgtatctgcttgttgtgtgttgtactatgaactatctgaataaaaatgctgtttacgcgttgtatt

SEQ ID NO: 22574 - DNA, 598 bp, Zea mays
  Clone ID: LIB3587-284-H7_FLI
cctgccccgttcctcaccaaacttgtcgcatcgtcgacttgtgagtctcttccgtcggcgtcgacgagagctgcgctaggtgatctcgactgcttcctcgtcccccatggcgacggcgctcaaatcgttcctgaacagccccgtcggccccaagaccacccacttctggggccctgtcgccaactggggcttcgtcatcgcgggtttggttgacatgaacaagcctcctgaaatgatatctggcaatatgacagcagccatgtgtgtgtattctggactctttatgaggtttgcatggatggtacagccccgaaattatttgcttctagcatgccatgcttccaatgaaagcgtccagctctatcagttatctcgctgggctaggtctcaggggtacctggagaagaaagaaccagaggccaaacagtaaagagggtatccaacactgcagtcatttgttcaataaagaaaatatgctgtggaaaacattcattctgttgccaatgcagtttttttgtatgtttgcaaaatatgctgaggaaatttcatgatacctagcgcagttacaagcgtctgcttacttttatgtgcatttgtc

SEQ ID NO: 22575 - DNA, 417 bp, Zea mays
  Clone ID: LIB3587-285-A7_FLI
cgccgcgtacagtggagggagcggagctcgaagggcgaaggcgcaggggggctcgcgagtcgctatccagcccacgccgtcacgcactcacgcagacaaatcttgtagcattttagaaattgaaaaaagaggaacacgaagaccttcgttgggccagccacgggagctgctgtgcttgatcttggacgaaacaagtgaatggtcttcagcgggtttcagacacttgcagtcgcttcctattcttctacgattaccttctattaccggcttatgttgtgttgcaaaatgcgttctgtagtatcgctttagtggtcctttgggaaccctcctattcggtaactctaattaccgacagggggtttgtactttgttcactctactccctcttaatgaaaaacgtgcaatgacacggtcacg

SEQ ID NO: 22576 - DNA, 1584 bp, Zea mays
  Clone ID: LIB3587-285-C12_FLI
cgccgtctgccttctgcgcctccatttcggcctctgtcccttgcaagttcaatctcacctccaaccatgggtaaagagaagtcccacattaacattgtggttattggccatgtcgactctggcaagtcgaccaccacaggacaccttatctacaagcttggaggcattgacaagcgtgtgatcgagaggtttgagaaggaggctgctgaaatgaacaagcggtccttcaagtacgcgtgggtgctcgacaagctcaaggctgagcgtgagagaggtatcaccattgatattgctctgtggaagtttgagaccaccaagtactactgcacggtcattgatgcccctggacaccgtgacttcatcaagaacatgatcactggtacctcccaggctgactgtgctgtccttatcattgactccaccactggtggttttgaggctggtatctccaaggatggccagacccgtgaacatgctctccttgcgttcacccttggagtgaagcagatgatttgctgctgcaacaagatggatgcaaccactcccaaatactccaaggcacgttatgaagagattgtgaaggaagtctcatcctacctcaagaaagttgggtacaaccctgataagattgcctttgttcccatttctggttttgagggcgacaacatgattgagaggtccaccaaccttgactggtacaaaggcccaaccctgcttgaggctcttgaccagatcaccgagcccaagaggccttcagacaagcccctgcgtctgcccctccaggatgtgtacaagattggtggtattggaactgtaccggttggtcgtgtggagactggtgtcatcaagcctggtatggttgtcacctttggtccaactggcctgactaccgaggtgaagtctgttgagatgcaccacgaggcgcttcaggaggctcttcctggtgacaatgttggcttcaacgtgaagaacgttgctgtcaaggatctcaagcgtgggtttgtggcctccaactccaaggatgaccctgccaaggaggctgccagcttcacctcccaggtcatcatcatgaaccaccctgggcagattggcaacggctatgccccagtgctggactgccacacctcccacattgctgtcaagtttgctgagctcattaccaagatcgacaggcggtctggcaaggagcttgagaaggagccaaagttcctgaagaacggtgatgctggtatggtgaagatgataccgaccaagcccatggtggtggagacattctcagcgtatcctccccttggtaggtttgctgtccgtgacatgagacagacggttgctgttggagttatcaagagtgtggagaagaaggacccgaccggcgccaaggtgaccaaggcggctgccaagaagaaatgatgcgatcctgcgcctgctttagcaatacctagttttcatcatcacaagttttgtttgtgatcgttgctgttatcgtgtgaactgttgagatctgttagcatgtgcacttttatctatttatttggtaccatcttgctatttcaccttttgcaatacaagaatgctctaagacct

SEQ ID NO: 22577 - DNA, 1438 bp, Zea mays
  Clone ID: LIB3587-285-C3_FLI
ggataatgtatttcctgagagacccgatgaaccagaatgccaatattacatgaagacaggagattgtaaatttggtgcagtgtgcaagtttcatcatccccgtgtgagatcacagccccctccggattgtgtcttaagtccaatgggccttccaatacgtccagtatgttgttaaacccttcactctttctgttttattttgttttagaactacactgtttctgttgtattgatcctttgacattttatccattatatatgaatatgtcgattgttgtactatttggttgttcttatctaaaagaaatttgacctggcctttggcgtgggacaaatgaggtgattttttttaaccctagcctgaaattcgctctccagttctttggggtgggacacatgaggggattttttttaacctcggcctgaaatttgcttccacgaagagtcaatctcaggacttgaggaatgctactcaagccacctaatcaactcacctagaagccctttcgcaagtatgtgctatgcatttgttgtttataaaatggttttcatgtgagacaaaaaatgaaggatgttccatacatgttgtttctcagctagatgcctagatgattgatttcagtggcatgatttctgctaacgataactgatttattctcctagcaataaatgcacaccataccaaagatattaatatgcatatctaaggtaccactattggagcattctttacatgtgttggttgagctctgatctatcataaaaaacttttgagggctgagcctcaaatctcactacgacttacaagcgtcattgttgatgcctggacactgattagagcaatgttaaaagttacaaatttgctaggacatgtattaattttttactttagcatacaagttgttgaagggacgagtgtatagactgatatcagcttacaaataaagcctgtctcacgaataggcactagctagtccttctggtacacctcattgaatggtctgccatcttgattatcctgtccaatggtttttagggtgaagaactgtgcaaattctattctcgttatggcatctgcaaattcggcgccaactgtaaatttgatcatcctacaatggctgctccaatgggagtttatgcatatggtttctctgggtctgcttctgtcgcacccgcttcaactaatgcacctatgacgcgacatcttcttggatctccatcaggttctggatatatgtcttaggtgtctttttttcagttgacctactttgatgtataaaatccacggcatcgcctcaggcgctgtgaatgtttctcctaacttcccgccgggatgaagttctgtaaattgagttgctgccggagatgtacagcccccctcccccaattaatccagaactttgggaataactgttggaacctaataaacttcagatac

SEQ ID NO: 22578 - DNA, 1566 bp, Zea mays
  Clone ID: LIB3587-285-D10_FLI
ttccttttctccgcactcatcgcttgttgcggttcgctctctacaaggaggcggcttgcgcggggggcatcgtgcaatggcgcggcggtgcccgtgcaggctgctgctagccgtggcggcggcggccgtgctcgtggccgcggcagcgcaggcgcaggagacgtgctcggggaccgtccccgcgccgccgcgccgcggggcgcgggtgtccgtggccagcttcggcggcgcgggcgacggacggacgctcaacacggcggcgttcgcgcgcgccgtcgccagcatcgagcgccgcgccgcgccgggcggggcggagctctacgtgccgcccggggtgtggctcacggggcccttcaacctcacctcgcgcatgacgctcttcctcgcgcgcggcgccgtcatccgcgccacgcaggacacatcaagctggcctctgattgaaccgctgccctcatacgggagaggacgtgagctgcccggcggaagatacacaagtttaatccatggcaatgggcttcaggatgttgtcatcacaggcgagaatggaactattgatggtcaaggcagcgcgtggtgggatatgtggaagaacaggacactgctctacacaaggcctcaccttcttgagctgatgagctcttctgatatcattgtctccaatgtcgtctttcaggattcgccattctggaacatccatcctgtttattgcagcaatgttgtgatcagaaacgtgactatcctagctccacatgactcccccaacacggatggaattgatccagattccagcagcaacatctgcatcgaggattgctacatttctactggtgacgattccatcgccatcaagagtggctgggatgagtatggaatcgcctatggccgcgccagttctggcatcaccgtgcggcggatcacaggctcctccccgtttgctggcttcgcggtcggaagcgagacatcaggtggcgtggagaacgtccttgcagagcacttgaacttcttcaactcagggtttgggatccatgtcaagaccaacacaggcaggggcggcttcatcaggaacatcactgtctcggatgtgacgctggataacgtccggtacggcctgcggatcgttggcgatgtcggcaatcaccccgacgacagctacaaccggagtgcgctcccgatcgtcgacgcccttacggtaaagaatgtccagggccagaacgtcagggaggctgggctgatcaagggcatccccaactcggccttctcccggatctgcctgtcgaacgtcaagttcactggtggcgcacctgtccggccgtggaagtgcgaggctgtcagcggtggcgctctcgacgtgcagccgtcaccatgcacagaactgacttcaacgtctgggacgagcttctgtacaaattcgctttgatgctttgccagctagctgagctgctgctatgcttctgtatctacgagtatgtatactggtgctttaaagcttgggcacccaagtatttatcttcccgaaaattaatttggttttactaatttatttgaacctctctatacgaagagaat

SEQ ID NO: 22579 - DNA, 1036 bp, Zea mays
  Clone ID: LIB3587-286-C12_FLI
gcccgctgtccacttccctctcatcctctcgacctcgcttcctccctcccaccgtgccctgccttttcctcacgacctcgccgccacgctcgcgtctcgccgctgattgcggtcccccatggaaccgtcgtcctctcaatccgtccgccgctccatcgtcttcctgtatttgtgctgctgatatgtgtaacttgtgtttctccaggtgaaggcggccgagcacgcggccgagatggaggcgacggtggtcgtcgcggctgccgtggaggccgaggaggaggaggctgctgctgctgcggcttcgacgccgcagcggtctgggaggaaacggccccgcgcgattgggagtgggcggtaccgctcggtgtccaggtgtttctcccaatctcccctgctttcctcatcctgctgccgcttttgcttttaatcgctgtgacagcatagcacccgcctcgtctcgctgccggctgccgctggtgatcctgctccctgtggcattggccctagccagcaggcaggcagtcggccagggacggatggacggagacgacggatggaagccgcagccactagccagccacaccgcagaccgcgcacgcaagagaaagaagcggtgtttgcatggactgggattgccgacttgactgcggattgacggggacaggtgggagccagaaccgcccgaggaccctcttctcctcggccaagagacccacaccgcaactggaaccctcttctcctcatccgacgacagtggtggccactgctccggccaggcatagcataggcagcctggttacacaaaccaaaaaaggtatcccatacccacgctactgcctacacctacgaaacctgcttatcctgctgcaatttctgctaaattcgtggctaaattcaaagaatggtagtgtgaagtggaatcaaaatgggaactgggtgcagactgcctcaaaggatcagattattaaggtccgtggcttgtgctttttatttttctatcttcttcaaagaattttcggattacagtgtgcactct

SEQ ID NO: 22580 - DNA, 913 bp, Zea mays
  Clone ID: LIB3587-286-D3_FLI
aaattattagccccactgtgctagcaagctggcctctctgcccatgaatacagaatccaaacgaagaaaacatggaacaaaaataattggctccaacctccaactgggctcactcatgctccaactaactgctaagttgcaaccccactcccatttctatctctctcctcctgccatcaccctagaataggagcatttacctccgctttctctctctccctctcttccatcctcatgctccctctatatatacacatctccaccctgttcctgggtcctctcttccacccactgcaaccccaaatctctccttcctcacacacgcgaagctgagagaccaaagaagaagaagaaggaggagctgctagcgtggaagtgcccaaggcgagagagagacaagctagctaggacggccgcgacaggctagccagccagctgctagctcctgcggacgaggcgatggctggcgccgacgtcgacgtcgggacggagctccggctcggcctgccgggaggaggcgccgcggcggccaagaaggacaccatcgacctcaagctgaagctgcctaccgctggcatggaggaggctgctgccgccgccaggccggagccggcagccgagaaggccaagaggcccgccgaggcgccggccgccgatgccgagaagccacctgcacccaagtacgtacacatctgcacacacgcatgctgatttaatttctctgcacgggttataggcttaaattgactgctagtatgtagtagtactatcagttagtagtagttaccgtggctgtttaattcccacgagtccgagatgctacctttttaagcaatgatttggaacgcgttattaaccatgaaattcatgtggctgagtgcgatctacgatatacaagcgggaccgtgtcccc

SEQ ID NO: 22581 - DNA, 994 bp, Zea mays
  Clone ID: LIB3591-001-A9_FLI
ccgttgacattgacaagggggccaggtcgaggctttccgagctccgatccctctccaacgcctgagggatggccgtgccggcgcccgcgaaggcggcgcgcttgcttgcggcctccgcggcggtgctcgtgctgctgtggtgtgtccatttccgcggtgggctctccttcggctcccccaccaacaagggcctcatcttcaacgtgcatcctgtgcttatgctaataggattcatcatcctagggagcgaagccataatgagctacaaaatatggccatggagtcatgatacaaacaagatggttcacatgcttcttcatgctgttgcactcttcctgggttctgttgggatatatgctgccttcaagttccacaatgaaagtggaattgataatctgtacagcttgcattcgtgggttggacttggaactatctgcctgtacggtatacagtggctatttggcgttgctaccttcttcttccctggtgcttcgccaacagtccggcgcagaatgctcccatggcacactcgcgctggacttgttgtctacatactggcactgcttgcttcagagctggggttcctggagaagctcaccttccttcaggctgccggcctcggcaggtacagctcggaagctctgctggtgaacttcacagctcttgtgatcctactgcttggcgcttctgttgttctgtatgtcaccgctccaatgcacaatgagcacgcgcatgggtattcagcagtgcacaagccctgaaccacagatgcagcttcatcggttccagttggcgtatccttgtacgagtaggaatcaaatccaatcaaattttgtccgccggaattatgagactttagagtgtctccggcagtcagtgtaaaatagaggacacaaaactgtagatgacactttttgacactgtttgtagagtgtaattttaaataagggatgagatagaggatctattggagatagccttagggctagtttag

SEQ ID NO: 22582 - DNA, 1685 bp, Zea mays
  Clone ID: LIB3591-001-D8_FLI
tttaccttcctacctggtgctgtagcatccgccgcctcccgcagaacccgaagatggcgtcgtcggcgtcgaccctcgaaatcgaggcccgcgacgtggttaagatagtgctgcagttctgcaaggagaattcgctgcagcagacgttccagacgctgcaaaacgagtgccaggtcgcacagctcaagctgccacgcaagaagctcgaggacctctatgagcagattgtgttggagatggctgagctccgtgagcttgacacggcccgtgccatcctccgtcagacgcaggtcatgggtgttatgaagcaggagcagcctgagcggtacctccgccttgagcacctccttgtccgcacatactttgaccccaatgaggcctaccaagaatccaccaaggagaagcggcgagcactgattgctcaagctgttgcttcagaagtctcagtagtaccgccatctcgtcttatggcactgattggtcaggctttgaagtggcaacagcaccaaggattgttgcctcctggcacacagtttgatttatttagaggaactgctgcaatgaagcaggatgaagaagaaacataccctacttccttatctcatcaaataaagtttgggaagaaaactcatcctgaatgtgctcgattttcacctgatggtcagtaccttgtttcatgctcagttgatggaataattgaagtctgggattatcttagtggaaagcttaaaaaggatcttcaatatcaagccgatgaaagctttatgatgcacgaggaacctgtgctgtgtgttgattttagtagggattctgaaatgctggcatctggatcacaggatggaaagattaaggtttggcgtatacgaactggtcagtgcttgcgacgccttgagcgtgcacattcgaaaggtgttacaagtgttacattttcacgtgatggaacccaaatattgaggtacatggcctcaagtctggaaagatgctgaaagaatttcgaggtcattcttcatatgtaaattatgccatcttcactactgacggtagccgtgtcattacagcttccagtgattgtactgttaaggtctgggatactaaaacaacagattgcttgcatactttcaagccaccacctcctttgaggggaggagatgcatctgttaattctgtccatttatttccaaaaaatactgatcacattgttgtctgcaataagacttcatcaatattcatcatgactttacaaggacaggttgtgaagagtttctcatcaggtaagcgagaagggggagattttgttgcagcttcagtttcaccaaaaggagaatggatatattgtgttggtgaagacatgaacatgtattgctttagctaccaatctggtaaactggagcatctgatgaaggtgcatgagaaggatgtcataggcattacgcaccatcctcacaggaacttagtagccaccattgctgaggattgtatgatgaagatatggaagccttgactttttttctttttaaaaaaaccttgaaccgatgattaaataggatgtattttgttttgtaatttagataactggtaggcgctacagctatggactcgttggtgcttatgttgccccatgtcttactaccattgtatcctgtactagatttagggacctttcaatggtgtaaacacagcttact

SEQ ID NO: 22583 - DNA, 723 bp, Zea mays
  Clone ID: LIB3591-001-F8_FLI
tcagaagcagaaggcggcgctggcgaagcagctgaacctgaagccgcgtcaggtggaggtgtggttccagaaccgcagagccaggtgaacaaagcagcgcccttgaagcagcacacgcatgccatttatactgactcatcctccgtggctaatactagtctaataataatattatcgttcaggacgaagctgaagcagacggaggtggactgcgagttcctgaagcgctgctgcgagacgctgacggaggagaaccggcggctgcagcgggaggtggcggagctgcgcgtgctcaagctcgtggcgccgcaccactacgcgcgcatgccgccgcccaccacgctcaccatgtgcccctcctgcgagcgcctcgcctccgcgtccgcgtccgccgaccaggcgggccgtgcagggccctgctggggccctctccccgtgttcgtcgacggcccagcccggaggccgtgatccacgaccacgatatggcatgagatggatgcgcttgctaatcgctaccgctagctaagtagctagtgctaattagggctggatcttctttttttctttgtttggttcttattatactcgcaggctattacagcttagtagtgtttattagtccgatatgataaaaatcttcgttgtttggcagtgttttatttgctgaaaaatagataacgatgtcttatgtctttgtactcataagtgatgcaaaattgtctt

SEQ ID NO: 22584 - DNA, 1453 bp, Zea mays
  Clone ID: LIB3591-002-A5_FLI
ctcgtctgctgcactccactgtccactccactctcccaccgcactttcctctctcctcccctgttttcgctcccctcgagacccccaaagcaccgaaagggggaggagcggagggagatagagaaagcggcggggttcaagaacgccgcggccatccggagccaggattctcccgatacaccccctcgttcccagttcttcagtggcgccgatttggagttccagagacggcgatgggctccggatctctgctcaaggtcttcgccaacaacttcgacgtccttgcagggcctttggtggcattggcttatcctttgtatgcttccattaaggcaatagagaccaaatctcctgtggatgatcaacaatggctcacatattgggtcctgtactcactaataacattgtttgaactcacatttgcatcaattattcagtggcttcctttctggccttcaatgaaattgatctttatttgctggcttgtcttgccatacttcaatggcgcagcctatgtgtaccagaattatgtgagacctgccttcataaagaaccagatggtcaacatttggtatgtccctcagaaaaaaggccttcttgggaaatctgatgacttcctcacagcacttgataagttcattgaagaaaatgggactgacgcgctgaagaaattggcgaacaaggctggcaagccatttaaacagtctgggaaatcatcaaaggatcagaaagagacaaaatcatcgaaggattccaaagaaccgaagccatcaaaagatgcaaagcaaccaaagccatcaaaagatacaaaggagccaaagccaccaaaggattcaaagtcgtcacccaaggactccaaagaacagaagaaggcggcgctgaaagatccgaagaaagcaccgaaggattctaaaggactgaagaaagcgcttaaggatccgaaagaacaggaatcattggaagacccaaaggaacatacagcaaagaaggccggcaagcgtgtgacgttcgccgaggtggagcctgagaaggagttcaaggcctcgaacagtgactggcacccatcctctgatttccacgcggcgtaccctgagcagaacccatgggctagcggcttcatgatctttgaggatgaaaacagctactggaaccgaggacccctagactgctgagatcaaatgtatcgaggtggacactttttggtccgctagcagtgcaaggtcccaccagttcatcttcagccgaggagatgggtctcactcgcattatggcgacttgcgactggtgtctgactctcggtcctgtaacatatttgtccgacgaatacctgtaggttgtagtgtagaattatgcagtgtggatggtgaaccggtgatgttctgtttcaggcggtgaaccttgttagttaggagaattgagatagtagcagtgtggtgctaaaccttatctggtt

SEQ ID NO: 22585 - DNA, 329 bp, Zea mays
  Clone ID: LIB3591-002-D6_FLI
agcctcgactggtgccacggcaatgccgacaccgccgtccgcgacgccatcctctactgcaaaaagtgcagcgccgccggacaacaagacgcatagcacacgaccttgtcacgtgaagtcctccgagccgtccgtcgccctgtgccgtctcgtcaccgagctctttgtctgctcatcgtctgtccgacgtgatggcggtcatggcatcgccctgtgccatctctataccacacctcgcacaaagattacagcgtccgtgtatttgaactgccgcgtgaatggctcgtgatgtacagtttaaaatccaaagtttaaacattaatccgtag

SEQ ID NO: 22586 - DNA, 737 bp, Zea mays
  Clone ID: LIB3591-002-G1_FLI
accatcacggtggtcaccgagctacctgaacctgatacagcaaagactaacgccgtcttgccccgaattcggcgattgacgggcgtgcattccttgcaccatgatctcggtgagctcttgggcaagggaaccggatccgatgtcgtgctggtggtttgcggtgagtccttcgcagcgcacaaggccatacttgcatcgaggtccccggttttcatggcccagttctttggccccatgaaggagacgcactcgcagtcgcagagggtggagatcatggacatggaggcggccgtattcggggccatgcttcgcttcatgtacaccgacgtggtgcccgagcttgagcggcaggagaacggcgacgtcatcgcgcagcatctgcttgcagctgcggacagatatggactcgacaagctcaaatcgatgtgcgaggacaagctctgcggtggcaccacagtggagacagcagcgacgactctggcgctggcagagcagcacggttgcccaaagctcaaggcttggtgtgttgagttcatcgctgcaaaccttgatgccgtcatggtgaccgagggttacaagcatctgatgacaagctccccgttggttctgaatgaccttctgagagctgtgcgtggaacgaagaactgaagaacattggtagttgtattgtatctgctctctatgaattcggtgtttaagtttatattccttcccattgaggaagggtggattgctgg

SEQ ID NO: 22587 - DNA, 2277 bp, Zea mays
  Clone ID: LIB3591-002-H3_FLI
cgatcacttcttcctctggattttgggaaggaggcatcggacgtcggatgcatgacacactcattgcattagcgcctacgcctaccgcaagtggaagcctatggatctcaagcaagccttctctggtacaatcttctgccttctgcttctattctgcgtgggctgcagatgtcggactttggaaatagaggccacccagacagcagccctcaaggttgatgcctcgccacagcttgcccggaagatccctgaaacactgtttgggatattttttgaggagatcaaccatgcaggagctggtggcatatgggcagagcttgtcagtaacagaggtttcgaagctggaggctctcatactccatcaaacatcgacccgtggtccatcattggagatgactcctccgtgttcgtggcgactgatcgtacatcatgtttcagtcgaaacattgttgctctgaggatggaggtcctctgtgatgactgtccagctggtggtgttggtgtttataacccaggtttttggggcatgaacatagaagatgggaaggcctacaatctcgttatgtatgttcagtccccagaaacaaaggatctaacagtttcattaacaagctctgatgggttgcaaaacttggcttcagctacaataacagtttctggcacatcaaattggacaaaagtggagcagaagctggttgctaaaggaaccaatagaacatcaaggcttcaaataacaacgaacaaaaaaggagttgtttggcttgatcaagtatcactcatgcctgaagacacatacaagggacatggtttccgcacagaacttatatccatgcttttggatttgaaaccacgattcttgagatttcctggaggttgttttgtagaaggtgactggctaagaaatgcattcagatggagagagtcaattggtccatgggaagagaggcctggacacttcggggatgtttggcattactggactgatgatgggcttggatattatgagttccttcagcttgcggaggacctgggtgctgccccaatctgggtattcaacaatggaataagccacaatgatgaagttgatactgtagctattgccccttttgtaaaggatgtattggacagtctagaatttgcaagggggagtgcagattcaacatggggctctgttagggctgcaatggggcaccctgaacctttcctggtcaaacatgtcgcaattggaaatgaagattgcgggaaaaagttctaccgtggtaattacctcaaattctacaatgctataagagaggcctatccagacattcagatgatttcaaactgtgatggttcatctagaccacttgaccatcctgcggatttgtatgatttccatgtctatactgattctaagactttgtttaacatgaggagcacatttgacagaacatcacgtagtggacctaaggcctttgtgagcgagtacgctgtctggagaagtgacgcgggtagaggcagtcttcttgcttcgttggctgaagctgctttcctcactggtctggagaagaacagtgatatcgttcagatggcaagttacgctccactcttcgtgaacgacaatgaccaaacgtggaacccggacgctattgtcttcaactcctggcaacactatggaactcctagctactggatgcagacgattttccgcgagtcaagcggcgccatgattcatccggttaatatcagttcccggtactcgagttcgctggccgcgtctgcgatcacgtggcaggatgcagagaatagcttcctgagagtgaaggtcgtgaacttcgggtcggacaccgttaacctcacggtctccacgagcggactcggggccagcgtcaacgcgctgggatcaaccgccaccgtcctcacgtctggcaacgtcatggacgagaactccttcagtaacccgaacaaggttgcgccggtgaaaagccagctgagcaacgccgcggagcagatgcaggtcacgctggctcctcactccttcaccgccttcgatctggcgctggctgagcccaagcttgtggcggagatatgatgtgtgtgctgcacattacagtacacaaacagcgcgcggatggcagcaaccagagggtgtggagtgtggtgtgctgttagcgatcttgatcgataaaaaaggctttgtactggtgtaccacgatacaggataacgtactacgtactgttgcttcatgaaataaaaaccacatcaggtttttgcttggtgttggttggtttcctttc

SEQ ID NO: 22588 - DNA, 1547 bp, Zea mays
  Clone ID: LIB3591-003-B7_FLI
ccctctccctctcgtggccacgactgccgccgctgccgccctacgccaggtgtccaggtcatctccggcccattcgccggcgacgagcaccccactagatcgaccgagctatggacggcctgtggcatctgggggacgagctccgcgggcagcccaaggtggtggaggaccgccagtggtcgctcatgacatccaagctggcagagatcaccaggtccaggggcgagaggacgaacgacctcgactacgccaggatgaacgccgcccccgacgccaagcagtggggcaaggcggcgtcctaccagcaccacgacgagggcaggatggaccaccacgtcggcctcagcctcaagatgaacgatctcaagatgaacgaggccgccgctgccgcagtcatgaagctccccttccgcggcgtgccctacaacgtcaacccgatgtaccccaaggggagcaacgccaacgccaatgtcaacgcgttcaagatgaatgtcggggtgaacaagtactccagcagcacgaacgggaaagactccggcgggaaaagcggtggcggcagcaacaacaacagcggcggcggaggcaacggcaatgggaccgccaacggcagttccgcagttgacaagcgcttcaagacgttgccgacgagcgagatgctgccgaagaacgaagtccttggtgggtacatctttgtctgcaacaacgataccatgcaggaggacctcaagaggcagctttttggattgccagcacgatatcgtgattcagtccgggcaattactcctggcctgcctcttttcctctataactacaccactcaccagcttcatggggtatttgaggctgccagttttggtgggtctaatattgatcccactgcatgggaggataagaagtgtaaaggtgaatctagattcccagcgcaggtgaggatccgcgttaggaagctgtgcaagccgttggaagaggattccttcaggccagttttgcaccactatgatggcccaaagtttcgcctcgagctctccatcgcggagaccctgtccctgctagacctatgcgagaaggaaggcatctgagctgttggctgcctcgtgaggttctagtaaatatcaatcatccttgtatgttctgtagatggtggttggcaatgttgtttatttttcaagcgcaagctgctgccggtctcgttttccctgtcctggatggaagcaaagggacctggtactttgaaggccccccctcaaacataagctgtgagcctgtcagtgcacgtgtccgccgttgtcgtcaagaaccaaaccaaatcatgaaatcttgcgccgacggagagttggagcgtgtatgttttgctatctctatctacatgtctcagtagagtggatataccctggggtccccaaaagatgggggcctgtatgtaacactacgtgtaatggttaaggtgaatgtgccgtgaggccccccaaaagttggagtgtgtatttttgttgtcaccttgaaccgactttgcgtatgcttttttttagtgctgctaccttctgcgc

SEQ ID NO: 22589 - DNA, 1037 bp, Zea mays
  Clone ID: LIB3591-003-C6_FLI
gcgggcggaagcggcgaggcggctatgtctccgccgtcctctagtgccagcgggaagcgcgggcgggacccggaggaggacgtgtacgtggacaatctccattcccacaaacggtatctcagcgagataatggcatccagtctgaatggactgtctgttggggattcactgcctgacaacatcatggagtcccctgcaaggtcagagactgcttcctgctacagggatgagatattatcccaatactcaccgatgtcagaagactcggatgattaccggtgctatgacactcaattaaaccccagtgggaatcatcctgatgcgatgatcagcccttcaactagcccaatgtcatctcctcatcgacaccagagaccacaatcttctttgttaccttcaaacccataccctctcccaagctgctccctttcgtcagtagtctgctctcatgctcggcgtggctccgataatgaaggccggttcccgtcctcgccaaatgacatgtgccatgtagcagatttgaggcgaacagcactactgaggtcagtgcaaatgagggtgcagggaccccattcgtatgacctatcattcggcatcagacaaggacaagatcatgcacatgagcatgaaggggaacatgaccatgagcatgaacatctagaggacttggaagggacagaaggatcatcttgcaataagtcaatcgttaacgaagtcacgtacaaccagagacgtgaccatgattttggtcggtcagagcacgagatagattacatcaacaacagcacatcagatgattgtgtaagtgatctaaaatttaagcaagaagataagagccatagtaaatttgatatccctatgcacaaaaattcatagcacatggaacatatgtgttagttttttggattataactctacttaacttcattgtattcttgacggatgccttatctattgtccgtggttttagcatcagcgttctgaatagcgacattgtaatatttgagtgaaattaacctttggattgttgcgatgcc

SEQ ID NO: 22590 - DNA, 1684 bp, Zea mays
  Clone ID: LIB3591-003-D6_FLI
cacaccttcttcttcgtcgtcgtcttcccctgctgcggttagcctggccgtggccgcctcctgctcttcgatctcacgctgcgatggagcggtacgaggtgatcagggacatcggctcgggcaacttcggggtgacaaagctcgtccgggacgtcaggaccaaggagctcttcgccgtcaagttcatcgagagagggcaaaagattgatgagcatgttcagagggagattatgaaccaccggtccctgaagcacccaaacataattagattcaaggaggtaatttctcagacatcttggaaaggaaatgttctggtacgaatttgaagttggatgattggtagctacacacgtaagtgtcttcaaactgttacttttgatgcttttaaagaagaaaaatacagactttttatattctttgcctgttgaacgagatgtttgagccacacttgtgaacattgtgctggtgactgcacgttcttagaaccccattcatttaccactaatacgtatctctcattttttttaataaaggagttgtctttgtcttgtacttatctctatgacattctttccattcatcattggacacctgctttagactgattgtcaaggtctaatcatcacaaaccatttctaggttgaaaattaaagtagtacttagtttttcaggtcgtgctaactcccacgcatttggcaatagttatggaatatgctgctgggggtgagctatttgaaaggatctgcagtgcggggagatttagtgaggatgaggcaaggttcttcttccagcaactgatttcgggagtgagctattgccattccatgcaagtatgccatagagatctgaaactagaaaacactctcctagatggtagtgtcgcaccccggctcaagatctgtgatttcggttactccaagtcttctgtgctgcactctcaaccgaaatcaactgttggcacacctgcatacattgctccagaggtcctctctagaaaagagtacgatggaaaggttgctgatgtctggtcttgtggagtaacactatatgtgatgctcgtcggcgcgtatcctttcgaagaccctgatgacccgaagaacttccgcaagacgatcacgagaatactcagtgtacagtactcaattccagactacgttcgcgttacaatggagtgcggacatctgctgtctcggatatttgttggaaatcctgagcagagaataaccattcctgagatcaagaagcacccgtggttcctcaagaatctgcccatcgagatgaccgacgagtaccagcagagcatgcagttggcagacatgaacaccccggggcaaagcctggaggaggcgatggcgatcatccaggaggcgcggaagccaggggacgccatgaaccttgccgggcagctgccctgcctggggagcgtggaccttgacgacattgattttgacgatattgacgacatcgacactgagaacagcggcgacttcgtttgtgcagtgtgactgtgtgaggctcagcagggcaggagctagcttcctttggtcgttggtgtctgtagatccttgttgtgctatgcttccattcgttcctggatcagatatgttgttgtgtaaccgagaaaattggcgttgctgtggacaatagaaacagacccataaacttatgcggaaatctacccccc

SEQ ID NO: 22591 - DNA, 681 bp, Zea mays
  Clone ID: LIB3591-003-F7_FLI
ctcagggaggaacttgaggaacgtgagcgcaagcactactcttccaaggataagtcctatgccgaagaaagagaccggcggaaaagctctagccatctactcttagaaggttcaaagagagagacagaggataagatagttccacgagaaatcgatgctgatgactccgatgtggagcctaaaagcgatgacgagagcgatgaagatgatgatgacgacgacactgaagctctaatggcagagcttgagaggattaagaaagaaagagccgaggagaagcttagaaaggagcggcaacaagcagaagaggaggccaagatgaaggaggctgaactgatgcggggaaacccgttgattaatatcaacaatgctggctccttcagtgttaagagaaggtgggacgacgacgtggtattcaagaatcaagcacgaggagagaccaagacaccgaaacggttcatcaacgacaccatcaggagtgatttccaccgtaaatttcttcagaggtacatgaagtgacgcttccgtcgttcacaattcagcctggagcccctcatcgttatcatgtttgtgtatgagcgaaagatcattattgtgttgttgtatgaaacaagagtgtaaacatatgtctactacttaacaaagttatgctgagcaatgcatatcctagttgaatgtgac

SEQ ID NO: 22592 - DNA, 732 bp, Zea mays
  Clone ID: LIB3591-003-F8_FLI
tcctctcgtcctcttctgttgtgagctagctacttagcacaagagcagaaggagcacgcttgtgtgaagaagaagaagaagaagaaagagggatgaagccggcggcagcaacaacatacaccgctggccgtggcgccatgggcatcctggaccacatgtcgcatgtgtgcagcatcacggagacgaaggaggcgctcaagctcaggaagaagcgaccgctgcagacggtgaacatcaaggtgaagatggactgcgaaggttgcgagcgtcgcgtgaagagcgcggtgaagtcgatgcgcggcgtgacgagcgtgacggtgaacgcgaagcagagcaagtgcacggtgaccgggtacgtggagcccgccaaggtgctggagcgcgtcaaggccaccggcaagaacgccgagatgtggccctacgtgccctacacgctcaccacctacccctacgtcggcggcgcctacgacaagaaggctcccgcgggcttcgtccgcagcgcgccgcaggccatggcagaccccagcgctccggaggtcaagtacatgtccatgttcagcgacgagaacgtcaacgcctgcaccatcatgtgatgcatgcatatgtatagtctctcgatcgtatcatgtgtagtagtacgagctagctagtgcatatcgatcttcgtactgtatcatatcgatcgaaagaaccttaatagccaatacaagaggaatgtgaattaagcaatct

SEQ ID NO: 22593 - DNA, 1973 bp, Zea mays
  Clone ID: LIB3591-003-G8_FLI
ccagtatcccacggccggccggccacccacacccacctctcaactacgccaagccaagcttagcgaaactcaggcgatcggaccacgccccaccgaacaagtgcagcgcccgaccctccccacggaacgaagcttcggcgttctcgtcgccccgtcgcaagatcacaagtccataacaagaaagacaacaaaactatgctgaaagatgtgcttgcatagaagatacttctgctgcaacaccaccaagggcctagtggctcttgcgcaagatctgcaggcctgctcgtctcttgacttgagcggcggtcaccttgtccgcatctactccacgcccttcagactccgacgccagcaacctataaggcgcagtccacctgattgacaacagaaagctagccttgtgcgtgatcacacagttttcatggatataaaagatatgaagaccagagggaagactttgacggagcggtatgagctggggaagctgctggggaaaggcgcgttcgggaaggtacactatggaagggaccttgagtccaaccaggatgttgctatcaagatcatggataaggacagggtgctcaaggccgggctctcagagcaggtaaaatgtgagatcacgacgatgcggctggtgacacacaaaaacatcgttcgtctccatgaggtcatggcgacgcgaaataagatctacatcatcatggagtatgcgaaagggggtgagctctttgaaaagattaagaggagcgacaggctcacggaggctgacacacacaaatacttccaacagctcatcgatgcactagatcactgccatagccgaggcgtgtaccatcgggacttgaagcctgagaacctgctgctggatgagaatggggacctcaaggtgtctgactttggactgagcgcgttttcagagtcgaggaggacagatgggttgctccatactgtctgtgggaccccggtgtatatagctccagaggtgatcaagaagacaggctacgatggtgcaaaatcagacatctggtcttgtggtgttgtcctctttgttctcgctgctggctacctccctttccagggcccaaacttgatggagatttatcggaagatacatgatagagattttaggtgccccagttggttttcacacaaactcaagaggttgctatacaagatcctgaaccccaaccccagcatgagaccttcaattcaggagataaaagagtctacctggttccgaaaaggtcctagggagatcagtgcagtgaacgagaaagttcttagcgagaatgccaccaccacaaatgctgccccagtgcttccttctaggcgcaaggagattgctcacgaagatatgaagtccttggttgccacaaacctcaatgcctttgaaatcatcgcgttatcagcaggattggacctgtctggtctgtttatcaaggagtgcaggaaggagacaaggttcacttcagataagcctgcattgtccatcatcgcaaagcttgaagacgtcgcaaaagcactgaatctcaggataaggaagaaggacaacaacactatcagcattcaagggaggaaggaggggggcaatggtgtccttaagtttgacacgcagatctttgagatcacaccatcctgccatctcgttcagattaaacaaaccagtggcaatctacttgagtacgagaaactgttggaagagggcatccgaccagggttaaaggacgttgtctcggcatggcatggagatgatctgcaacagaagcagaagtagcttcggatgtctcctgtagattctattctagtacatttcattccttatttttttagcagctacattccttttttgtattggtggtgatatgaaccattaggttgtgttttgttcagcaataattgttaaggagctgagttattgtgttacaacctaatgattgttacaattttataatgaaaaaatgttgtcgatcctt

SEQ ID NO: 22594 - DNA, 1867 bp, Zea mays
  Clone ID: LIB3591-004-E9_FLI
ctccgccatggccacctccctcctacgcctctctcgcccccgccgcgcgctgctcgccatctcctccgtccgccttgcgctctccacccagccccacgtcccatctccgtccccatcccctaccccctcctccgcccgccgcctcccgcatttcctctccttcctcgccgccgccgccgccgctgggggagcaaccgtcgcgctctgcgactccggcctagatcaccgggtcgggggcaaggacagcgccgatctggtggttcgtggggagcggaagttcgtgccgcaggagttcatcgacgagctcgcgtccttcctcggggacaacatcactctggactacgaggagaggagcttccatggcacgccacagaacagcttccacaaggcggtcaacctgcctgatgtcgtcgtgttcccgagctcgcaagatgaggtacaaaagattgtgatggcctgtaacaagcacaaggttccaattgtaccatatggtggggctacctcaatagagggtcacacactggcacctcatggtggtgtttgcatcgacatgaccttgatgaagaaaataaaatccctgaatgttgaggatatggacgtagttgttgaacctggagttggatggatagagctgaacgaatacctgaagccctatggcctattttttcctcttgatccagggcctggggccaccattggaggaatgtgtgctactcgttgttctggttcattagctgtgaggtatggaacaatgcgggataatgtgattaatcttcgggctgttttaccaaatggtgatgttgtcaagacaggctcccgggctcgaaagagtgcagctgggtatgaccttgctcgtttgatcattgggagtgaaggaactttgggtgtaattacagaagtgactttacgactccaaaagcttccatctcattctgtagttgcaatgtgcaatttcaaaacaattaaggatgctgctgatgttgctattgcaacaatgctttctgggatacaggtttcaagagtggaattgttggacgaggttcagataaaggcaataaatatggcaaatggcaaaaatttgcctgaagtgccgaccttgatgtttgaattcatagggacagaagcatatgctctggaacaaactctcttggttcaaaaaattgccactgaacaccatggatcagattttgtttttgtcgaggagccagatgctaaagcggaactatggaagatcaggaaggaggcactttgggctggttttgctatgaaacctgatcatgaagctatgataacggatgtttgtgtccctctatccagacttgctgaatgcatatctacatcaaagcgattgcttgatgcgtcgccattgacttgtctggttattgctcatgctggtgatggaaattttcacacaattatcctgtttgatccaagccaagaggaccaacgaaaggaagcggagagactaaaccatttcatggttcatacagctctgtctatggaaggtacatgcacaggagagcatggtgttggcacagggaaaatgaagtacctggagaaggagttgggcatcgagtcacttaggacgatgaaaagaataaaggcggcgctggatcccaacaacatcatgaatccgggaaagctgatcccgcctcacgtctgcatatgaccgtcacctgactggaggatcgatccccccatggccatcagtgggcttgttggctcactcatcaaaagctttggttccgcgaggcgtgacgcggtgctctgctgacagttgcaataatgcgctgaactgctctgtgcctgtatggcatgcgttggaggcaaatgcacgtaggcatcacatcaaaactataccggtacc

SEQ ID NO: 22595 - DNA, 1091 bp, Zea mays
  Clone ID: LIB3591-004-H9_FLI
ctctgagccctctctcgtcttcttccccaccccaccagtgacccacgcgttcctcagatcagatcggcaaggccaatccgaaatctcgagctttcgcgccggcgaccacagcaaagaggaggccacagcacgacagcgccccagggttcctactctcgtcgcagcggcagcagtgaggggaagatgtcgtcggtgttcagcggcgatgagaccgcccccttcttcggcttccttggcgccgccgccgctctcgttttctcatgcatgggggcggcgtacgggacggccaagagtggcgtcggcgtggcgtccatgggtgtcatgcgcccagagctcgtcatgaagtccatcgtgcccgtggtcatggctggtgtgctcggtatctacggcctcatcatcgccgtcatcatcagcactgggatcaaccccaaggccaagccatactacctctttgacggctatgcccacctgtcgtccggccttgcctgtggtcttgctgggcttgctgcaggcatggccattggcatcgttggtgatgctggtgtcagggcgaacgctcagcagccaaagctgtttgtgggcatgatcctcatcctcatcttcgctgaagcgctcgccctatacggtctcatcgtcggcatcatcctctcatcccgcgccggccagtctcgtgcggactaggcacgttccacatgtctccgccacctggtcgtaaccgggtcgtgttttgtatcggtgatgagccgacaagctggagcacttaattttttttatgctgtctagttttttgaacttgcgttgagtcgagaaaacaaaatagaacttgggtagccgagggggtgaccttttttcccttgtgccattcttttccctgtcgtggtgggtggtgggctgtggctgatgcttctttctgcacacttttttttgcttgggctcggggcgttggtgtaatttggtgaataagcgagtgcgtccagtgcaatgggagctcaggactcttctgttcaaaatccgccttgtttcgtcgttgtcttgttctgtgttctatatgaatattgtcgtgtgggaaatacatgcgtggctcatgaact

SEQ ID NO: 22596 - DNA, 1000 bp, Zea mays
  Clone ID: LIB3591-005-B12_FLI
tcgccacagcttcgtcaaagacacgcggaaaagaagaggaagggggaggcgactcgaccgaggcccggtttcgatctctggtcctccgattgcgtccagatctaccagcaatggcatcatcttcggacccatggatgaaggaatacaatgaagcatccagacttgctgatgacatcagttccatgattgccgacagagggtctcttccacaatcaggcccagaaattatgcggcatacttcagccattcggagaaaaataactattcttggtactagactggatagcttggagtcattgtttggcagaattcctccaaagtcaatcactgacaaggagatgcataaacgccaagacatgctttccagtttgaagtctaaagccaagcagatggcgacaagtttcaacatgtcaaacttcgctaacagggaggatctgcttggtcaaagtaaaatgccagatgacatgagcagagttgctgggttagataaccaaggaattgttggccttcagaggcaaattatgaaagagcaagatgagggtctcgagaagctggaagagacagtgctgagcacgaagcatattgcattagcagtcaatgaagaacttaccctgcacacaagattgatagatgaccttgaagatcatgttgatgttacaaattcacgtcttcagcgtgtgcaaaagaggcttgcaattctgaacaagcgcaccaaaggtggttgctcatgcacgtgtctgctcctatctgtcgttgccattgtgattcttgcagtcattgtttggcttctcgtcaagtatctataaagaaaagaaagaagcagccggctaccctgcggacctctctcgaaatgctcacctgcagccttcgcttgaaaagttccttctgtgttactccataaaatgtgcagccctttaaaattaatatgtatacacggtggtttcatcttcccttccatgagtggaatggttatggctatgtacattacatagaatttggt

SEQ ID NO: 22597 - DNA, 718 bp, Zea mays
  Clone ID: LIB3591-005-D8_FLI
ctgactctcgggcacttggctgacgacccgttctctctttgcaactgcaactgcaacgcaccaagaaactgccggcgatcgatcggggcaaggagataaacatggtgcacgggaagctggaggtcctcctcgtctccgccaagggactcgaggacaccgatttcctcaataacatggaccccttcgtgatccttacctgccgcacccaagagcagaaaagcagcgtcgcaaatggagcaggaagcgagcccgaatggaacgagaccttcgtcttcaccgtctccgacgacaccccgcagctgcacctcaagatcatggacagcgacctcaccaacgacgatttcgtcggcgaagcaaccatccccctggaggccgtgtttcaggaaggcagccttcccccggcggttcacccggtcgtcaaggaggagaagtactgcggagaggtcaagctcgcgctcaccttcactccagcagcggaaactcgccgccctgatgacaacgaggaggggccgccttacagcagctggagttgatctatctgccatgggatgcatgcatcatatatatccaccaagagaagagaggataattaattaatctactcaagagaagaatcagtgttgctgttatgcgaccctctatctatctatatatatgtgcttaatttgtcatgaacgactgccaatataaaataaactattcagagttgtttgcacgt

SEQ ID NO: 22598 - DNA, 1490 bp, Zea mays
  Clone ID: LIB3591-005-E5_FLI
ctctagaacctcgcgggccattcaaaaggctgcgccgttaaccccatcccttcgcctgccctgcccacgtggccacgtacgagtgacctcgattattctgtttgctctcgttcaagtcatcgtctggtcgcgtcggcagcagacgcccagagccggagggagcgccatggccgcgtcggatctggagagcaaagccaaggaggccttcgtcgacgacgacttcgagctggccgccgaactctacacgcaggccatcgacgccgggcccgccactgccgatctctacgccgaccgcgcccaggcgcacatcaagctcggcaactacactgaggctgtggcagatgctaacaaagcaattggtcttgatcctacaatgcataaagcctactaccggaaaggtgctgcatgcattaagcttgaagaataccaaactgcaaaggctgctcttgagttaggttcttcctatgcaccaggcgattcaaggtttacccgtctattgaaggaatgtgatgagtgcattgctgaggaatctagccaggcaccagcaaagaatgtcgaggctcctgtagctgctactgttgaggacaaggaggatgtcgcaaatatggataatacaccgccagtggtagaacccccaagcaaacctaaatataggcatgactactacaacagtgccacagaagtggtcctcacaatatatgctaagggtgttcctgctgatagtgtagtcattgattttggtgatcagatgttgagtgtatccattgaagtacctggtgaagaaccgtaccattttcagccccgtctgttttctaagattatccctgagaaatgcaagtatcaagttttatccaccaaggtcgaaatacgccttgcaaaagctgagcaggtgacatggacaaccctggattatagtggaagaccaaaggctattccccagaagataagcacgccagctgaaacagccccaagaccttcatacccatcttcaaagtcaaaaaaggactgggataaactggaagctgaagtaaaaaaggaggagaaggaagaaaaacttgaaggtgatgctgcattgaacaagttcttccgtgatatctacaaggatgctgatgaagatatgcggagggccatggacaagtcattcagggaatctaatggtaccgttctctcaaccaattggaaagatgttggatcaaagacggtggaagcgagccctcctgatggtatggagctcaagaagtgggaaatttgaagtttggactgcccctcttgtaaatccaggtcttggaagttatgacctagttctgtccacccatttggtgtcgtaagtttggttaagtgtgtgtgtgtttttggttcagctgtcgttcgaggaaaagctattgtaagttgtggactgtgtaaaagctgcaatagattgtgggttgtgaaaaaggtgtatgctgtttaatttaaacaagcataaaacttacacgtgtctctattttttc

SEQ ID NO: 22599 - DNA, 1051 bp, Zea mays
  Clone ID: LIB3591-005-F7_FLI
catcgacacgatcgcgagcgcaagcacgtacgttgtcggaagctcaagttagaagaagcaccagtgcctgatcgatggcggcccaggctctcctctccggccggcagctgctgggccgccccgtgcagtcggccgtctctaggtcgtcggcgaggaaggcgcccttcgtcgtcagggccagctccagccctccagccaagcaaggtgccgacaggcagctgtggttcgcgtccaagcagtccctctcctacctcgatggcacgctgcccggcgactatggcttcgacccgctgggcctctcggacccggagggcaccgggggcttcatcgagcccaagtggctggcctatggcgaggtgatcaacggccgctacgccatgctgggcgcggtgggcgccatcgccccggagatcttcggcaagatgggcatcatccccccggagaccgcgctgccgtggttcaagacgggcgtcatcccgcccgcgggcacctacaactactgggccgactcctacacgctcttcgtcttcaacatggcgctcatgggcttcgccgagcaccgccgcctccaggactggtacaacccgggctccatgggcaagcagtacttcctcggcctcgagaagttcctcgccggctccggcgacccgtcctaccccggcgggcccctcttcaacccgctcggcttcggcaagaccgagaaggagatgaatgagctcaagctcaaggagatcaagaacggcaggctcgccatgctcgccatcctcggttacttcatccaggggctcgtcaccggcgtcggcccgttccagaacctgctcgaccacctcgccgaccccgtcaacaacaacgtgctcaccagcctcaagttccactagaacgtggtgcatcagcatacctgctgctgccgccgccgccgccagttgtttgctgtggaaagctagatgcatgcgtgttgtaaaggaacctgaagcgttgcatcggtcatgattcatgcatggccagcctgctgcctgtaacaacaaactagtattgatcttattgagaccgg

SEQ ID NO: 22600 - DNA, 736 bp, Zea mays
  Clone ID: LIB3591-005-G3_FLI
gctggcttctcctccccctcttaccaagtcctcctcgggttagggttccttagggttttgtggaggggcgatggcggcggctgatgtggagtaccgttgcttcgtcggcgggcttgcctgggccaccagcaacgagtcgctggagaatgccttcgcctcctacggcgagatcctcgactccaaggtcatcaccgaccgggagacggggaggtcccgcggcttcggcttcgttaccttctcctccgagaactccatgctcgacgctatcgagaacatgaacggcaaggagctcgacggccgtaacatcaccgttaaccaggcccagtcccgtggcggtggcggtggcggcggtggctacggcggcggtcgcggcggcggcggcggttatggtggcgggcgccgtgacggcggttatggcggcggtggcggctacggcggtcggcgcgaaggtggcggcggcggctacggaggcggtggcggctacggcggtcggcgcgagggtggcggtggcggctacggcggcggtggcggcggcggctggagggactgatgtgtgggcccatcctggcttcggccgagttatcttatctatctatagtatcgtgttaccgttcgcttctgtcaccgtgttagtgtccgttctacctttggattaggtgttggtaccctgttgttcgctttggttgctcccgctatgaaacgagacgagagaagaatgagcaaggtttttgttcgc

SEQ ID NO: 22601 - DNA, 939 bp, Zea mays
  Clone ID: LIB3591-005-H1_FLI
ctgatctggcctctctcgagttaatcctagatcaatatgagaaggggctacagttacagtccttcaccaccaaggggctacaggagaagggcgcgcagtccaagtcctcatgatcattatggtggtcgtggtagggatctcccaaccagtcttctggtcaggaatctccgtcgggactgcaggccagaagacctccgtcgcccatttggacagtttggtcgagttaaagatatatatcttccaagagattattacactggggatccccgagggtttgggtttgtccagtattatgatcctgctgatgctgctgatgcgaagtactatatggatgggcaggtagttcttggtaggcaaataacagttgtttttgcagaagagaacagaaagaagcctcaagagatgagagctagggacagagtcaggggtcattcttatgatgacaggaggtattctcgctctaggtcgcctcgttattataggggccgctctccttcacgcagccaaagctactcgaggtctccacctcagaatccaagacacagacttagagagaggtcctactccggctcacctgtggacagcagatcaagaagtgggagcccttatgaggatggatatcgcaaatcatcacggagagagaggtctctttctgtcagcggatgaagcagttttacggtctagagctattgctgtgaatctgcgcatggtggcctacttgctatgtctttctgaaccatatatgttctgtctagattatcattcccagtaccagagaagtatcgtgagactgtttgctgtactttctagtcttgaggatacagaagggggtcaccgattctctcagtagatggactattgaccactagctacgccagttccactgctttgtgtatttacaggcagctttgcggtttgaataaaattgtttgcatcgtg

SEQ ID NO: 22602 - DNA, 1657 bp, Zea mays
  Clone ID: LIB3591-006-D10_FLI
gagagctcggagcgggagggtacgggccgtcggatgctcgcagctgccaccgccgcctacggctattttaaccccgcgctcctgccgacgccgcactcgcccccggcctcctcccgcctcccagatctcgctcgctcggcgccagttgcctcgcagtttggatcatctcatacctcggcgaagatgagggagatcctgcacatccagggagggcaatgtggcaaccagattggcgccaagttctgggaggtggtgtgcgatgaacatggcattgaccctaccgggcggtacactggcaattccgaccttcagttggagcgtgttaatgtctactacaatgaagcctccggaccggaccctatgggcagatcttccgccctgacaactttgtgtttgggcaatctggtgctggtaacaattgggctaagggccactacaccgagggtgctgagctcattgactctgttctggatgttgtgaggaaggaagctgagaactgtgactgcttgcaaggattccaagtatgccactcccttggtggtggtactggatctggtatgggtacgctgttgatctcaaagatcagggaagagtaccctgaccgcatgatgcttacattctcagttttcccctcaccgaaagtatctgataccgtggttgagccatacaatgccactctttctgtccaccagttggtcgagaatgctgatgagtgcatggttctcgataacgaagccctctatgacatctgcttcaggactcttaagctgaccacccctagctttggtgatctgaaccatttgatctctgcaaccatgagtggagtcacctgctgcctaaggttccctggtcagctgaactccgacctcaggaagctggcagtgaacctgatccccttcccccgtctccacttcttcatggtcggcttcgcgccgctgacgtcccgtggctcccagcagtaccgggccctcacagtccccgagctcacgcagcagatgtgggatgccaagaacatgatgtgtgccgctgaccctcgccatgggcgttacctcaccgcctcggccatgttccgcgggaagatgagcaccaaggaggttgacgagcagatgatcaacgtccagaacaagaactcgtcctacttcgtggagtggatccccaacaacgtcaagtccagcgtgtgcgacatcccgcccaggggcctgtccatggcgtccaccttcatcggcaactcgacctccatccaggagatgttccggagggtgagcgagcagttcactgccatgttcaggaggaaggctttcttgcactggtacacgggcgagggcatggacgagatggagttcaccgaggccgagagcaacatgaacgacctcgtgtcggagtaccagcagtaccaggacgcgactgccgacgaggaggagtacgaggacgaggaggaggtgcaggccgatgacatgtgaggggagggctgttatcgtgtgaagccttgtggtccctagggcaagcggacctcgatgagttcggtgttccctttcgtgttgttgccatctttctactgctagcgtacccaccctcgtggcccattccgtcgctgttgacgtatgtatttttcttgtgctatggaaccttgcttttggtacggtactatcctgctagt

SEQ ID NO: 22603 - DNA, 825 bp, Zea mays
  Clone ID: LIB3591-006-F7_FLI
ggaagaagagagagaagacgtctctctcctctcggcgtccccgttccccaacctctcgtctgctgcctgcctgcctgcctgcctgcaaaaaggagtttgtcatggcgtctaagcgcatcctcaaggagctgaaggacctgcagaaggacccccccacatcatgcagtgcaggtcctgctggtgaggacatgtttcattggcaagcaacaattatgggaccacctgacagtccctatgctggtggtgtttttttagtgaacattcatttcccgccagattaccccttcaaacctccaaaggtttctttcaagacaaaggtcttccatcctaatatcaacagcaatggaagtatatgccttgacattctcaaagagcagtggagccctgctttgacaatttctaaggtcctgctctccatctgctccctgctgaccgaccccaacccggacgaccctcttgtcccggagattgcccacatgtacaagacggaccggccgaagtacgagtcgacggcccgcagctggacgcagaagtacgcgatgggctgacgaacgctttcctgctcgtccacccgactggcgtctcaagaaagtcgttcctgggcgccattgttcccttggatttgttgttggtcgtcgtgtgtatccctgatccatctaggatcatcgtattgtattgtagtgtatgtatatcgtcggcctaccatcgttgccattcaccatagtgaggtggttggacatgcttcgcctatatgcacctgtgcttgccgtccttcgggtcggtgctctttggttaatgttcatcgaagacgttgatttcgttgcc

SEQ ID NO: 22604 - DNA, 802 bp, Zea mays
  Clone ID: LIB3591-008-D9_FLI
cgggggccaccgctgcggcgccgcccctcgaccctccgctgctccgcctgcgctggagaccatccatctggaagagatctctgatttacgggatggacggagccaagccagtggcggccgggaagcaggacctggaagaggcgctgctccgtatcgtgcagcagcaccaccaccagtccctctgccaacgacaacaaaccgagcgtgcaaagaaggacgccttgaagagcgcggtgcgggtcgccgatctcctcgtggacacggtcgacggcggggtgcgggagctcttcgtcaacgagaagcgcatcgagctcgaggcccgcgcgctgctcggtacgatcgcgcggtacaggaggcagactgatgagtggctggcggccaccagcgagatcaactcggccctgaagctgatcaactctttcatccctagcagattcatctctccggttccaaatacagttgaatttgctgactggattggtcgaacaaagcagaagaaaattcgtgtgacttcgaaatcggagacatcgagaactggatgaagatcatggacttcgattgtaaaagtatcaatgcagccatacgcaatattcaccagtcatgactctgcccgcgattacaatttcacgatttttaggaagtatccgtgtcattacgttctctgattagaattattgggtctggaaaccctctttttatggaaccgtgtctcctgattttcccatgctatgagtgtatgtacccttcaatttcaaagtgatgatatatataggatcaaaatacacctgtctgaggatgtgtt

SEQ ID NO: 22605 - DNA, 971 bp, Zea mays
  Clone ID: LIB3591-008-F4_FLI
acagtagtagtggcccatcttcgtcgcagcgccggcgctccatctttcgctccatcccttactcgcgctcggcacaccggctctcagggcggcggcgctcaggctcgggctctcaagcgacggcgtcaacggcttcccctcccgcctccggtcctccgcacaccggccggtgaccctgctgaacagtcttatggcggcgagcgcgggtgagagccagggggtggaaagactcctctcctatgctgaagatctcgtggctgtcctttgcgtcagcaccgactgcgacgacaatgcacaggtcggtgccggagtgcagaggctgctgtctgcctgtcgatccgagtctgacgatctcgagatgcagctcaaagagtatcaggaaaaaatacactcctgcaaagaaaagattgacaaagcaaaggctgaaaccattactgacgatgaactcaatgcactacaaagcaagatggaagaaaaactgcaggaagagaagcagcttcgccaagagttaagagtgttacatgatgagcttgatgacctagaaagccaaagactttctataaaagaaagaaaggacgctgtcaagaagaaaaagaaagacacacagaaagcagaacgtacgctttccatgtgtctgtcggttacaaatatcatcccaaatttggaagaccaggataaggtttcaggatatattgtcgaccagaacaggaagaagatagagaagtttgaattcgagaacaccacgccaccagttgagatatgcgacgagctctggaagaagatttagcgtgtttcagatcattcttgttgtaaggcggcggaaacctgtgcctgtagattgccgcggtgtggttgtcctcccaggatgcagtttgccatgttgtttgtatcgttagttcatgacgctgtactgttttgtaaggcggcggaaacctgtgtttgtatcgttagtttgccatgtcagattagct

SEQ ID NO: 22606 - DNA, 1807 bp, Zea mays
  Clone ID: LIB3591-008-H2_FLI
ccttcctcctcttctcttcctctcgatctcgtttctctccaggctcggacggcacagcgcgcggcggcgtggatcccgtctccctctcctcgatccagccctctgaaccacatgcatgtgatcatgcacgggctggtatggtaaagggcgcgccgtgctgctagactcgtatgggctcttggcagcaaggagagctgcagggagcagccatggatggtgcagcggcggcggcgactggaagcggcggcggccaccgcgtcgtgggctcgaggaacgaggagcacgggaagtacctgtcggagtcgagctgctgcccacggtgcggacacaagctcgacccgaagctggactggctggggctgccggcgggggtcaagttcgacccgacggatcaggagctgattgagcacctgcaggccaaggtctggcctgcctcggcagcggcgccgtcgcaccctctgatcgacgagttcatacccaccattgaaggggaggacggcatatgctacacccatcctgagaggctgccaggtttgacgaaggacggcctgagcaggcacttcttccaccggccatccaaggcttacactaccggcactcgcaagcgccgtaagatccagccgcccgtagccgatgcctcatcatcctccgccctgcccgcgcagcagcagcatcagcagcagcagcggagcgagacgcggtggcacaagaccggcaagacgcggccggtggtcgtcgccgggcggcagcgcgggtgcaagaagatcctggtgctctacacgaacttcggcaagaaccgcaagcccgacaagaccaactgggtgatgcaccagtaccacctcggcgacaaagaggaggagcgcgagggcgagctcgtcgtgtccaagatcttctaccagacgcagccgaggcagtgtggcgtcgcggcggagcctgccgccacagccgcctcctctgacacggtggaggaggctgctgacccgccggcgccggagggcttggtagtgccgccaccaccagatgtagccggtgccttccaaggcgccgctggcattgatgagttcagctttgcgcagttcaggagcagcttcgaggaggtggacgtcggagcatcagttcaggtttcgatgagggacgaggaggaaatgcatgcagcgcatctcaaccttcaccaggatcataatcttcaccgcaatcaatttggcaaccaagagcacaggcgccgcatggctgcaactgctgcagcattccacatcaacacaccagtagagcctatcaccacgatgatcacctcctcgccggtggttcacggttctgccatacttcaacatccagaggcatatggccatggcagctcgacttattgtcatcatcagcaccagatggaggaggatgagcagctacaccaacaacctcaaaattttgatgggcgacggtcgacttctgggctcgaagaggttattatgggatgtagttcgaggaggtccaaaagagcggaagcatctggcccaggtggaaacaaggagagcagaggatggcagtacccatccttctggccatctggcagccaacaggatcatcatgggtagaagagcagcaacacatccctgcctggcactgtatgtgccgcaccacctttgcatgaagccaaccttggagagggcaaccgaaagcagagagacacctgacatcatcattactagctaccatgataagatcatcatataaacctagctacactgtcgtacctaccatatctaggcttacaatactttagcgtgagtgcagtcgcttccaagaagcaaac

SEQ ID NO: 22607 - DNA, 711 bp, Zea mays
  Clone ID: LIB3591-009-F2_FLI
ctcgcgccgccaccaaatctccagcgagcgaagaggcggctccggcgagtgcgcggcaacgacgaaggcgtcggggccagtggcgagaggaagagcatgctgaagttcctgtccaaggtggtggtggagtactgccctctggacccgccgcctcccctccccagctccgtccacggacctcaagtcgcagccgactctcccgcctccgagggtcctcgtgacctacttcaccggagctgaagaggccatcgtctttgctgagggagctacggcgcagggcatccgggaccagatcgtcgcacggggccggctcatcgatacggagaagatgttccgcgacggcggggagaagtggcccgtcgtcatccccgaggaggagcttggcatgtcgttccctggcatcaagccaaagaaagccgaggataagccccaggccgagtgaccaagcaggagttttctactttatatatcatggttaactatggacatttgtacactcacagatgctggaagaaaattttctcttgccgctaccacttagaatgtgtgttaccagtttgaaagccatgtctggtccaatttttgttttcccgcattgacatatgcttccagttggtgctcttaactcgtacaccattttggctattgtcagcgtaatattctgtggacaaatttgactcagaataagaaacttcacaatatcgcagtctt

SEQ ID NO: 22608 - DNA, 705 bp, Zea mays
  Clone ID: LIB3591-009-F5_FLI
gcgcgactaaaatttacatcacctcgaacggcggcggcggcggcggcggcggtttctcatctgcggcgcctcttcgatgctgtttgctttgccaaggctttgatcccagatggggatctcgtcgggtgcagacttccaccagcagcccaccccacaggccgtgctgccgccacgcccccatggccgtgcgccgacgctgcagacgtctctctccctggctggttccgcctcgccggagcaggtcgggtcgcctccggacacacaggagccgctgtcgaactccgacgcggggcatgactccgccacagagagcgccagctcacgggagacttggcctggggagcccggcaagagtggtggcggcgacgctcctcccgtggcatcagcaccgataactgcactgaggatagctgataataaggagaaggaggtggttggtaatggcgtcgccgagctgcaggcctttcggagtaggatcccgagtgcaggccggatgactctcagggaggttgcttgggacagggtgggctcggctgggcgggaactgccactccatcggcctgctggttgttactacttgttattagacgtagtagttgttaactagcagtgtagtaagtttacatgatatatatactgcatttttttggggggaacaaaatgttgattacctgcgcagcattgtcctaggtgtgtttagtagcg

SEQ ID NO: 22609 - DNA, 689 bp, Zea mays
  Clone ID: LIB3591-009-H1_FLI
ctaccatccaggtcctgccgttttccatgacaggatgagagggtggaaatgctgtgatgttcatgtcaaggagtttgacgagtttatggagatacctccgtgcacaaagggttggcataatgctgatgcggtgtgaattcacgccatgcttaaggctgttttcatgttgtatcgtcacctgccatgtaaacaccatttctgcagtttattgaggatttcatttggaagtgtgacaagagctttgaggatgggctgcctaagctttgcgcatggtggttgtctggaaatcttacgtgattctccttgcacatttggtgtctggattcaaattggggttttgtctgtttgaagccgaaggatgtcaatattttaaccctgtcaaagtcagaggagttagcgcatgctgtggagcagtagaggtgccgtgtttcttgtgtgtgttccatggctgctggagaagtcctgtccgtgtactggtttgctcggtttgagcaggcaaaagcctggaccatgcatcactagtttgttctacaatataatgaaaacgtagctgcactcttggaaagagaaaagcacaatctcttgatttattgaatgctgttttggcgtgcatacactagcattatcattatgtcatggatacatggacatgggattcaaatataagtagtactggtagtgctttggac

SEQ ID NO: 22610 - DNA, 1612 bp, Zea mays
  Clone ID: LIB3591-009-H8_FLI
cttttgctcggaacgcacacaccgcccgtccccgatctccgatcccctcgtcgatccaaagatgcagatcttcgtcaagaccctcactggaaagactatcaccctcgaggtggagtcttctgacaccattgacaacgtcaaggccaagatccaggacaaggagggcatccccccggaccagcagcggctcatctttgctggcaagcagctcgaggacgggcgcacacttgccgactacaacatccagaaggagagcaccctccaccttgttctccgcctcaggggaggcatgcagatcttcgtcaagaccctcactggaaagactatcaccctcgaggtggagtcttctgacaccatcgacaacgtcaaggccaagatccaggacaaggagggcatccctccagaccagcagcggctcatttttgccggcaagcagctcgaggacgggcgcacgctggccgactacaacattcagaaggagagcaccctccacttggtgctgcgtctcaggggcggcatgcagatcttcgtgaagactctgaccggcaagactatcacccttgaggtcgagtcttctgataccattgataatgtcaaggccaagatccaggacaaggagggcatccctccggaccagcagcggctcatttttgccggcaagcagctcgaggacgggcgcacgctggccgattacaacattcagaaggagagcaccctccacttggtgctgcgtctcaggggtggcatgcagatcttcgtgaagacacttactggcaagacgatcacccttgaggtggagtcctcagacaccattgacaacgtcaaggccaagatccaggacaaggagggcattccaccggaccagcagcggctgatcttcgccggcaagcagctggaggatggtcgcaccttggctgactacaacatccagaaggagagcaccctccacctggtgctccgcctcaggggtggtatgcagatttttgtgaagacattgactggcaagaccatcaccttggaggtggagtcgtctgacacaatcgataatgtcaaagccaagatccaggacaaggagggcattccaccggaccagcagcgcctgatctttgctggcaagcagctggaggatggccgtaccctcgccgactacaacatccagaaggagagcaccctccacctggtgctccgcttgcgaggtggtatgcagatctttgtgaagaccttgactggcaagaccataaccctggaggttgagagctccgacaccatcgacaacgtgaaggcaaagatccaggacaaagagggcatccccccagaccagcagcgtctgatcttcgctggcaagcagctggaggatggtcgcaccctagcagactacaacatccagaaggagagcactctccacctggtgctccgcctccgtggtggtcagtaagccatggttcatttaagctgctgctgtacctgggtatctgcgtcgtcgtcgtctaataaacatctgtggtttgtgtgtcatgaatcgtggttgtggcttcgttggtttaatggacctgttgtgtcctctgtgttgtacccaaaactcttctgcagcagtatggcttgaatccttgtg

SEQ ID NO: 22611 - DNA, 1568 bp, Zea mays
  Clone ID: LIB3591-010-B4_FLI
tccgtctcctccattgcgaagccgcgagctcctgcgtcaaccagatcacacgaaccaaaccagcgcctcctcccccgagtctcaccgccagcgcccatggcgacacgctactggatcgtgtctctgcccgtgcagtcacctggcgccatcgcaagctccctgtggtctcgcctccaggactccatctcccgccactccttcgacactccgctctaccgcttcaacgtcccggatctccgcgtcggcaccctcgactcgcttctcgccctcagcgacgacctcgtcaagtccaatgttttcgtggagggcgtgtcacacaagatccggaggcagatcgaggacctcgagcgcgccggaggggtcgagagtgggaccctcaccgtcgatggcgttcctgtcgacacctacctcaccaggttcgtgtgggatgagggcaaataccccacaatgtctccgctcaaggagattgttggcagcatccagtcacaggttgccaagattgaggatgatatgaaggtgcgagcagcggaatataataatgtaaggagccagcttagtgcaatcaacagaaagcaaagtgggagcttagcggttcgtgatctttccaatctggtaaaaccggaggatatgatcacctcggaacatcttgtgacacttcttgcaatcgttcccaagtactcccaaaaagactggctgtcaagctatgagacacttgatacatttgtggtacctaggtcatctaaaaagctctatgaagacaacgaatatgctctctacactgtgacactatttgctaaggttgttgacaactttaaggtccgtgctcgcgagaagggttttcagatccgtgatttcgagtacagtcctgaagcacaggaaagccggatgcaggagatggagaagctactgcgagaccaagaagctatgaggaccactcttcttcagtggtgttatgccagctacagcgaggtattcagttcctggatgcacttttgtgctgtgcgtgtctttgtggagagcattcttagatatggtctgccgccatcattcctgtctgctgttcttgcaccatctacaaagagcgagaagaaagtaaggagcatcttagacgagctctctggcgatgcccatagcctgtattggaaatccgaagacgatgtaggcgttgctggtctgggaggcgaaaccgaggcgcacccttacgtctccttcaccataaattttgtctgagacaaagtatggttcctagaccgtctgtggcctaggcaatataatacttggaagcagctattggaacgcaagcgcggaacgagcatgtatattactctgttgatttatcggttcatgtggtcctgtagttcatatcacagagagatcagccgacggatgctgtaatttctgaggaacctatggaattcctgtagttcatgtggtcctgtaatttctgaggactacctacctatttccctgcagcactgcaccttgtaaaaagacttaacccgtgtctgtagcagctggctactggatttattacatctacaataaaagtcatttttaatggttgtttc

SEQ ID NO: 22612 - DNA, 737 bp, Zea mays
  Clone ID: LIB3591-010-C4_FLI
tttgtaggaatctgtaacagggacagaagtgatcgctcactggatatatcctcctcggttgtatcgttgctcctgttgcaccaaacaagcagatcagtaagatggtggaagaggccgcgaggctctctaagctgttctgtgatagaaacctaccaatatttgcattcctggatacccattatccagataagccggaaccaccatatccccctcattgtattattggtactggggaggaggactttgttccagatctggagtggttggaaaaggagccaaatgtgactataaagaggaaaagttgtattgatgggtatatcagctgcatagagaaggacgggtctagtgtttttgctgattggattggaaaatatcagataaaaactgtcttggtgctcgggatatgcacggacatctgtgttttggattttgcaagctcaactctggctgctcgaaatattgaccgagtgcctccattacaggatgtcgtgatttattcaggggggtgtgctacatatgaccttcctgttgagattgctactaatatcaaaggagctcttgcccatccacaggatctgatgcatcatattggactctatatggccaaaggaaggggtgcaaagatagttgacagggtggttattgaaccttgaataaaaaaactttccctcgtcacagtgatgttgctagggtttccttccattgtaacaaccagatatatatatgcatcttggcag

SEQ ID NO: 22613 - DNA, 535 bp, Zea mays
  Clone ID: LIB3591-011-A10_FLI
cttcacttcacttcaactccatcgcccgttgcagcggcggcggcggcaatcatatcacccagacgcggacgccatagtagattagattgatctctccgtggggaggaagaggagcaagagccatgtccagccccacgcacgtccgcaaggccatccgcttcgcctccctgcgggcaaagatcgcgcagcagggtaagacaggcctggcgctgcgcctgctcctcgccgccgcactcgccggcttcctcctcgtgttcgccgcgcgcaccctggtcacgccgtcccctgccccgacctcgtcgtcccaggcgcaggaatatcaccaggacgccgcgccggagtgcggcaaggggaacgcgggcctgccgctggcggtggcggaggcgctggtgcactacaccacctcgaacgtgacgccgcagcagaccgcggacgagatcggggtgtcgctgcgcgtgctgcagcgccgcgcgccctgcaacttcctcgtcttcgggctgggcctcgacagccctatgtgggcggcgctgaacca

SEQ ID NO: 22614 - DNA, 1713 bp, Zea mays
  Clone ID: LIB3591-011-E3_FLI
caaaaaaagcaacaaaaaaaaaacaaagccctcgccccaatccaatcgatccccaatccgttcacgcactccccaatctcgccgtcgccggcctcctctccggcctccgccgctgcctctctccacaataataatccactcctcgtcgcctcgcgtccgtctccttgaccaacgtgctccccccttcttctacctgtaattcccatcctgcttgtgcggcaagggcctctcccgcacgatggggaagcacgagttcctgacgccgaaggcgatcgcaaaccggatcaaggcgaaggggctgcagaagctgcggtggtactgtcagatgtgtcagaagcagtgccgcgacgagaacgggttcaagtgccactgcatgtcggagtcgcaccagaggcagatgcaggtgttcggcatggcccccgaccgcgtcgtcgagggcttctccgaggagttcctcgagtccttcctctccctcatccgccgcgcgcaccgccactcccgcgtcgccgccaccgtcgtctacaacgagtacatcgccgaccggcaccacgtccacatgaactccacgcggtgggccacgctcaccgagttcgtcaagttcctggggcgcgaggggtactgtaaggtcgaggacacgcccaaggggtggttcatgacctacatcgaccgtgactcggagcaggccgtcaaggaacgcctcaagcgcaagaggatcaagtcagacatggctgacgacgagcgccaggagcgcatgattgcccgccagattgagcgtgcgcacaagtccttagctaaacccaatggtggtggtgctgccgagggcgagcctgagtctggcagtgaaggagagtattcaggttcggatgatgatgagcaggagccggaggatgactcgaaagaggcagataaggcaacaggtaagattgcgattgcgcttcagaaggctgtgccggggcccaaggttaatccttttgacgataagccgaagatgaaatttggttttgatgaggaggatggctcaggcacccgagaccaggagaagaatgagttgaccaagaagatgggaaaggatgtgaaggcagcagaggcaaagaggtcagcattggacgagctgatgaaggaggaggagaaggccaaggagaggagcaataggaaggactactggctgtgccctgggattgtggtcaaagtgatgagcaagtcattggcagagaaggggtactacaagcagaaaggggtggtgaagaaagttattgataaatatgttggggagattgagatgttggagagcaagcatgttctcagggtcgaccaagatgagcttgagaccgtgatccctcagattggtggacttgtgcggattgtcaatggggcttatcgggggtcaaatgccaggttgctttcagtggacactgagaaattctgtgcaaaagtgcaggttgagaaaggcctctatgatgggaaggttctcagggctgtcgaatacgaggacatttgcaagatatcctcatgatatacaacgtgattcattccattttcctggatcatcactgaagcaaacaagctatacgatctagtgtactagctctgtcgattagattcttaatagtttctgtgcttgttattgtttgtgctggaatatcttctgttgaagcagtgtttgatatcttgatgtttctagttcgcggtaactgctgaaaggctatctgtgag

SEQ ID NO: 22615 - DNA, 1420 bp, Zea mays
  Clone ID: LIB3591-011-F2_FLI
catcccgatccaccctcctcagtcctcaccgatgcggcatcatggacgccgccacccgtcgcgccgccagtgagcccaacggctcctccctccccgacgcctccctcctcctccacacgttccgacgacacctgccagcgccgacgacgagatctgctagcgccgacgtcgtctccagatccaccgttctgagtatctagccatcgagaatggacatttcggagggctctattgctgttcgtggtaggggggaaaacaaaaggaagtggatccctgttgaagatgatgaactgatcaaagcattggttgatgtttctttggatccgaggtggaggagtgatgggagtttcaagaacggttacacttcagtacttgaagctcgcctcgctgaaaagctacccgattcaagaatttctgcaactcctcatatcgattcaaggttaagatacttcaagacaaagtattctgctttggagcagatgttgaacaagagtgggttcacatgggatccgaccaagaagatgattcagtgcgagaaacaacaatatgagacacattgcaagaataatccagatgcaaaagggttgtatggagtctcctttccttactatgatgaactctcaatggtatattccaaggacatggccacaggtgaaggtgcggaagacatgacagatgctgttcaaaacttggaagaagagttagttcgtgtaaatgctaatgatgaatagaatggagaggatatgacatctgtagagacaccaaggcgttatgttgactcaacatcatctagctccaagaagcggaagaaagagtggaaaggaatgaagacttcatcaagtgacccgcttcttgatgtgttcaatgaagtgagtggtgatctcaaggttgccactatgtcaattggaaaaatggcgcaagctatggatcgtgaggcatccaaccaagagaaggcaagagatgaggatccacaacaaaagctaagagagaaggcgatcaatgaggtctggagacttgaatttactggctcagaagttatcaaagcagctggtgtgtttgtcaggatgccagatcaaatgggtatgttgtttgcacttccagaaccactgaggagggaatacattgtcgacatgctacgtggtaactagaattttgtttgtagaaatgtacatggctagttttgatcttggtttaattcgctaattatttcatttattctagatgaagcagcaaggagagagagagagaggtcaaagtgaaggtgctggtctagatgttgaatgatggagctttggaagttgctgttggtttggttggtctcaatctgtttacctttagtgttcttcatatgttgctgttgaatgacggtgaatgatgataaaaactgaatttttatgatgttgaatgttgttgaatgttc

SEQ ID NO: 22616 - DNA, 831 bp, Zea mays
  Clone ID: LIB3591-011-H12_FLI
aacctccaaggctccaaccctagccgcgatccgacaacgcctccatccctagccgactgctgcaagcttcagagctcaagagtcagggcgccatggcgacagagacggagaccttcgcctttcaggctgagatcaaccagctgctctcactcatcatcaacaccttctattccaacaaggagatcttcctccgggagctcatttccaactcttccgatgcgttggacaaaatcaggttcgagagcctcactgacaagagcaagctcgatgcgcagccggagctgttcatccacattgtaccagacaaggcttcgaacacgctctccatcatcgacagcggcatcggcatgaccaagtccgaccttgtcaacaacctcggtaccatcgccaggtccgggaccaaggagttcatggaagcccttgctgctggcgctgatgtgtctatgattgggcagttcggtgtcggtttctactctgcctacctcgtcgccgagagggtcgtcgtgaccaccaagcataacgatgacgagcagtacgtgtgggaatcccaggcgggcgggtcgttcactgttactcgtgacacgtctggggagcagcttggcaggggtactaagattacacttttcctcaaggaagatcagttagaataccttgaggagcgtcgcctcaaggatttggtcaagaagcactctgagttcatcagctaccccatctccctgtggaccgaaaagacaacggagaaggagatttctgatgatgaagatgaggaagagaagaaagacgctgaggagggaaaggttgaggatgttgacgaggagaaggaagagaaag

SEQ ID NO: 22617 - DNA, 745 bp, Zea mays
  Clone ID: LIB3591-012-C7_FLI
cagaggtgggctggcttctcctccccctcttaccaagtcctcctcgggttagggttccttagggttttgtggaggggcgatggcggcggctgatgtggagtaccgttgcttcgtcggcgggcttgcctgggccaccagcaacgagtcgctggagaatgccttcgcctcctacggcgagatcctcgactccaaggtcatcaccgaccgggagacggggaggtcccgcggcttcggcttcgttaccttctcctccgagaactccatgctcgacgctatcgagaacatgaacggcaaggagctcgacggccgtaacatcaccgttaaccaggcccagtcccgtggcggtggcggtggcggcggtggctacggcggcggtcgcggcggcggcggcggttatggtggcgggcgccgtgacggcggttatggcggcggtggcggctacggcggtcggcgcgaaggtggcggcggcggctacggaggcggtggcggctacggcggtcggcgcgagggtggcggtggcggctacggcggcggtggcggcggcggctggagggactgatgtgtgggcccatcctggcttcggccgagttatcttatctatctatagtatcgtgttaccgttcgcttctgtcaccgtgttagtgtccgttctacctttggattaggtgttggtaccctgttgttcgctttggttgctcccgctatgaaacgagacgagagaagaatgagcaaggtttttgttcgc

SEQ ID NO: 22618 - DNA, 2053 bp, Zea mays
  Clone ID: LIB3591-013-A7_FLI
atttgggtcctgacgagtgggcactggccacttagctgcggggcgattctttttcaaattttttgggtgccaaatatttgccctccagtgctgtccacggctcagcctcacacacgcgcgagagcaaattgcagagctgctcgtcgccggcgatcgccgcagggttcgtccgagaggggagaggctctctgtatcggggcatggtgatcctggaccgcactccggccgcggcgcagggggccgcctgtagcccgctcccgaagtcgcctaggttttcgtgggaggtggcctcgccgccctcggaccccatcctcccgtacctcaggtctattagcagggccatggatgagctcggaacagggcctcagtatgacacgacagccttagacaggctcaagcattacttgactgaatgcattgcaaaatatggggatgactaccaatactccactgatccacggttgctcaagatttggatcctctatgcagatgcaattgaggacttccccagtgtttacaaccagctggaggagaaaggaatgtttcaggagcatgcactattgtatgactcatatgcacaatatctaattgctcatgggaaattggttgaggctgataaggtgtatggaatcggtatttctaggaaagcagagccccttgataatttgaagaagatgcacttgacatttctaaaacatctggagaatattttagaagaagcagatgcggaagaacagtgcaaatcatcaaacatacagaagaatgaaccttctgtgatagatccatggtctccttctactaggaatactttactggagaaaattaatggtggcttgaggaagttttctggctattataagagtaacaaggtgtactgtggaaaggtgcctttgacttcttcgttgaatgttttaagaaacaagggcatcaagttaggtggtagaaagtatcaaatcaaaggatctactggcactggtgcttttgctaaagtatacaaagccactgttgacagtaatgcggaagaaatggttgctttgaagattcagaatccctcatttactttggaattttacatgtattgccaacttgatctgcgtatatctgatgtcgagagaccaagctttggctacgcacatgaaatgcatatcttctctgatgtcagtgtgttagtttgtgattacctgccgtatggaactctcctggatgtcataaattctcacttagtagtcggtcgatacatggatgaagttctatgcatgtattataccatagagatgctgaacatgctggaaacactgcatagtgttggcataatccatggtgatttcaaacctgacaacatccttgtttgctacccgagtggagagatcacagaggacaatttccgaagtgaaaaacgagtagagaggaatcaggggctctgccttgttgattggggccgtggcattgatctggctcttttcccctcctgcacggagttccacggggactgtggaacctcaggattcagatgcatcgagatgcaagaacatagaaactggacttatcaggtcgacacatacggcctctgcgtcgttgtgcacatgatgctacacgggtcaggcatgaacgtcaagaaggttcccaggattggtggaggctacgaatggcaacctaaacagccgtttaaaaggtactggaacgttgatctgtggcagaagctcttctcgacgctgctgaacccgccctcgaacgacagcgacgtggccgcgctccagagcctgcgagcgtcattccggcagtacatgtgcagcaaccggcagctggtcggcaagctgaaccagctgctggcgaaacaaaaggcctcgctgtgctcgtcctaggctgcgtgacaaagccgaaacgcggctggtgcctgtgccccccatgtaatgtaactccggctaggctaatacgaactcacatgtatccttaagtaatttactagctagttacccgtgatttggtagggttgttatatatcattaaaataagtattaagatatttatttaaatataattattgtttattttt

SEQ ID NO: 22619 - DNA, 1153 bp, Zea mays
  Clone ID: LIB3591-013-B8_FLI
cgtctccgtctcctcgctggctcgctatgctggccgcctccaccgcgcctctccgtcactcccccaacgccatgagtctgtaacggcacacgtaccatgggcaggaccagaggcaacaggggcgtgggcggcgcgaagtcgttcccgtcgccggcgtcgtcctcggcctcgtcgtcggagttcgagttcacggtcacgctgtcgccggcgtccaagcagcggtcggcggagcagctgtgcccggccgacgagctcttctacaagggccagctcctgccgctgcagctatcgccgcgcatctccatggtgcgcacgctgctgctgtcctcggcgtccacgtcgtccgcctccgcgtccgactccaccaactcctcctcccgcgactccaacggcagcacgtcgtcgtccttctccgccgactgcggcgcgctcctgggcccggactcggcggcctcgtcgtctcgccccagctccgccaccgaggacgaccgccacctgcatccgccgtcggccgccgcggggctgctgccacccgccaagcgcaccgggaagcagtacctctcgtccttcgccacgcgcttctcctcggtcttccaccgcggcggcgccggcgctccggccgcgaagaagcagccgtccaagtcgctcgccaaggaggtgatcaagaagtacgctaagaaggtgaaaccgctctacgaaaggctctcccagatccccaacaagaaccagaacaacgtcgtcaacggcaacagccaaccgcagcagaggttcaagaagcccttcaccttctccatccgcaagaaaaagggcgacgccgtcgcggcagtggtggaggcggcagcagaggttggcggcaacaagtacgcgcactccagctccttctccggaaacctctggttcccgcgccagaagcgggccacggcgagctgcccgtcatcgatgcagtcgtcgcctagccactcgggtctgctcacctttggcggggctggcggcgtgggcttccccgacgtgccggccgttgccagcggcattggcgtcggtccggtgtcgttgtccacggcatcgtccatggaggagctccagagcgctatcgagggcgccattgcgcactgcaagaacacgatgggcggaaccgtgtcggtcaaggcggcgg

SEQ ID NO: 22620 - DNA, 1182 bp, Zea mays
  Clone ID: LIB3591-013-C5_FLI
agtccctgggactgctcttagagatttcggcaagagggcgggcgattgggtttcgggaagagggcaccggtaatgtcaacgacgacggaggcggcaaagagcggctcagccgcaccggtgcggtgccagcggatcggctgcgacgccgtattcaccgacgatgacaaccgcgagggctcctgccaataccacccctccgcacctatgtttcatgacggcatgaaagaatggagctgctgcaagcaaagaagccatgatttcagcttatttttgcagatacctggatgcacaacaggaaagcatacaaccgaaaaaccaatcacaaaagctgtttcatctaaccgtacaaaggcaacaccgatccagtcctctaagcagggtgtgggagttgatgtgtgtgcaaggtgtcgtcaaggtttcttttgctccgatcatggatcacagcccaagccgcaaaagccagctgctaccgacgattcaaacaaggaacctgttgagaaatccgctgttccaccgcccaagaaaaggatcgatgtaaatgagctgaggacatgtaaaaataaaggatgtggtaaatcctacaaggagaaggataaccatgattctgcatgtgactaccatccaggtcctgccgttttccatgacaggatgagagggtggaaatgctgtgatgttcatgtcaaggagtttgacgagtttatggagatacctccgtgcacaaagggttggcataatgctgatgcggtgtgaattcacgccatgcttaaggctgttttcatgttgtatcgtcacctgccatgtaaacaccatttctgcagtttattgaggatttcatttggaagtgtgacaagagctttgaggatgggctgcctaagctttgcgcatggtggttgtctggaaatcttacgtgattctccttgcacatttggtgtctggattcaaattggggttttgtctgtttgaagccgaaggatgtcaatattttaaccctgtcaaagtcagaggagttagcgcatgctgtggagcagtagaggtgccgtgtttcttgtgtgtgttccatggctgctggagaagtcctgtccgtgtactggtttgctcggtttgagcaggcaaaagcctggaccatgcatcactagtttgttctacaatataatgaaaacgtagctgcactcttggaaagag

SEQ ID NO: 22621 - DNA, 838 bp, Zea mays
  Clone ID: LIB3591-013-G3_FLI
ctctccccaccgcatcttctatcttcggttccttgctctgcaccgccgcctgctcatccatatcccatggtgcccagccgagcagcccatggaggcttcccacgcccagccctctctactgatggccgccgtccctactccatcttacggcactgctctctgcctctcccatggacgagctcgccctgccccccatctccttcaccacgctgctccctgcctccttgttggtcggccataccctctgctcctccccaccgtccgcagccccgacgtcgtcgccgtgtttagtcatggtgattcctaacccctttattttatttcactaattcttctaatgcgagcagatttttattgatgttgatatgcggttatgtgtatttgtgtgcgagtgtggcggagagaaagatctcaggtttttggatggagaagaagcgaggccagtgcgacgctcgctatgtgctcgacgtacgctagctgatcacgtgaggcggagttcaagagccgagttgatctcaagatgatgaaatgatgaactactccgacaaacgatgttgacgaatcgacctaatgagagatggacctatcaagtgccgagatgaatatggtcaccaagtggtcatcaattaacaacactaacgtagtgttatcccaggttatatttttgttctgttgtggatggtgctaagtgccggtgggctcagccttcttatataagtatatcccatctttagcttctttattgaggactgtcacttaagctagcatgtattttaaaacttataaatgttttatacattcaaattgtaatatttttgaatcaaattctcttgtaatc

SEQ ID NO: 22622 - DNA, 811 bp, Zea mays
  Clone ID: LIB3591-066-B11_FLI
ccaaacgagatacaaaatcagcatcagtcaacatcaaagagacctatcgaacatctagaaaatcaaccctttttacaccttttccatcaagcagaagatgatagcatgcagcaagttcaacattgtgctcagttcccacccattcatcaatgtacgagcactccacatctatcagataacccccaacaccagcaacaggcttatttatctcaacatatatcttgcttgcaagttgggcaaggtcatcttggaggacgcatgcatattattccaaccagccctgcgaagttctgtgatgagtgtggctccccatatttgagggcgacatcgaagttctgctcagagtgtggtaccaagaggctaggaatgtgaggtgacttgatcaatgtgtatatgaatctgatgatgtagcaattgtagtcttatgtttgtaaaagggtctctagcgtaatggttaaggcagcccggcgaagttctgtgatgagtgtggctccccatatttgagggcaacatcaaagttctgctcagagtgaggtaccaagaggctaggaatgcgcggtgacttgatcaatgtgtatatgaatctgatgatgtagcaattgtagtcttatttgtaaaagggttatttgtaaaagggtctctagcgtaatggttaagttttcttttaagttttctgagtagcaactctggttgggccgttttagagtgggcggtgatatcttactagtgatgggggccagggtttggaaattttctcgagaccatgttttggtctcctttttaatataatactggaatgacggtcttttgg

SEQ ID NO: 22623 - DNA, 1309 bp, Zea mays
  Clone ID: LIB3591-066-B8_FLI
ctccctccgagtccagggggcaggggcaccattaccgagtagtttaattagtgctagttgtattaccattgttagtgacttaattaccctcacgcgaagcaccttacctctgctagtcctcctacgtctcttctcttcgcttaatcttggtcggtgatttgattcttcacttcttgcgcgcattgcagagggtgctcggtctgcagctatcttaggttaaccagtcgtgtgtggtctatcgatttcgatatagtactactgctctgttataatcagcgggaaggaggaagatgacggtgacgccatggatcacggtgagcgacgggcggctgacggtgcgcggccgtacggtgctcaccggcgtgccggacaacgtgtcggcggcgcacgcggccggggcggggctcgtcgacggggccttcgtcggcgcccacgccggcgaggccaagagccaccacgtcttcaccttcggcacgctccgggactgccggttcctgtgcctgttccggttcgagctgcagatctgcatcgagagcggggacaaggcggtgcagacggaccaggccgcgcacatggtgtacctccacgccggcgacaaccccttcgacaccgtcaccgccgccgtcaaggcggtggagaagcacctgcagacgttccaccaccgcgacaagaagaagctgccgtcgttcctcgactggttcggctggtgcacctgggacgccttctacaccgacgtcaccgccgacggcgtcaaacacggccttcagagcctgtccaagggcggcgcgccgccgcggttcctcatcatcgacgacggctggcagcagatcgcctccgagaacaagcccgaccccaacgtcgccgtccaggagggcgcgcaattcgccagccggctgaccgggatcaaggagaacaccaagttccagaccaagcccgacggcgacggcgacggcgagcaggcgccgggcgggctgaagcgactggtggccgagaccaaggacgcgcacggcgtgaagcaggtgtacgtgtggcacgccatggccgggtactggggcggcgtgacgccgacggcggggacggcgatggagcgctacgagccggcgctggcgtaccccgtgcagtccccgggcgtgacgggcaaccagccggacatcgtcatggactcgctgtccgtcctggggctgggcctggtgcacccgcgccgggtgcgggacttctacggcgagctccacgcgtacctcgcctcctgcggcgtcgacggcgtcaaggtggacgtgcagaacatcatcgagacgctgggcgccggcca

SEQ ID NO: 22624 - DNA, 909 bp, Zea mays
  Clone ID: LIB3591-066-D11_FLI
aggagcacaccaccactccacagtgcacttcactctctacagcaacagaaaagtgagcagcagacagcagcagctgctgccatggaggcgtggagatctctcctcgcgagcttcgtgctcgccgtgctggccgcgcaggccttggtggccgtggtcgagtccaggaccggtcccgtggagcaggcgagcgaaggtgacgacgtgaagaagccggactgcgtgccggggatggacccgcgctcgttcccggggaccggcggcggccacggcatcacgcccgtgacgccatcgcacggaggctccagctccccgacgccgtcccacggcggcggcggcgggtacgttccaacgccgtcgcatggcgggacgctgcctttcccgtcccacggcggctccggctccggctcctctccgacgtcgccctccaccggcggcggcgcgtacggtgggtctccgtccacccccggcggtggcgcgtacggtgggtctcctccgtccacccccagcggcggcggcgcgtatggtgggtctccgtctactcccagcggtggcggcgcctacggaggcgggtccccctcgcctgctcatggtgctggtggcgcctatgggagctctccgacgcccgcgtacggcgattcccccttgcacggcggcatcgggacctcgtcaccgacgacatttgtccccatggacccccacagcttcggcgcggcggcgggcagcgtgggcggggctgacgtgatgagcatccaggacgcggtgggcaacacgcgggcggacggcacgggcgcgctgctgcgcgagggcgccgccgcgctgctcaactccatgacccgcgccgggttcccctacaccacggagcaggtccgcgacgctttcgcggcggcggcggcggccgggtccgacggc

SEQ ID NO: 22625 - DNA, 739 bp, Zea mays
  Clone ID: LIB3591-066-H1_FLI
cctctcccctcgcctcctcgtcggagaggaatcgcaaagagggccgtctcatccgagttaaggaagccatggagcacaaggaggctgggtgccaggcccccgagggacccatcctctgcatcaataactgtggcttcttcggcagcgcggcgaccatgaacatgtgctccaaaggggggaaggtagggccgaaccggtgcagcgcctgcaggaagagggttggacttacgggattcaactgccggtgtgggaacttgtactgcgcactccaccgctactccgacaagcacgactgcaagttcgactaccggactgctgccagggacgccattgccaaggctaatccggtggtgaaggcagacaagctcgacaagatctagggggggttccctacggttgggtatcaggaagattgtaaaccgcggtaactcgtcatgcggaactgctgccttgccccccgcgcctttctcttccatgtttgctgctacaatcttgttgttgggcattgcagtgcacggtgcacacttgtgtagcccgcctcgagaattcctgcctctgcatctggtcagttctaaaatgatttgcatgttggctatgttgtgtaagctctatttatggtggtctcgctgagacgggtatttggcttcgcagttatctagctatgtgatgtactgttgtcttgtccctgggtattatatggtacactgcagccagtaatagtaatctgcaactgtgcgtt

SEQ ID NO: 22626 - DNA, 1901 bp, Zea mays
  Clone ID: LIB3591-067-A5_FLI
gaaaatggctccgcttctcgctgctgccatgaaccacgctgcagcccatcctggccttaggagccacctagtaggacccaacaatgagagtttctcacggcaccacctgccgtcttcttctccacagagcagcaagcgaaggtgtaaccttagctttactacacgatctgcaagagtaggcagccaaaatggagtccaaatgttgagcccctcggaaatcccacaaagggactggttcccctctgacttcaccttcggtgccgccacttcagcgtaccaaattgaaggtgcttggaatgaagatggaaagggggaaagcaactgggatcacttctgccacaatcatccggaaaggatactggacgggagcaattcagacattggagcgaattcgtaccatatgtacaaaacggacgtcagattgctcaaggaaatgggcatggacgcatataggttctctatctcttggcccagaatactgccgaagggaaccaaagaaggaggtattaacccggatggcatcaagtactacagaaacctcatcaacttgttgctggaaaacggcatagagccatatgtaacaattttccactgggatgtacctcaagcactagaagagaagtacggcggcttcctagataagagtcataagagcattgtagaagattacacctacttcgctaaggtgtgctttgataacttcggcgacaaggtgaagaattggttgacctttaatgagccccagacatttacttccttttcctacggaactggggtctttgccccagggcggtgctcacctggactagactgtgcctacccaactgggaattcactcgtcgagccttacactgctggccataacattctcctagcccacgctgaggctgttgatctttacaacaagcattacaagcgcgacgacacccgcatagggcttgcgtttgacgtaatgggtcgtgtgccatacggaacatcgtttctggataaacaggccgaagaaaggtcatgggacatcaacctaggatggttcttagagccagtggttcgtggtgactaccccttctccatgagatcattggctagggaacgactacccttcttcaaggacgagcagaaggagaagctcgccggttcctataacatgttggggttaaactactacacctcacggttctccaaaaacatcgacatctcaccaaactactcacctgtgctcaacactgacgacgcctacgccagtcaagaagttaacgggcctgacgggaagcccattggtcctcctatgggaaatccatggatctacatgtaccctgagggcttgaaggatctccttatgataatgaagaacaaatacggaaacccacctatctacatcaccgagaacggaatcggggatgttgataccaaagagacacctctacccatggaggctgccttaaatgactacaaaaggctagattacatccagcgccacatcgctactcttaaggaatcaatagacttgggatcaaatgtgcaaggctacttcgcttggtctctgctggacaactttgaatggtttgccggcttcaccgaacgttatggcattgtctacgtcgaccgcaacaataactgcacgcgctacatgaaggagtctgccaagtggttgaaagagttcaacaccgcgaaaaagcccagcaagaagattcttacgccagcttaaaaatcgggggcctcatgatgtgggtgcagcccataaaaactgtgtggtttggaaccgaagattttctctttttttttctgccacgagaggttctctggaggcatactctccagcaccgtggctaataacgcgttgttccaattcagtctggccttgtcatgcatgcaataaataaagtgatgggtttccctgtttc

SEQ ID NO: 22627 - DNA, 1771 bp, Zea mays
  Clone ID: LIB3591-067-E7_FLI
ctatgagttagtgctaccaactgaaggatacgccatggctgttctgacactggttaatatccttatcagcttcgctgcttgtgctgaagctctaaggagagcagacttccctcaaggtttcgtctttggcactgcttcttcagcttaccagtatgaaggtgctgtcaacgagggtcaacgtggacctacaatatgggatactctcacaagacgacccggacgggtgatagatttcagcaatgcagatgttgccgttgatcactaccatcgttataaggaagatgtggacttgattaaggacattggcatggatgcataccggttctctatctcgtggtcacgtatctttccaaatggaactggtgaacctaatgaagaaggattgaattactataacagcctcataaatactctattagacaaaggtatacaaccatatgtaacactctttcactgggaccttccgcaagcactagaagacagatatggtggatggttaaactcccaaatcgtggatgattttgttcactatgcctctacttgcttcaaggaatttggagatagagtgaaacactggatcactttcaatgagccccataattttgcgattgaaggctatgaccttggcatccaggcacctgggaggtgttctattctgtctcatatattctgcagggagggcaaatcatcgactgagccttatgtcgtagctcacaacatactcttagcgcatgctggtgcctttcatacttataagcagcatttcaagaaagaacaaggaggtatcattggcattgcactcgattctaagtggtatgagccactgtcagatgttgatgaggacacagaggcagcagcacgagcaatggactttgagcttggatggttcctggatcccttaatgtttggccactatcctccttctatgcagaaacttgtgggcgacaggctgcctcagttttcagctcgggcttcgatgttagtgtcaggctcactagattttgtgggcataaaccattacaccacactgtatgttaggaacgacagaatgcggatcaggaaacttgtaatgaatgatgcttcaactgatgctgcggtcatacctactgcttatagacatggaaagaaaataggagaaacggcagcgtcaggatggctgcacatagtgccctggggcatgttcaagctgatgaagcacatcaaagaaaagtacgggaatccgcccgtgatcattactgaaaacggcatggatgatgcgaacaaccggttttcgaaattagaggatgatctgcaggatgataaacggatacagtaccacaaggactacatgtctaacctcctagacgcaattaggaaggaaggctgcaacgtccatggctacttcgtctggtcgctgctcgacaactgggagtggaactccgggtacacggtgcggtttgggctctactacatcgactacaacaacaatttgacacggatacccaaggcgtccgtggagtggttcaggcaggtcttggcccagaagacggctggtttggagtacagtggttctacagtggccagtagttgagtgtatataacatacacggcacggctaccatcgatctgtacatgcgtacgtagctttagattagattgtgattattctcgatgtatatagactcaccatttggacgaccttcaaccgcacagttgaatgtgtcgttatgcttgctacaaattggttgattggtgctaaagaaatcagtgaggggtgctcggttctactact

SEQ ID NO: 22628 - DNA, 1270 bp, Zea mays
  Clone ID: LIB3591-067-F10_FLI
gggtagtcgtcgaccgttccatcgaccggccggccggccagcctagctcttggcaggctcttgctccgatcggatcgagcgccggacaaggcaaggcagccgtacgtacgacgatggcgcagggcagccgcagcgctgccgtgcccgccgcagcgtccttcttcgcccttctcgccgtggccccgctgctcctgtgctgcgcgccggccgccgcggagctggccaggctggagcacccggccaaggacggcggctcgctcagcctgctcgtcgtcggcgactggggccgaaagggcgcgttcaaccagtccagggtcgcccatcagatgggcagggtcggggagcagctcagcatcgacttcgtcatatccaccggcgacaacttctacgagaacggcctgacgggcacggacgacgaggcgttcgagcagtctttcaccgatatctacacggcgaagagcctgcagaagccgtggtacctggtgctgggaaaccatgactacaggggtgacgcgctcgcgcagctgagcccggtcctgcggaagatcgacagccggttcatctgcatgaaatccttcgtcgtcaacgcagaaatcgtggagttcttcttcgttgacaccaccccgtttcaactcaagtactggactcaccctaaggatgatcactacgactggagaggggtggcgcctcgggaaaaatacataaacaatctgctcaaggatttggacggggccatcaagagatcgactgcggcgtggaaggttgccgtgggccaccataccatgaggagtgtcagtgatcatggtgacaccaaggagctactgcagctactgcttccagtcctccaggccaacggcgtcgatttctacatcaacgggcatgaccactgcctggaacacatcagcagcaaagacagcccaatccagtacttcacaagcggaggcggttccaaggcatggagaggagtgcagaaccccaccgaagatgacctcaagttcttctacgacgggcaaggattcatgtccctccagctagaccgtagccaagccaagttcaccttttacgacgtcgacgggaaggcgctgtacagttacacacggtcgagcctgatggaaacaggccaccacctccaagcctccggctacgtcaacgaggaatgaagcaggggcgagtcagcatgcagcgctggagaactgagatcgatatatgcagttcaagcgtaaaaatagtgcaaatattcattatcaagcatctctcgatattttgatat

SEQ ID NO: 22629 - DNA, 919 bp, Zea mays
  Clone ID: LIB3591-067-G1_FLI
cacccgagccccaccaccagtccaccaccaccaccggcccgtgccccagccacaacaaggcgaaatcaggggtggtcacgccgagcgactacgcgaagacgcagtcggcgggggcgaagatctcccaacccacattgcgcgcgcgtctacgcccgaggatcgatggttggcggcggggggcgccgcgcggcgctggggcgctggtgcctggtgatcctggccgtggcctccgcgctaggggtctctggccccgccttctactggcgctacaagaagggcttctcctcctcctccccctcgtccaccgcggcggcggtggcttcttccccgtcgtgccctccctgcagctgcgactgcccggcgcccctttccctcaagtccatcgccccagggcttgccaacttctcaataacagattgtgggaaaaacaaccctgagcttgccaaagagatggagaagcaatttgtcgatcttcttaatgaggaactcaagctgcagcaggttgtagctgaggagcatagtcaccacatgaacgccactcttgtcgaagcaaaaagacaagctactcaataccagcgagaagccgaaaagtgtaatgcagctacagagacctgcgaggaagctcgggagcagtctgaagtagcaatttcaaaggagaagaaactcacagcaatgtgggaacagcgagctcggcaactgggttggcatgattctcgagccacgagcatgtgacagctttagttctgaattttcaggtgaaattatttctggtagctgcatgggttatgccttgcagccaaaccaaccggcgacgtttgtctatgtaatatcagtttccacgacaacattgttaattttgagtctcaacattatagttccagcttccttacaaatgtgactagcttgctgccgcctagat

SEQ ID NO: 22630 - DNA, 1311 bp, Zea mays
  Clone ID: LIB3591-068-D7_FLI
cagccttcagacttcagaggcaggctgcaagagagttcatcgatctagctagctagctagcgtgtgtttagggtacctagctagctagcttcaacatatatatcttagttgcacacacagctcaaaagaaaggaatcatcgatcgatcggcagggagggatggggctgagggagatcgagtccacattgccgccggggttcaggttctatcccagcgacgaggagctggtgtgccactacctctacaagaaggtggccaacgagcgcgccgcgcaggggacgctggtggaggtcgacctgcacgcgcgagagccatgggagcttccagacgcggccaagctgacggcgagcgagtggtacttcttcagcttccgggaccgcaagtacgccacggggtcgcgcaccaaccgcgccaccaagacggggtactggaaggccaccggcaaggaccgcgaggtgcgcagcccggccacccgcgccgtcgtcgccatgaggaagacgctcgtcttctaccagggacgcgcacccaacggcgtcaagtcctgctgggtcatgcacgagttccgcctcgactcgccgcatacgccaccaaaggaggactgggtgctctgcagggtgttccagaagcggaaagacagcgagcaagacaacggcggcggctcctcctcgccgccgacctttgccggcgcgtcgtcgcagggggtcgttctagatctgccggacgaccagcagcccagcatgacgatggccggcgcgtacgtagcagtggaccaccaccagccaggctcttccgccgtcgggttcgcactgccgccgcatgcgcaggacaacggcctcggcgatggcggcctggacgcgttgctgatgaacggagcgaccatgtggcagtacagctcatcggccctcgccgaccacttcccgccggaggaagtgaccgccgcgcccatgatggggctaggctccaggggaggaggtgacgggtgcagcttcttctacgacagcggcttcgacgacatggcgaacatggggttcccgcagggatggatgggctgaggaggcaaggcaccaactgcaacaacgccatgggatgatggattgtgaaggaaacgattgaattgattccattagtggtagtattgtacagtaggtacgtagtgtgaggttagtttattggaaattattagagtgcacctccccaatccaaaacaacggaatgaaaagtagagcgcatgacgacaattgtatgtatccattcactcctactactatgcttgtacattaattaattagtataaacgaatccaagtacgt

SEQ ID NO: 22631 - DNA, 2066 bp, Zea mays
  Clone ID: LIB3591-068-D9_FLI
cgaggtccacctccagctctacctgcccggctggcggctgcccccgtcttcgtcttccttaatctcaaattcccaatcctcctccgacgccttgtttctggatcatccagcggggggacgccggtgtattgctcggtcctcctccctggttgcccgaggcagccgtgacggaggcggaggtagcgggggggaccatgtacagatcggcgggggtcgcgatggcgtggaacgtgttccggttctgcacggctctccgtgggctgggttccatcatgatcctactcgtcctcgccatcgtcggcgttacctactacgctgtcgtcctctgcaactacggccccgccctcctcaccggcggcggcaccactctcgccgcgctcgctgtcctgctcctcttccactttctggtgcgtagcctcacgtagctagggagtggggtggggagattcggatgggtcgtccttccggagaaatatctgctcttttggtggtgaagatgctaacatcagcgggatcgggtatcattgggtgccgatcttagttcttgggagcaattttgttatatcgtatggattttgaacatcactggatgcgactgtcttgattcggctacaattattgttttactaatatttttttctgacaacatggtaggtttgtttaatagaggatacgtcaaatgttaaaatggagccaactatgctgaaagaagtttaataagaaaaataaactttcctagatgatctaatccaatacatttgagcgctactgattatagaaccataaggttggctgaacttctggtgctttgcctaccaacatagttaactgtaaacactagtaaaattatgttacaccgttctctctcagttttgtttagtgtgctaataggataatttactctctgttttgcagcttgctatgcttttatggagttatttttctgtggtgctcactgaccctggttctgttccaccaaattggaatcttgattttgatgcggagaggggagaaactgctcctctcactagctcagagttcagtagccagatgaattcacagcaatctgtggctcttggcaatacggcaaatccaagggctaggtactgtaggaaatgcaaccagttgaagccacctcggtgccaccattgctctgtttgtggaagatgtgttcttaagatggatcatcattgtgtgtgggtggttaattgtgttggggcactgaactacaaatactttcttctgttcctgttttacaccttcctcgagacaactcttgtcacactctctttattgcctcacttcatagccttcttcagtgatatcgagatcccaggaagtcctgcagcacttgcaaccacatttctcacctttgtgttgaatctggccttttccttgagcgtttttggttttatgattatgcatatttcacttgtttcggctaatacgacgacaattgaggcatatgagaagaagacaactccacattggatatatgatcttggccggaagaggaattttgctcaggtttttggaaatgacagaaaatattggttcatccctgcatattcagaagaggatctgagaagaattccagctctacagggtcttgattatcctgtcagtgagaccagattttgatggccaggaattgtaatggggcaattctaacagtgtcctcgtcagatacctcagtgttggacatctactcatacaactgtcagcattgctgattgccctatgcaaggcatctagtgaaatgtgcacaagatgattgtagtaatagtaaccatgagttattcatctgttgcacttcatgtatgtgacgaaggggaagtcctcctacctttgccagaggaagtttgttgtgatgtaaattagttttagcgcctggttagatggaccaaatcttggcgatgcgccaggattttggacttaattctttatccatccacgtgaattgggcaggatttcatccatgcaaactgggcattagtgtggtttgaaacagtcttgtacttcagtttagttatatcatgccatgcaatacatttaccatttgagat

SEQ ID NO: 22632 - DNA, 1158 bp, Zea mays
  Clone ID: LIB3591-068-E4_FLI
cttcttctcccggcaactcctcaccccagaggccacaactgccaacaagccaatggctctcgtccgccagcgccgccagctgccgcaccttaccctcccgctggaccacttcgccctgcgcgtgccaccgcagcctcagcccaccgccgcgccgtccacctccacgtccgacgcccgcctctccgactacgagaggctctccgttctcggccacggcaacggcggcaccgtgtacaaggcgcggcaccgccggtccgcgcagccggtcgcactcaagctattcgcggacggggacacctcggcggcgcgcgaggccgagatactgatgctcgccgcggacgcgccccacgtcgtgcgcctacacgcggtgatcccgtcggccgccggggaggctcccgcggcgctggcgctggagctcatgcccgggggctccctgtcgggcctgctgcgccggctggaccggccgatgggggagcgccccatcgccgccgtggcgcggcaggcgctcctcgggctcgccgcggtccacgcgctccgcgtcgtgcaccgcgacctgaagccgtcgaacctgctcgtcggcgccgacggcgaggtgacgatcgccgacttcggcgcgggcaaggtgctgcgccggcggctggacccctgcgcgtcctacgtcggcacggcggcgtacatgtcccccgagcggttcgacccggaggcgtactcgggagactacgacccctacgccgccgacgtgtggagcctcggggtggccatcttggagctgtaccggggccacttccctctcctgcccgcgggccagcgcccggactgggccgcgctgatgtgcgccatatgctttggcgaggcgccggagccgccggccgcggcgtcggaagagttccgggatttcgtggcgcggtgcttagagaagaaggccgggcggcgcgcgtcggtggccgagctgctggagcacccgttcgtcgccgagcgggaagcggccggcgcacaggaggcgctcgccgcgctcgtgaaagaggcggagcagctggacctatagacagtaattcacgtttaggacaagctgagatgtaaattacgccatattttttgtttatccgtttattgagtttaacaatcaaatctcagaagtcaacaaaattagtgaaattc

SEQ ID NO: 22633 - DNA, 509 bp, Zea mays
  Clone ID: LIB3591-068-E5_FLI
ccccgcgctcccgctcccgctcccgcgcccgcgcccgcactgctcctcctccctcgtcttgtgaggccgacagccggagaggcacagcgcaccaaatgattctggtggccatcgtggcggagctgctggaggagtacacggcgctggtggcgcgcgtgctggagcagctgctccacggcgcgcccttcccgcgccgcatgcgcttcctcatgctccggagcctccccttcgccacgccgccgctcccgccgccgccgccagcgcacgcgctccacgtcggcgcgccctccccgcccctctgagtcagagtactgttcctcgccgtgtttcagcgtttggtacgtaagttctcatctcggtcatgaaagaaaagggtagcgaatgtgaatctgcgctgcctcctcctcgttgtctcgttgagaagctgagcagttccagtgtccacggatctgctgtgtaaattctttgcttagtttgtccgagtaatataatagcagtgattaatgagc

SEQ ID NO: 22634 - DNA, 1134 bp, Zea mays
  Clone ID: LIB3591-069-A4_FLI
aagaaccggggggtgcgcggggggccggagcccggaggtagcaagcaacgagaggaaggagacgacgacgcggcctcggctcggaggagacgacggcgaggaagcgtccaggggaccccgtacgaaagacttgcagctgcgggtgtcttctgctatcacgatctgaagtgctgaacttggttggaagatactcttcttaagcctggaactgtcgtttccgatggtctggcactttctttcctgatggcaagcacagaaggtttccgcctcgtgagatgcccaaagtgtctgaacattctcccagaaccacctaacgtcacagtctacaagtgcggtggatgcggcaccacccttcgagctaaaacccgtgccagcggtggccaacaagtggccgcgaccgcgaaacaaggtcgccaggactccgacagttattcggtcgctaccgccgtgagcagtggggtgcctcgtcagaacagagaccagggctccattggtgccgtcacggagagttccttcgacgctgatgtcgcgagcgccgagcatggcagcaacggagcaaggagcggtgaaaatggtggtggtatgctggctggccagaatgtccatttcgaaggccaggataataataccagttcaaggatggaaggtcctgctggccagacacgcctgaacgcaaatgccacgtatttagactctggtggaacagaaaaccacaccgtgcaacaaactgcagagaaatgccgagtgagtggacatgtcgatgatacagaatgccacttgaacacctctgaggacgaaatgtttccttccgagacaagcaaagcagccgtcggtatgcaggatcctgggcagaagaaggaagcgggcggaaccgagcatgcagcgaacaagaagagccatcttgtgagggcactgtctcggtcgtgtgatcttggatcatcgatgaacttgaccgatttccactctgctcgggcttcgctccagtccaaaagcttcagggccagcgcgcccctccagtcgaagatcatgagcacggtggatgagctgaagggcgacctctctgagatgttcagcaaacctgcggactgcaagccaaggccacacccacaccctccacgcccttccaaacgagat

SEQ ID NO: 22635 - DNA, 846 bp, Zea mays
  Clone ID: LIB3591-069-B3_FLI
gtccattcgtgaacagaattcccctccctctctagatctccccctgctaacgaagacagaccaccaccaccagtaatgccgaccgcgaggcgcacgcgcatcccggcgttcggggagtggaaccaccaccaccacagcaacggcggcggcgcgtgggcgccggcggtcatgaccccgtccttcgacttcggccacgcaataacaacgccgcacaaagcgccgcagacgcaggggaggcggcgaggcgccgccgacggtgtcgtccacgcggccaagctggctgcggctgcggcggcggcggagcctcaccaaggccacacgcagaccacgaggcggagcaaggtggccgactccggagcctacgcgcaggccgcggcggcggcgaggaggtcctgcttcgcgctggccaagcccgtcgacgacgacctgtacggagtccctcccgacatgctctacggaaagccgccgccgccgggagcgaggaaggatgatggctggcggaggatcctgcggctgctggggtgctcgtgcttgagttgagcccgtcgtaatgaccgccggacacagccgagcattattgtcacggacaacaaggctgctggctaatcagggcgcgggctttttggcttccatcctcctgtacgtactacaagatgtctcaacttttggcgcctgctgtgatcgattgatgacgggccggcaggcaagacgtgactgacgtgccggccttgcgttgcgtgggtctgtgcgtaggtgtgacgttcgtgttgtgactgtgttcgctgctgaccgcctgtcctttgtgactgcttcaagctagtagattctaggatttagaggttcttt

SEQ ID NO: 22636 - DNA, 695 bp, Zea mays
  Clone ID: LIB3591-069-F6_FLI
ctggcttctcctccccctcttaccaagtcctcctcgggttagggttccttagggttttgtggaggggcgatggcggcggctgatgtggagtaccgttgcttcgtcggcgggcttgcctgggccaccagcaacgagtcgctggagaatgccttcgcctcctacggcgagatcctcgactccaaggtcatcaccgaccgggagacggggaggtcccgcggcttcggcttcgttaccttctcctccgagaactccatgctcgacgctatcgagaacatgaacggcaaggagctcgacggccgtaacatcaccgttaaccaggcccagtcccgtggcggtggcggtggcggcggtggctacggcggcggtcgcggcggctacggcggtcggcgcgaaggtggcggcggcggctacggaggcggtggcggctacggcggtcggcgcgagggtggcggtggcggctacggcggcggtggcggcggcggctggagggactgatgtgtgggcccatcctggcttcggccgagttatcttatctatctatagtatcgtgttaccgttcgcttctgtcaccgtgttagtgtccgttctacctttggattaggtgttggtaccctgttgttcgctttggttgctcccgctatgaaacgagacgagagaagaatgagcaaggtttttgttcgcagctatttttgtcc

SEQ ID NO: 22637 - DNA, 1264 bp, Zea mays
  Clone ID: LIB3591-069-H11_FLI
ttccccgaggctagaattcggatccctcccaccacatccatccccttcccttcccttccctcgtgccccgccggctctccagcgcgccgtctctgcccagatccaggagatatgcctcgctatgatgatcgctatggaggcacgcgcttgtatgttggcagattggccccccgtactcgttctcgtgatttagaatatctcttcggcaaatatggaagaatacgagaagtggagttgaagcgcgactatgcatttattgagttcagtgaacatcgtgatgccgatgaagctcggtaccaactagatggcagggatgtcgatggaagtcgcattgttgttgagtttgctaaaggggtcccacgtggtccaggtggctcacgtgaatatatgggaagaggccctccaccaggcacaggtcgttgtttcaactgtggaatggatggtcactgggcaagagactgtaaggctggtgactggaaaaataaatgctaccgttgtggagaaagagggcatatagaaagaaattgccagaacagtcctaggagcgtcaggcgtgaaagaagttactcacgctccccatctccacgccgtggaagaggtcgcagtccaagctatagcaggagcaggagccggagccggagccggagctatagccgatcgaggtccctatctggatctcctaggggaggccgccgtgaccgtgatgataggagatcgaggagtcttagctacagcaggagccccatgcggtcgccacctgcaaaggaaaaggagcgcagtcccacacctggcggaagcaggagcccaaggagccgcagcccacaggatcaggtgatgagcccaccacctaaggataacggcgacaggaatggttcagaccgtggcgacagccccagagggagggaaaacagcaggagccgcagccgcagccgcagcccatccggtggtaaccgcagccctgcagctaatgggcgtagcccgagccccagaggtgaccgtaccccgagccccatggctgaccgtagcccgagcccaaagggcaatggtaacaacgatggtggtgatgatgatactggccgtggtggttcccccacaggaagcaagtcaccctgaacgctgcaccgtctcagttcttaggtgcttcgtgatgcagtgggcaaacataccaaagacgtgatagctgtatcgtttccctatctgagacgtggacttatttagcttgctttgatattggtgtcttatttctcttatgaataatgtggac

SEQ ID NO: 22638 - DNA, 986 bp, Zea mays
  Clone ID: LIB3591-070-F1_FLI
cctaaaagaagggaagcagagcaatgccaacgcggcgggggcggaccaggaagggcgaacgccggatcgacgcggccatcgaccacttcgtcgtcatgggctacgacgcacgcgacattagcgccgtcgttgctgatctcctcaaggtgtacgggggccctgatgcgtggcccttactggaggaaggctcctacgaggttgtgcaaaacaggctcttcgagattgaggacgaggagaagcagaagcaggaccagcagctgctgctggagcaccacgaccagcagctgctgctggagcaccacgaccaccagctgctgctggagcaccacgaccagcagcagcttgattgccagcaagtggaggatgagcgtcctcagcaccaagaaccagcagcagacgagggagtggaagtccctatgttcattgaaccacaagataacatatcaatttcaaaggtaccagcagagactaagtcagcagatgacgaagtggaaggccctatgtccattgaaccacctgtttgtgaagctgtattgccacttaatgtagctataaggactcgcccaaggcgaccctgctatggatggcttagtgagtcagaagatgaggaagaggaacaacctactggtcaaaaacatgaggtgcatgttctaagtcggggagagcgagcccagtagatgggtggctgataccaacctgacatggtccatgatgctccactaagatgcagaagtccagtgctgtatttttggtgtcgctgaaaccaaaaactaactttcagaagccttttttgtgttttgacaagtctagcagtctagcagaactgcagaagtatataacaatatagaacgtgcgcttgatgagcgtaagtagagcatgttccgctaatttaaataagagcctttgactgaagcggtgacataatttttggaaactgagaaaagaagagcttaacttcgattgaagcagtgacgtaattttagaat

SEQ ID NO: 22639 - DNA, 709 bp, Zea mays
  Clone ID: LIB3591-071-C11_FLI
ggttgctctagatccgttcatcctggtggttttgtgaggtcgaaagcggcgagcgaattagaagatgctggacaagctgtgggacgacgtggtggccgggcctcgcccggagacgggcctcgagaagctccgcaaggccaccaccgcccgcccgctcgtcatcaacaaagacgcggacggcggcagctacaagcgggcgcagtcgatgccgtcgaccccgacgacgccggtgacgccgtcgtcgtcgtcgtcgtcgacgacgccgcgcggcgccggcaacgtgtggcgcagcgtcttccacccggggagcaacctggccaccaagggcatgggcgccaacctcttcgaccggccgcagcccaactcccccaccgtctacgactggctctacagcgacgagaccaggagcaaccaccgctagatcgggcgagatggatggacagtgaagaggccatgtttgctggtccttgtggttatctaaaacgcacgcatgctctattatagctagtcatcactatatatatacttgtgtttgtgtattgttgttcttgttctgctggtgtctccgccgtttaatttgacctatgttatggagtgagtgatatatgtgccgtcactcctagtatatagtagtgagtgactagttggtatgtgtagtactgtactatcttttctccatatgcatgttttgccagcgcgtaatgaatgt

SEQ ID NO: 22640 - DNA, 1962 bp, Zea mays
  Clone ID: LIB3591-071-D1_FLI
catagatcagtggataccactccatcatcctgcttggccccggccggctggtagatcgtcgttccggagtcgtcgactggaataacgaactggcgcagcaggaggccaataatggccaccatgaagctgggttccaagccggagattttcgtcctccaagacctcacatggagatgcacgaccgagctcgagagtgatgtagttgtcgaagtcggagagatgtccttttacctccacaagttcccgctgctgagccggagcggcgtgctgcagcggatgatcagcgagtaccaggctccggcggatggcggcggcatgtgcacgctgcagctggacgacatccccggaggcgccaaggccttcgagctggcggccaagttctgctacgacgtcaagatcgagctcaacgcgctcaacgtggtgtgcctccgctgcgccgccgagtacctgcgcatgacggacgactacgccgagggcaacctcatcacgcaggccgagtgcttcctcgtcgacgtgctcgccaactggaaggactccatcaaggcgctcgagacctgcgagggcgtgctccccactgccgaggacctgcacctcgtctcgcgctgcatcacggcgctggcctccaaggcctgcggctccgacgctgccgcgccagtggtcaggaacgccagcgtcgacaaggacgcgctctggaacggcatccggtcgggcgacacgacgtcctccgccgccgcggcggcggcggcggccgggatggactggtggtacgaggacgtgtccttcctcagcctgcccatgttcaagcgcctcatccaggcgatggaggccaagggcatgcgcgacgagagcatcgccggcgccatcatgttctacgccgggcggttcctcccggggctgaagcgcaacaccagcttcagcaacgcgctggccagctacggcgccgacggcagcggcggcgccggcggtggcatgagcagccgcaacatcaccccgcgcgccgccagcgtgtccgctccgtcggagggcgaccagaggtacttcctggaggagatcgtggcgctgctgccgaccaagaagggcgtggcctccaccaagttcctgctgggaatgctgcgcacggcgatgctcctccacgccagcccactgtgccgggagaatctggagcggcggatcggcgcgcagctggaggacgcgtcgctggacgacctgctcgtgcccaacctcggctaccacgcgcgccccgtcgacgacggcatctaccgcgccatcgatatatacctcaagtcgcacccgtggctgtcagaatcggagagggagcagctgtgccggctgctgaactgccagaagctgtcgctggaggcgtgcacgcacgcggcgcagaacgagcggctgccgcttcgggtggtggtgcaggtgctcttcttcgagcagctccgcctgcgaacgtccatagccgggtggttcttcgtgtcagacaacgcggcagggggcgacggcgcgcgcccacacgccggcggcgccatcgtccccaagggcaccgcggccatcgcaggctgcccgcaagcagacgccgacagtgacgtagagggcgacgcacccgatgggaaggagaccatcaccgacgtgaaagcgcgggtgtcggacctggagaaggagtgcaagagcatgaagcaggagatccggcggctcgggaagccccggcggtcctggagcctcctcacaaggaagtgcggttttggggccaaggtgcaacaagcgcagactgccatgagcggcaaatagattattttcccacttcatttgtttattaggcaggagcctcgattgcattccctaaggagtcttatcatctatttgctacagtaacagttcctaatctagccctagctcctagtgttatgcaataattacgtgcggatggtttgcacgggatgataataaacgtaacttcagcttcagcac

SEQ ID NO: 22641 - DNA, 1142 bp, Zea mays
  Clone ID: LIB3591-071-H3_FLI
agaatcagaagaactccaacttgcgtcggcaaccgcgaaaagcggagggagggggaagggacgtgggaccgatccaatcatcaatccactagcttcactgggaaacgaagaaagaacataggactgatccggtcggtgggacttcctctcgaatcgccccgatcgagaccctagttgccccacgaaccgaggatccaagatgagtttcctgttcgggaagcggaagacgcccgccgagctgttaagagaaaacaagagaatgctggatcgatccatcagggaaattgagcgagagaggcaaggattgcaggcccaggagaaaaagctcatcactgagatcaagaaaacagctaaagaaggccagatgggagctgtcaaagtaatggccaaagaccttattcgtacccggcatcagataacaaagttctaccaactcaaatctcagctccaaggagtttctctaagagttcagacactaaaatcaactcaagctatgggtgatgccatgaagggcgttacaaaggcaatggctcaaatgaacaggcagctaaatctgccagggttgcagaggataatgcaagagtttgagcggcagaacgagaggatggagatggtgagcgaagtgatgggagatgccatagatgatgctttggaaggagatgaggaggaagaagaaactgaggagcttgtgaatcaagtacttgatgaaattggcattgatatcaaccaagagcttgttggagccccgtcggccgctgttgctcaacctgcttcagcgggaagggttgcccaggctgaaagtgctgggaatgctgacactggaatcgacgccgatttgcaggcaaggctggacaatctgaggagaatgtaggtgctacaccagcaaaagagtagtgccttctagctctgttgcctgcgaatgtgaatacctagtcaatcaaagcaaaacgtttacaagccagtgtgtatgttgaaatgaatgaagcgttcgatatgccggtagtaatgacaaatgttaaatatacatatttacaatttcttcccctctgagttcatgatggattgatgcctgcagatgcggcatgtcagctgcgtgctaactgtgatttgcaagctgttgcttaaatacacagcagatatct

SEQ ID NO: 22642 - DNA, 1951 bp, Zea mays
  Clone ID: LIB3591-072-A9_FLI
acaaaagcaaattgacaccttctccgttcccgacgactcccgtgagcgtggagaggcgactaggcgaggccatggcctccggcatcggctccggccagcagcaacccccaggtaccttccgcgtcctcctcttgctgctcgattggattccaatttttagaccgaccaaactagaattaggtaggttcagcagttagattggatgccctagcagcgccggcggcagatgctgacccgggagccgtcggcgacaagctcgtcttcgaagcgccgcctcagcccgtgagggaggactacgtccagaacgccgtcaagtttctctcccaccccaaggtcaggggctcccccgtcgtctacaggcgatccttcctcgagaagaagggccttagcaccgaggagatcgacgaggccttccgaagggttcctgatcctcaacccagcactacggctaccacttctccgcagcagcaggtcaacagccagaatcaatccgtcggggtgcaagcttatgcgccagcacaacctgtgcacccagcaaacgctggccctgtcgtccttccaacgcagcccaggtttagctggtaccaagcattcctggctgcagggctcttgcttggttttggtgctagcgctgctgtctttatcaagaaactgttccttcctaggctcaagtcttggatccgcaatgttgtagcagaaggtaatggcactgaaggcaaccagcttaagcctaggattgatgatgaaacggctgatgctgtaaaggcttctgcttcggctgtttctgctattgccaaaacaaaccaacaactgcttgcttcaaaggatgaagaaaagaagatactagtgacgttgacacaagctctagattcccaagccaaggagttaaaatccttgaccgattcaatcggtcataccagggaacccataaatattaccagggatgataggttttctcagtaccgcccactggaagaccatgcccctactgttataaggaatggggcaattaacagttcatggagagcctctcagcaaactaacatgtatggtgtgtcaaatggcgactttggttccggttcgtaccttttgtgaatatctttttccttgtttgccatacaagtctgctgttttctttttgctttacctatgttggactctgtttagcagtgaggtcttcatttgcgccagcacctgctgaacctacagctggatcattttcaagatcctatggcgagcagccgatgtccactgcacaacgaagcgataggtcttctggcagtaagccatgggagatgcattcgtattcacaacagaggcctggttatggatccaactcccagttgagtgatgatggatcatactctgatgcccaggacagctatgctccttcctatcaccagaatggaaaggcccctgattttcaagcggatgaacctaggcctttgacttacaacactggggttgaggaaagaccgccaccgcagcgccgctgggtgccccctcagcctccaggtgttgcgatgccagaagcagcagctgccatacgtcaaccaaaggcccttccaaagcagccctccagcgatgcctctgaggcagctggtgagatgcaggtgaatggttcaagtgcatcggatgctgtgactgaggttcctgttaatggtgctactgcaagcgatgctggacgcagtgagatccaagaacaatcagtggcggcctaagtgaaaccaagaccagctaagaactgggaagcaatctaagagagattcaggatctctagtacatctggggggtttgtcatacatctctgaataacgtctgtatcagaacagcggggcaaccacgccgatgggtacccgtaataatgcaataagtagcagatagtttctgcatttagattaatgctacttgtacacaggagaacatatcaataatatttttttggctgttc

SEQ ID NO: 22643 - DNA, 1668 bp, Zea mays
  Clone ID: LIB3591-072-G2_FLI
cactccgctcggccaccagctttgaccgcctcccctcccctccgctcctgttcctccataccccacccccccgcaggagcggcgcggcggcggcggcggcaaagccaaaggcaagatgttcgggcgcgcgccgaagaagagcgacaacaccaagtactacgagatcctcggggtgcccaagtcggcgtcccaggacgacctcaagaaggcctaccgcaaggcagctatcaagaaccaccccgacaagggcggtgaccccgagaagttcaaggagctcgcacaagcctatgaggttttgagtgatccagagaaacgtgagatttatgatcagtatggtgaagatgcccttaaggaaggaatgggtggtggtgggtcccatgctgatccatttgacattttctcatcattctttggaccctcttttggaggaggtggtggaagcagcaggggaagaaggcaaaggaggggagaagatgtagtccactcacttaaagtttctctggaagatctttacaatggaatctcaaagaagctctctctttcgcgcaatgtcatctgctccaagtgcaagggcaagggctcgaagtctggtgcttcaatgaggtgccctgggtgccagggctcaggtatgaaagtcaccattcgtcagctggggccttccatgatacagcagatgcagcagccttgcaacgagtgcaaggggactggggagagcatcaacgagaaggaccgctgcccagggtgcaagggtgagaaggtcgttcaggagaagaaggttcttgaggttcatgttgagaagggaatgcaacacagccagaagatcaccttccctggtgaagctgatgaagcgcctgataccgtcactggagacattgtattcgtcctccagcagaaggaccactccaagttcaaaagaaagggtgaagatctcttttatgagcacaccctgtctctgaccgaagctctatgtgggttccaatttgttcttacacacctggacaacaggcagcttctgatcaaatcaaaccccggcgaagttgttaaacctgaccaattcaaggcgataaatgacgaggggatgcctatttaccagaggcccttcatgaaggggaagctctacattcatttcacggtggagttccccgactcgctggcaccagagcagtgcaaggctctcgagtcggtacttccgccaaagccttcgtccaagctgacagacatggagatagatgaatgcgaggagacaaccatgcatgatgtgaacaacatcgaggaagagatgcgcaggaagcaggctcatgctgctcaggaggcgtacgaggaggacgacgagatgcctggcggagcccaaagagtgcagtgcgctcaacagtaagcagactaccaaaatgggattcaaggcactttggttgctcttcaattatgcgagtgcgcctgtggactgtatggttctatggttttgctgtcgctgagctacaaagtaggaagctgatgcgcccctggctctgcaagcgggggaatgtatccttttttgctgcaactgaaaaatgctacccaggcaatagctggctaccttataacttttgcttgtgagatttgctagagtgacgattttaatttgtaggtggacttaatgtttgtgtaaggctaggcataacatcatgtctc

SEQ ID NO: 22644 - DNA, 1990 bp, Zea mays
  Clone ID: LIB3591-073-A8_FLI
agaagctttacagtgaacgagtgagtatgtgcggcatacttgctgtgctcgggtgcgccgacgaggccaagggcagcagcaagaggtcccgggtgctggagctgtcgcggcggctgaagcaccggggccccgactggagcggcctccggcaggtgggcgactgctacctctctcaccagcgcctcgccatcatcgacccggcctctggcgaccagcccctctacaacgaggaccagtcggtggtcgtcgccgtcaacggcgagatctacaaccacctggacctcaggagccgcctcgccggcgcaggccacagcttcaggaccggcagcgactgcgaggtcatcgcgcacctgtacgaggagcatggagaagagttcgtggacatgctggacggcgtcttctccttcgtgctgctggacactcgccatggcgaccgcgcgggcagcagcttcttcatggctgctcgcgacgccatcggtgtgacgcccctctacatcggatggggagtcgatgggtcggtgtggatttcgtcggagatgaaggccctgcacgacgagtgtgagcacttcgagatcttccctccggggcatctctactccagcaacaccggcggattcagcaggtggtacaaccctccttggtacgacgacgacgacgacgaggaggccgtcgtcaccccctccgtcccctacgacccgctggcgctaaggaaggcgttcgagaaggccgtggtgaagcggctgatgacagacgtcccgttcggcgtcctgctctccggcgggctggactcgtcgctggtggcgaccgtcgccgtgcgccacctcgcccggacagaggccgccaggcgctggggcaccaagctccactccttctgcgtgggcctggaggggtcccctgacctcaaggcggccagggaggtggcggagtacctgggcaccctgcaccatgagttccacttcactgttcaggacggcatcgacgccatcgaggacgtgatctaccacacggagacgtacgacgtcaccacgatcagggcgagcacgcccatgttcctcatgtcgcgcaagatcaagtcgctcggggtcaagatggtcatctccggcgagggctccgacgagctcttcggaggctacctctacttccacaaggcgcccaacaaggaggagttgcaccgagagacgtgtaggaaggttaaggctctgcatcagtacgactgcctgagagccaacaaggcgacatcagcttggggcctggaggctcgcgtcccgttcctggacaaggagttcatcaatgcggccatgagcatcgatcctgagtggaagatggtccagcctgatcttggaaggattgagaagtgggtgctgaggaaggcattcgacgacgaggagcagccattcctgcccaagcatatcctctacagacagaaggagcagttcagtgacggcgttgggtacagctggatcgatggcctgaaggctcatgcaacatcaaatgtgactgacaagatgctgtcaaatgcaaagttcatcttcccacacaacactccgaccaccaaggaggcctactactacaggatggtcttcgagaggttcttcccacagaaatctgctatcctgacggtacctggtgggccaagtgtggcgtgcagcacagccaaggccatcgagtgggacgcacaatggtcaggaaatctggacccctcgggaagggcggcactgggcgtccatctcgccgcctacgaacaccaacatgatcccgagcatgtcccggcggccattgcagcaggaagcggcaagaagccaaggacgattagggtggcaccgcctggcgttgccatcgagggatagacgacgacgcatatataagcttcctacttttgtttcaatgcatgcatgctatgtatctgtgtccaccggctgtctagccttatcatcatcactgtctgcaacaaattaataatcaagtggtatggggtacctacgtttaatgt

SEQ ID NO: 22645 - DNA, 1385 bp, Zea mays
  Clone ID: LIB3591-073-C8_FLI
gtgatgctgaggcggtcgggcctcgcggcgtgcctcacgtgtccgctctgcggccgtctcctccgcgacgccgccaccatcaccgagtgtctccacaccttttgcaggaagtgcatatcagaggagtttgtaaataaggaagtgtgctgctgccctgtttgtagcattgacttgggctgtgctccactggagaaactcagaattgatcatagcctacagtatgtaaggtcaaaggtatttccttctaaaaaacgaaaggttgaggatccagaagtcacatcgccaattacatcacctataaagacgaaagtacggtctttatcttctttgacaaaacatgctcctcaaatgtctatgcaaaaatgcttgagaaagaggagaacaaaagcttcatgcttacaaaacctccctttgcactcaaccttgcggggcagtagtaatatcacaaaaaaatctggggggtggagacctttagggtgtcactttcgagcagctaaaaagaaaaggtctcttagacctaaatcagacgatataaagacagctggaaaaaggactgatgatccagttgatgtaactcttgccagtcaagcaaagactaggaagcagattacaagacgtggaaatctggagaagagaactggaaccaagaaagtattgattttaaagggaaaacagaaaaatacgaagacaaagaatacgcctaataagaggagattgccagcattatggttctaccttcttgctgcttttgaccagaaaggacatcctcctctgccgcagataccatcaaaatttctgaggatcaaggatgtaaatttgcctgcttccttcatacagaaatacctcgcgcagaaacttaatctttcaagtgaaactgaggtggagatattctgcggtggcagaccagtgagcccagggatcaccctgcacgacctagcagaccactggattggcaaacgatcgaagggccgagtgcggtcatctgtgggcacgcccgccgctgaattcgtgctgaaggtattttacgccaggtcaggagcgccccttccaaaaactgaaagcaaccaagactgatggagagcttcgagcttcccttcgtttcagaaccagcagtgtatcgtttgactcgtaggaccaattgattaatggtatcttagtaacatgtacatagatgttagtgtcacggattagaagctcccatgggcttactgttatatatatccccctagttcagtgcatttttaccgcttatatttttactgacaaagtgtgtagtatctaggctgtgtaattaaaactggatgagatgtcgagatagagtcaaatttcaagttgcactggttcagctggtatgaatcctggctgaaccggttttaaacctgctc

SEQ ID NO: 22646 - DNA, 614 bp, Zea mays
  Clone ID: LIB3591-073-F7_FLI
caggtgactggtactgcagttgcggctaccacaacttcgccagccgcagcagctgcttcaagtgcggcacgatcgtcagagacttcccagcggggcaaggcgcagccggtgctgagggtgactttgctggcggacgcgacagcgccgcagtccgtgctgggtggaaagctggcgactggatctgcacgaggcctggttgcaacgtacacaactttgcgagcaggatggagtgctataggtgcaatgcaccaagggaggcagcaggcaccgggaggtaagaggcgactggggtgataccaagagcgtgagatgtgacgagctggcggagcagtggaaccaactgccgtcacacactcaccatcaggcatccaggaaggatgacgagtctactacgtacacgactatattgctgattgccgagcgtagtgccgctgctgtggtttgcgtgggtggagaagtacccaagcgcaacacctgttacgtgtgttgtttgctcctttttgaggttgtgttgattcagtgacagctgagttgtacggcctgatgatgtacttgcattgtgtatttgtcttaaacagcatatataattatgtaataataagtgcttgcttatc

SEQ ID NO: 22647 - DNA, 524 bp, Zea mays
  Clone ID: LIB3591-073-G7_FLI
gcctcgccgtacgctgtcgccctcacggccctgctcctcgtctccgccgccctcctcgcgctcatcgccttcggcgtcttctcgctccccgtgtcagcgccgaacgccgccgccaccaccacagccggaggggagaccgaatccgccgacacccgccccgcgcgcccccgcgcccgccgggacctgggggaggggctgggagagcgcggcgcgcagtggaccgaggtcatctcgtgggagccaagggcattcgtctaccacaacttcctgtctaaggaagagtgtgaatacctaattggattggccaagcctcacatggtaaaatcaacagttgtcgacagcactactggtaaaagcaaggacagcagggtccggacaagttcgggcatgtttcttcaaagaggaagggacaaggttattcgagtaattgaaaagaggattgcagactataccttcatacctgtagatcatggagagggactccaagtactgcattatgaagtcgggcagaagtatgagcctca

SEQ ID NO: 22648 - DNA, 541 bp, Zea mays
  Clone ID: LIB3591-074-A5_FLI
agaaacgcgtatacccaggcggcggttgaggaagaggaggagaagaagaagaagatggcttcctccgcatacgcctcatggtccaagcggtggatccgtcccgaggtgtacccgctgttcgtgccgatggccgtggccttgggcatctgctcgtaccagcttgtgcgcaacatcacgggcaaccccgaggtgcgggtgaccaaggagaagagggcggccggcgtcctggacaaccacgacgagggcgagaggtacgctatgcacggcctcaggaagttcgtccgcgggaagaagcccgagatcatggcctccatcaactccttcttcgccgaccctcccaaggacgattaagctagattccgtcatggatggatggatggatggattcccgattcccgatcgtccatagtatgttttaccattcattagctgccggcggcgcgccttgattcgtagccgtcgtcggtacatttttttttgtttctaaaattctaattctcccatataaatggaacatcatgcatttgtcgtgtttgcttgc

SEQ ID NO: 22649 - DNA, 1033 bp, Zea mays
  Clone ID: LIB3591-074-B10_FLI
ctcgcttctgccgctccgcgcttgtgcggtgggtgaagtgctgctgctggtgcgggaagcgtcgccaaacgtgcagaccttggtgggggagcgaggagtcgaaacaagggtaagaaccatgagtgaaacagggcacactgtacaagtcactaacctctcgagcagagtatctgaaagtgatctttatgagttcttttcgttctctggccctattgaacatgttgaacttatcagatcaggagaatacggtgctactgcttatgtgacattcaaggagcgctttgccttggaaactgcggtattgctcagtggggctactattgtggatcagccggtatgcataacttattggggacaacctgaggagacttttaatttctgggacaggccaacttgggaggttgaagaggaaattgaatacacgagttatcaatcatgccagtacaacactactccgcaggaagctcttacagtggctcaagatatcgtgaagacgatgctagcaaaggggtacgtgctcagcaaggacgctttggctaaggctagagcctttgatgagtcccgcggattaacagctgcagctgcagccaaggctgcagagctgagcaagagaattggtttaactgacagggtcagtgctggtgtcggtgcaatgcgatcggtcgatgagacatatcgcgtaacggagacgaccaagacggtagctactgccactggaagaactgcagctaaggtggtaaatggtatcgtcaccagcagctacttctctgcaggagccatgatgttgtctgatgctcttactagggctgccaaggccgcggctgatctggccgctcatggcagacagagttaagtgaaaaacaaaacatacaatccatcctttttcagttactaaacatgaggacgaacaccttaataggatgcttgaagtgttgttgttcgatgtatatttataacagacaacattgttgatttgttgtataaattaaaaggagacgtacactgcgtttgcactaataagtttgattattgc

SEQ ID NO: 22650 - DNA, 1652 bp, Zea mays
  Clone ID: LIB3591-074-D2_FLI
gtcttgaggctttgagctctcctcacctcgtatccgtgtctttctggtgctgagctgagtctgagagacaggtaaggaggaggagggtggagatggaattcaagaactgcgggtcgtcgtcgcagccccggccggcggtggtagtgggcgaggaggcggcgttggcgagacagggatcagtctactcgttgacgttcgacgaattccagagcgcgctcggcggggccgccaccggcggtggcggtggcggcagcatccccaaggatttcggttccatgaacatggacgaactgctccggagcatctggaccgcggaggagacccaggccatggcctccgcttctggcgctggagcgggtgcggggatgccgccaacgtcgctgcagcggcaagggtcgtcgctcacactgccccgcacgctcagcaccaagacggtcgacgaggtgtggcgcaatctcgtgcgcgacgagccgctgcagggggcggacggcggcgggcaccagcagcaccaccgccagtcgacgctcggggagatgactctggaggagttcttggtcagagctggcgtggtcagggagaaccccgctccggctcctccagcaccaccacccatgatcccgccgcggccggtacctgtcgcccctaaaagctccgcctttttcgggaatttaccgggtgccgacgccgacaccgccgcagctgcggcagcgctggggtttgcaccggtcggcatgggggatctggcccaaataccgcccagggcagcaggcatgggaggcggcgccatggctgtgcaagcagcggtgaaccagcttgattctggcgggaaggggtacagcgacctgtcgtcgccgacggagccgctcccgttttcgtttgaggggatgattcgagggaggaggcatgggggcggagtagagaaagtggtggagaggcggcagaggaggatgatcaagaacagggagtccgccgccaggtcccgagcgcgcaaacaggcttatactatggagttagaagctgaagttcagaaactcaaggagcagaatcaggaactggagaggaaacaggcagagattatggaaatgcagaagaacgagctaccagaaatgttgaaggatccattcggacggaagaagcgtctgtgcttgcgaagaacattgactgggccttggtgatgactatctgaaacagcagacgagtcgcgctgcatacctgcagtggtgcttgggatctgtacacaatttgtctcctatagactagcgatggacgtagtggggatgattgtactgttaccgcttatagtggagtcggaaactgacacatgtagattatgttagtagagaaccaaatggagtgaagccggccgcgcaagactcggcggcttcggccatcctccagagcttgtgtagagttgcctagctttgcatcttgccagagccagcacgtcgtgtagagattggacggttttaaaagatcggtggctgggtgtaagtaggttggtgggattacaagcatgggcatggcgacgttcaggatgcaaccggcttgacgactgtacgtacatctgatggctgtagagctgtagtatgcaaactgtcccgctgctgcttgtgtgtaacggtgaaaccagatgaatcggttatttgtgtatt

SEQ ID NO: 22651 - DNA, 1657 bp, Zea mays
  Clone ID: LIB3591-074-F3_FLI
ggctctgtccagtagtagcaatttggatagagatatatgccaattggcaattgccaaagaaaagaaaagaaaaatctctctctcgaccggcctggcatcagcacacgtccacacctaacggcgccaattctaccatccattccaataatccaaggtaaccgaaagcagcagcggaggtcgcaagaacacttccctcctctccggatcaatcatcgatcagccaagcccctacaaaaaaaccatcgccacatgttggctaatcccacgacgcactgatatttttcttccttgattgtcttgctgctatttataatcgatctccagcttacagcgacgtccaggtccaggtctgagctcgaggcacaggactccctttataatttatccatccatggcttcctccaattccaacagcagcagcaacccgctggaagccatgggcgccttcttctcgaagcaggtggaccggcggaagctggtgaccaccgagaagcgggcgctggccacgcggctgtcctcctccggcgacacgttcccggggtcggagcaccggccggcggaccggaagcggtggatggcggagctgggcgccgacaagctgcgcgtgcaccaggtggtgtggcccggcacgcacgactcggccaccaacaagatcggcgtgccgctggtgacccgccccttcgcgcagtgccagtccatgtccgtgtacgagcagctggccatgggcacgcgcgtcgtcgacgtgcgcgtgcaggaggagcgccgggtctgccacggcatcctggcgacgtaccccgtggacgtggtgctggacgacgtgagccggttcctgagcgagaccgagtccgagctggtcatcttggagatccgcaccgagttcgggcacgaggacccgccggggttcgacaggttcctggccgacaagctgggcgagcacctgatcccgcaggacgaggcggtgttccacaggaccgtcgcggagctgctcccgcggcgggtcatctgcgtctggaagccccgcaagtcgccgccgcccaggcccggggacccgctgtggagcgccggctacctcaaggacaactggatcgacacggacctgccggagaccaagttcgagagcaacctcaagttcctggggcagcagccgccggtggccggccggaggttcttctaccgggtggagaacacggtgacgcccaaggccgacaacccggtgctgtgcgtgtggcccgtcacgaagcggatccacggctacgcgcggctcttcatcgccgaggccttcgccaagggcctcggcgacaagctgcaggtcttctccaccgacttcatcgacggcgacttcgtcgacgcctgcgccggagtcaccaaggcgcgcgtcgatggcaccgcgtgacgtgacggcttcgatcgacgagcccgtacgtacgtacgtgtgccagtgttgcggccgtactgccattgcagtgtatgtactgtgtagtgtacactccagtcgtgcagtatatttgcatacaggaacaggtaaatgcgatgtgtatatacgtattcattcatgtgtaacgtgtgcgtcccgtacgtgtatgcagtgcactgtgtctagtgatgaattgctcgtgggacgagcaaaggaataaacatatgcagttacggaattttc

SEQ ID NO: 22652 - DNA, 871 bp, Zea mays
  Clone ID: LIB3591-074-G4_FLI
ggagaaggcgtgcacattgctagtgtacttcgataagggctcgccgtccatggcgaacgagcaccgacaccacttcgtgcgccgccacgcgctctccgctatctcggccatctacagcctccagcagggggaccagctcatccccgacgcgccggagctcgtcgagcgcgcgcttgcctccgaacaggaccccgccgcgcgcaggaacgcgttcctcatgctcttggctgctgggcaggaccgcgccgtgggctacctcttcaacaacgccgaccgcgtcgcggagtggcccgatctgctgcagatggccgccgtcgacctcatccgcaaggtctgccgctccaagggccgtgccgacaagggcaggtatatcagggtcatcatctccctcctctcagcgtccagcgcggctgtcgtgtacgagggcgcgggggcgctcgtgtccctctcctctgcgcccacggctgtgcgggccgccgccaatacatactgccagctgctatcctcgcagagcgacaacaatgtgaagctcatcgtcctggaccgcctgcacgagctatgctcctcgtgtccgtcgacctgcccgtgccggagcaggagctatatcggtggacgctggagattatggtctaggccgtgacgctgtgcgctgacgccattctgagccggacgacattgtcatttgctatgtgcacgagagatagatgtattgtggtgttgttgtataattggtatggagagagtatgcttttgttatgtctgtatctgcataccctgcgtgctttgaatgttatataatacttgatagataataaaggatggtgttcctgaatgttatataatacttgataataaaggatggtgctctttt

SEQ ID NO: 22653 - DNA, 1500 bp, Zea mays
  Clone ID: LIB3591-076-B4_FLI
ggtttgggatgacctgtaaatttaatcacccagcagaccgaaagctggctgttgctgctgcaagaatgaagggagaatatcctcaaagaattgggcagcctgaatgtcaatactatctgaagactggcacgtgcaagtttggagcaacttgcaagtttcatcatccccgagaaaaggctgcaatggcaactcgagttcagttgaatgaactgggctacccactccgcccgaatgaaaaagagtgtgcttattatttaagaacagggcagtgcaagtttggaagcacatgtaagtttcaccattcacaaccatccaccatgatggttgctgtacgtggctctgtttattcacctggacagtctgcaacttctcctggccagcatgcttaccaaggggctgtaacaagctggcccttgtcgagatctgcttctttcattgcaagtccaaggtggccaggtcattcaagttatgcacaagtgattgttcctcccgggcttgttcaggtcccagggtggagtccttatactgcgcaaattggttcttcatcctcggaggaccaacaacggacacctggagctgctcaatactatactggctcacgccaaagtggtactagtataggcgatcaaggaatgttttcatcctaccaagcaggttctgttcctgttggactttatgcagtacagagggagaatttatttccagagagacctgaccaacctgaatgtcagttctatatgaagaccggagactgtaagtttggtgctgtatgcaagttccatcatcccagggagcgaataattcctactcccaattgtgcactgagtccattaggcctacctttgcgcccgggagagccaatatgcagtttctacaatcgctacggcatgtgcaagttcggtccaaattgcaaattcgatcacccaatgggaaatgccatgtacggccaggctccatcgccagctagcgaggccccagctcctcggcgcatgctggcacatgtaccgccgtcgcacccagaagcatcgcctgatggtggttccggaaggtctaggaggattgcccactctgattcccagcaaataccctctggtgaaaggagcgctgagagagaggcgtcctaggccatcctcggtgtcttcgttccccattcttgactggagtaaccatctgcaaccaacaacattcgaggatccgaagctgtacaggtcttttgccccacctctgagctttacataccggagcttgcttcaacgtgtattgcattcaggcaggaaaaagttcttgcctgttcgggatgctcatttgctcccccactgaaacgggaacaaacctaccttatttaaaacatatgtatggatggaacctactcacctctggacattcaaacccattcgagtcatgtgcactggtcccggtgctgtagttatagagctgtctttgcatggacaaagctgttgcgaaactgactggggatgcgcaagcataacctcttttgtt

SEQ ID NO: 22654 - DNA, 2562 bp, Zea mays
  Clone ID: LIB3591-076-D2_FLI
ctcaaccgtcagtcaattcctgcacctggcgttgggcgggttttcatgggggcagcataaaagcctcttcggttcttcccctagctctgcctcgcggcaagtccccctccgctacgttcgccatggctcgcaacagggaagtggtgattttgctgttggatgttgggccttcgatgcatggagtgctgctagaggtgaagaacgtatgcttgactcttgtgcataagaagctagtttataacaggagcgatgaagttggtattgtcctctttggtactaaaggaacatgcaatgagcttgcaaaggacattgggggctataagcatgtgacggtcatacatgatattaaagttgtagatgaaggaacggcacaggctctgcaaaaccttccattaggatctgcccctggtgattttctggattctattgttgttggcttggatatggtgattaggaaatttggtattaccaaagggaagcggcggctctgtctaatcactggtgcacaagaactgttaagagatccgcctgaggggaccaaagaagatcaggtggacaccattgcaaacatgttgaaaaaacacaatatcaagatggagtgcattattttcagagaaccgggagtgcatcataatgatgtaatggaagaaaatgaccgactattgcatcagttcagaaatagatcagtagcaaaggtagttcaggttgacaacccaacatcactgttgggtgctctcaagacaagaaatgtgctcccagttaccgttttcaggggagatctggaagtgaactccaattttaaaataaaggtgtgggtttataagaaaacagctgaggaaaaattccccactttgaagaagtattcggacaaagctcctccaaatgataaatttgcttctcatgaagtcaaagttgattatgagtacaagagtgttgttgagccagacaaagttgttccaccagaccaaaggattaaggggtatctctatggtcctcaagttattcctgtatcaaatgctgaatgggaggcagtcaagttcaagccagagaaaggtgtgaagcttctaggatttacagatagatccagcgtaccacggcaccaatttatgaaagatgtatgcctgtttatacctgagccaggtaacatgaaagcaagtcttgcagtttctgcgatagcaagagcaatgcatcaaatgaacaaggttgctatagtgcgatgtgtgtggaggcaaggtcaagggaatgttgctattggtgtattgacgccaaacatttcatcagtgaacaatatccaagattcattttacttcaatgtgctcccatttgctgaggacatcagagagtttcagtttcggtccttcagcagcctgccatcatcatctcagcccactgaagaacaacaagaagctgcagataacctagtgaagatgttagacctagcaccacctggaagagaggtcctcaagcctgagtttacgccaaatcccatcttggagagattttacagttaccttgatctcaagtcaaagcagccagatgcaaatgtcccaccgcttgaaagatctctaaggaggataaccgaacctgatcctgatgtggttggccaacaaacacaattaatccagaatttaagcaaagcttttgtgctgaaggataaccccaagaaaaagaaagcacgaacacaggacatgttggcatatactggtgcaggtgatcaagctaaatctgtagaggacagagttctggaaaatacacatccttcaacagagaatgttgtggcaatcagagattcaaatccagttcaagattttgaggccatgctggctaagagatctagctcaacatggactcagaaggctattggagatatgcagaattacatagcagctttgttacagaactccagtgatgggggcaactatcaaaaagcacttgaatgttttgcttctctgcggaaggcctgtattattgaacaggaaccacaggaattcaaccagttcctaacgaagatttacgagagattgaaggaaggtgatgctgccaagttctttcaacttctctcctcaaaaaacatttcacttatcaacaaagaggaagcgcctgacagtgatgtgactgaagagatggcaagaagtttctacctgaaacgagaaaaggcgtctcagtaggagctggaagaagccggtaactcgaagcgccttgggtttggagggtatctgcatgttttgaaactgggtatctgggtggaactggaactaatactcaaactctctgggttgagtcactgttttgctgcacaatctgctgcctactacgtttcgactagattcagctttgggtactactgtatgttgtttgactggagtagcatgtccatagatcacatacttctgcagtgttcattggagtgaatgcatgcatgcggtgaaatgcagcatggataggtctaggaagaaacattaccatcatttcctaatgttggagcgctgcctagaaaaggatctttttctgtaagtggtctggtgcgtcaaaccctccaaagtccaaaataatcctttctac

SEQ ID NO: 22655 - DNA, 953 bp, Zea mays
  Clone ID: LIB3591-077-B11_FLI
cgcgccccgcccagtaggagagtaggagctgcaaggagtccggtctccgaaaaccgacaagacgatagcaaatcgaaggaggacacggctgctggtggccgcattcggtcgggggaggagcacgaggagccatggcctgcctgcacgaccacagctgcgaggatcacaactgcgccgccgactggtcgctctacaaccacatcgacgtccccaaggtggtggctctcaacgaatcggtgcccgggagcgtcaagtccgtcttcaagccctgggagcagcgccttgacacctcggggggttttctggagagtaatgagggtgaccctgagctacttattttcatcccgttcacatcagatgttaagatcaagagcatttctgttgttggtggtgctgatggaacaagcccgtcaagaatgagagcgtttatcaatagagaaggtattgacttttctgatgctcaaaacatgcagccagtgcaggaatgggaattagcagagaacctgcaaggagctcttgagtaccaaacaagatattcaaggttccaaggtgtggctaacctaactctgcatttctctgacaactttggtggtgatacaactaaaatttattacattggactacgtggtgaagccactcagaacaaaagggatgtagttgcaacaattgtatatgaagtcatgcccaatccttctgatcacaaaacaaaatctgagactggaggaggtttctcgcatgtggagtagacatcatacaagcagagctagagaagcggaagctgggtactgcgttgcctgaaagcaaatttgaacctcgcttcgtcgatcaataagataaatagataattcccagctgctagacttttagcttgacttttgagcacataactctgtacccgtggacgctgtgactggtttgctaatgctctatcatcagagttggtctcttgtgtt

SEQ ID NO: 22656 - DNA, 845 bp, Zea mays
  Clone ID: LIB3591-077-C4_FLI
caagaaatatcgtcatccatggtttcacagtcgtttggtgcatcagatatggcattcaattcaattgactctggtatgaatgatggtggtttcgtgaacagaacctcttggcctcctgctcctcccttaaagaggatgaggacatttaccaaggtgtacaaacgtggagctgtaggtcggtccattgacattagtcagttcagtggatacgatgagttgaagcatgctctggctcgcatgtttagtatggaggggcaacttgaggaacggcagagaataggctggaaacttgtctacaaggatcatgaggatgacatcctacttcttggtgatgacccttgggaggaatttgtcaactgtgtgaagtgcattaggatcctgtcgcctcaggaagtgcagcagattagcttggatggggatctggggaacaacattctccccaaccaggcctgcagcagctccgacggcggcaatgcctggagagctcgctgcgatcagaactccggtaacccatctactggttcatatgaccagtttgaatgacctaacttgccggtccatacatgccggatcacaagtaggcgtctcgtgaggggatggcaggtgcagaatgtttgtagatgtgtcgccagatttacgtccgggagagcgaatcgctcgatggattggtagtgtttttgttcatatgtgtaggttttctcacatggaaggaatgtagtatagaggatgggagatgaagattaccgtaggtgaaagatgatgttgtaccatgaggggggaaaacatgcttgtagtagtaaagactgctgcttcagtccacgtatctaaaaagttcttctctgacc

SEQ ID NO: 22657 - DNA, 1512 bp, Zea mays
  Clone ID: LIB3591-077-C5_FLI
gcgtgatacacatccgtcccttctagtctcctaataactagtttctatcttgctccccaaaccagcgcaaaccctgccctgacaccggcagcgacacgtccaccggcggcgccatggtgctcgaggcaacgatgatctgcatagacaattcggaatggatgcggaacggcgactacgctccgtcgcggttccaggcgcaggccgatgccgtcaacctcatctgcggcgccaagacccagtcaaacccggagaacacggtaggcgtgatgacaatggccgggaagggtgttcgcgtgcttgtcactcccaccagcgacctcgggaagattctcgcctgtatgcacgggttagaagttggcgctgaggcaaacttggctgcggcaatccaggttgcccagcttgctctaaagcatcgccagaacaagaggcagcagcagaggattatagctttcattggaagtcctgtgaagtacgacaagaaagttttggagaccattgggaagaagctgaaaaagaacaatgttgctcttgacattgttgactttggtgaatccgatgatgaaaaacctgagaaactggaagcattgattgctgctgttaacagcagtgatagcagtcacattgttcatatccctcctggtgaaaatgccctctctgatgtcctcctaagcactcctatatttactggtgaagaaggtggaagcggttttgctgcttccgcagcagctgccgcagctactggagcatctggatttgaatttggtgtggacccaaacgtagatccagaattggcacttgccctgcggttgtctatggaagaagagcgggcaaggcaagaggctattgcaaaaaaggctgctgaagatacttctaatacagaacataacaatgtcccaagctcaaacagtgattctgttatggctgaaggagaacctgcctcaaatgctgctgctggtgacaaagaacaaccaaaggatgatgacgatctactacagcaggcacttgcaatgtcaatggagggtggtgcttcaggatctgcagctgtgactgactctgctatggcagaagctggtgcagttgaccctgacttggcattggctcttcaaatgtctgtccaggatgcaaacatgtccagtgacactgatatgagtaaggtgtttgaagacagaacgtttgtgtcatctatccttaattcgcttcctggtgttgatcccaatgatccatctgttaaagatttgctggcatcgttgcacagccagggagagcaagagaagaaggaagacacgtcagacaaaacagaagacgataagaactgatatagccatgttcacgcttccatgcgtacaaagaaattaaagaccggtctccattgactgcgtttactctcttggtcgtggagtttgtttatcctcatataacggtgctttgattataacttaccgccgagggaatttgtattatgacactgcaacaatcttctctccatatatgttcaagggattttcgtgtttc

SEQ ID NO: 22658 - DNA, 633 bp, Zea mays
  Clone ID: LIB3591-077-D6_FLI
cgaggcgatgaccatctccactccctctcctccctagtagtgtataaaaagccggcgccggccgtcgtcccctacccacccacccaccccgggcccctcctcccgctccatccatggccgccaacctcccggacgccgacgccgcggggttcaagctgttcggcaaggtcatccagccccccgacgcgcaaaaacgcggggcggacgagggcgacgacccgacgccacagacggcccttcctcctcctcctccccctcccccgcccccgcccccgcagcaggcgcccgcggctgggggtcccggcgccgagccgctgccgtgcccgcggtgcggcagccgggagaccaagttctgctacttcaacaactacaacgtgcggcagccgcgccacctctgccgcgcctgccgccgctactggacggccggcggcgcgctccgccgcgtggcctccgcgtccccgggccgccgcaggccgcgccccaccgcccgatcggcgcccgtcgctgccgccgcgtcgtccgcccccgcagccgccgaggaggtgggcgggccgcgttgactcggcggtcgtaggggggcgcggggtagggctccgccttccttcccgcgtgatgccggacggccggaagctt

SEQ ID NO: 22659 - DNA, 1479 bp, Zea mays
  Clone ID: LIB3591-077-E5_FLI
ctcgctcacccagtggggcagccaaagccgagccgcaaccgcaaagatcttgcgcggcctcctttccccagctcgtcactgtgccgctcgtgccatccaccctcggttcacccaaccaacaatccatccgccaccacaccccgctgcggcgatgtgcggcggcgccatcctctcgggtttcatcccgccgtccggggtgccggcggcggcagcggcggccaagaagaaacagcagcggcgaggctcgccttcgccgccgcggttggggcgccgcgcactgcagttgacggcgtgatgactccaaaggatggtgaaggagacatgcctactaccgctaccaactcagcagcaaataagcgcaggcggaagaaccagtacaggggaatccggcggcggccctggggcaagtgggcggccgagatcagagaccccagcaagggcgtgcgcgtctggctcggcacatacagcaccgccgaggaggcggccagggcgtacgacgccgaggctcgcaggatacgcgggaagaaagccaaggtcaatttccgggacgaagcggcggcagcagcaggtgctcagaaggcaccagccgcaactactccaactgcttgtggcaacgcagcgaggctaggtcctccacctccaccgccgaagttccgtgctgacgaggttttcgggaacatgaacggtggcactggcagcaacgatctgttcgcgattatgttcgcgttcagtgacagtagtagtaaggtcgttcgtgtggagccaggtgagggcgccgccggtttcctccccgcagatctgttgcccggcagtaagaggtctgcggctaacatgctgctgctctccgaccagagcagcgactcgtatggctcttgtgacttggggtgggagtgggactgggacgatgacaccatgacctcagactacgcctcagtctttgctccagctgctcccagtaacgttgtgccagcatggtacacgcaaggtggaccggtgtcgaagagaacgaggagcagctacggctacggtgcggccatgccgggcggctttgaccctgagacgaactaccagtaccagccgttgccttatgtcgtcgagagcagcccgtcagacggcgcgtcgacggacgacatggactgccttcaaatgatgcgggctggtgatgttccacaggatggggcgagcagtggtggtggtggcggcgacggcggcgatatctggagccttgacgagctgctcatggccgctggcgcttactgagaaaagctatgtgcatcgcattcgcatgtgctagacggctacttgctgtgccgtgaatggagtgtttctcagcttcgttttgcttttaattttttgttatgccaggtctcctgcttgtgcttgtggtgatgatgcaggagagccatggtgggtactatgcttttgctgccagtggaactgtaagacaatgtttatatagtatctatactatgttggtgc

SEQ ID NO: 22660 - DNA, 1219 bp, Zea mays
  Clone ID: LIB3591-077-E7_FLI
ctctaagccaaagcaagttgctaggtcctttgaaccagcaactgaagcttcctcgtctcatcatcgagaccagtaagcaacatggcggctaatctcaagtgggctcctgttctagccctcgtcgtcgtcgttgctgccatggttggcaccacgagcgccggcaacatcgcagtgtactggggccagaacggcaacgaaggcagcctggcggacgcctgcaactccgggctctacgcctacgtcaacatcgcgttcctcacaaccttcggcaacggacagaccccagtcctcaacctcgccggacactgcgaccccggctctggcagctgcaccggccagagcagcgacatccagacctgccagtcgctgggcatcaaggtgctcctctccatcggcggcgccagcggcagctacggcctctcctccaccgacgacgccaacagcgtggccgactacctgtgggacaacttcctgggcggcagcggctcgtcccgcccgctcggcgccgccgtgctcgacggcatcgacttcgacatcgagaacggccagtcggcgcactacgatgacctggcgaacgcgctcaagggcaaggggagcgtgctgctgacggcggcgccgcagtgcccctacccggacgcgtcgctggggccggcgctgcagacgggccagttcgacaacgtgtggatacagttctacaacaaccccgggtgcgcgtacgccaacggggacgacaccaacctggtgaacgcatggaacacgtggaccagcagcatcaccgcggggagcttctacctcggcgtcccagcgtctccccaggccgcgggcagcgggtacatcgaccccggcaccctgacgggcacggtgatccccgccatccgaggcattggcaactacggcggcatcatggtgtgggaccgctttaacgacgtgcagaacaactacagcagccaggtgaagggcagcgtctgatgggcataccgcatacgaagcttcaagctacagcacctagccatgcatatatatatagtggctattcgtcaagttatcggactgctagatacaaatataataagagcggatcatcgggagacaaagacgcatgtcagctattgtctcgttttctaagcaacgagcgagagctgcatgcgctggttagatttaatatggatattgcccatacgttatgtaattaaatcaaataaatgttaagttcatattg

SEQ ID NO: 22661 - DNA, 1040 bp, Zea mays
  Clone ID: LIB3591-077-H4_FLI
tagcgttgtagtattagtagcatcattattgcatgcgactgttttctctttatttaatcagtattgtgatactcttaagttgaccaagaaaacttagtgccttcaaaagtttatcaatggaggctggcaaaaccgctgtaattgctgacacaactgtagtcaggtcaaatgaagtctgatgatggtctgcttgactcctgttatcttaggcagtgtttggttccggagacggctgggatagaatggctccatgccagagagcgtccgtccgggaaattttggggagctggatcattcagcatttgagcataattttccttttttagagccactctgtcctatatggaaccgatccaaacaacaacttactttctgccacagtgactactggctagctataggctatagttgtattcagtattcatattgtcagtccgtttcagcatttctatcatggcagattatgctatatggatccttatcttgcaaagtaataggttttatctgtattattcttagtatatatttcagcatttctgctggcggatcatgccatgtcaacccctaccttgaaaagtaacttctattatgcacactacctggcttgagttaatttcaacatgttttccgatcaacatgacgtggatacatctagacaacagctctcattgctccaaaatttgacaaaatatcccctgattcttgcaggtatgccctatgtgcagcgcagaagtatcaacctcgggtaacaaggagccatgactgctcctccgatggctatcttgggaacttggtgggaataactagcggcatcactgcagcatctgtattgtcgaaacaaaagcagaaaaaacggtctacatacatgcaaggagatcaggatataatcctcttgtcagtctaaagttctgcccttggttccctgctaactggattgattggccttgccgcttattatctcagttccctatgaacgccttatggctgttgtatgatccataaattatgctaattatattatattgttagtcattcttttt

SEQ ID NO: 22662 - DNA, 695 bp, Zea mays
  Clone ID: LIB3591-078-A3_FLI
taggtgatcctgctgctgaaggaggcgaggcggcggtggaggaagcggcggcggctaagaagccgaagttggaggaggagactaaggaggtagaggaggcgtcggaggagaaggcagaggagacggcggaggggaagacagaggaggcgaatgagaagacagtggaggcggagcgcaagccagtgaagctggggccaaaagagttctcctcatccgtcgagatgttcgactacttcttcggtctgcttcactactggacgccgcagattgagttcaataagtatgaacaaatggtgctggaggatttgctgaagaaaggccacgcggaacctgctaagaagatcggggcaggagtcgaagcattcgagatacgcaaccacccggtgtggcaaagccgctgcttctttatccgcaggatcgatggatcctcggatgacttcagcttccgcaagtgtgtggacaacatactgcctctccctgaggacatgaaggtcggcaacggcaagaagtctggtggccaccacaagggtggcggtggcggcggcgggggtaggggaggaggccgtggccgaggcggctggcgtggtggccgtggccggggcaggaggggagggtaggatcttaattcttaacaggccctgcaattttgcccggttaataagacactggtggccgtggacacgaaggcgtttatt

SEQ ID NO: 22663 - DNA, 2551 bp, Zea mays
  Clone ID: LIB3591-078-D3_FLI
tcaccagagcactccacccacagccggcctgcccggccacctccgtctgcccactgccgcctccgccgatgccgccctcatcaccctctccgccttcctctcctccggccgcctcacgacctcctccccttccctcctccaccgcaccctccgcgccgccgccgaccaccgcctcccgcggctcggcctgcagctccacgccttcctcgtcaagacccgcttacttgccgaccccttctcggcctccgccctcctccacctctactccaccatcgccccgctgcaccgcacccgcctcctcttcgacaggatccccaagtccacctaccccgtcccctggaacaccatgatcctacggtacgcgcaggacggattcttggatgaggcgttcgatctgatggtggccatggaggaatccggcatccccattggtgcctccacctggaacgccgtcatcgctgggtgcgtccgagctgagaacggagagctcgccatcgagctgctaggcaaaatggtttcggttgggggagttgtgcccagtgtggccacgttcaacaccgtgctccacgtgatttcggcgttgcgcggggtgaacgtgctccgagagttgcacgcatttgtgctgcgcaacgctgaggttgtgggacttgggcctgtggatttggatcgactccaggaatccctggcggcaggatacatgtgcagctcctgtgtccagtacgcaggccgtgtgtttcgtgatgtcaggataagcacttgcttcctgggcaacctgatgatatcgggatttcttgacacggggcagcggaatcaagccttgggtgttctgcgagaaatggcgtttggctgtggtcatgaagctcagcatctgccatcggcttcgcttacgctggtcctccctgaggtcaatctggcaacaaagagaggcctagagatccatgcttatgcctatcgccatggttttgagtgtgacacctcggtctgcaatgccttgatggcaatgtatgcaagagggggcaagatatgccggtcagacaaggttttccaaggactggatgctaaagatgtcgtgtcatggaatactatgatttcaggctatgccacggttcatgattttgatctctcatttgagctgttccgtgaaatgcaacgtaatggtaccagacctgatgactacacatttacatcagtgctcaacgcctgcagctttgcctgcaatcacaggacagtaatggcattgcacgggcaaatgataaggatggggctttgccattcctatgttgatgatatgaattctctcatggatgcttatggaaagtgtggtttcattgctgaagctcagaagatatttgatgaaaccgagcgaaaggatacagtttcgtggaatatcatcatttcgtgctacggctacagcggttttcctcaacgagcaatcaggcttttccatcagatgcaagatcaaagctacaaacctaccagagtcactttcattgctgtgctagcggcatgcagccatgcaggcttagtagacgaagcactgcgttatttcgaggcaatgcacggagactacagcattaccgctgatgaggctcactatgcctgcatcgttgactgttttggcagagcaggtcagctccaacgggcttatgagttcatcagaggaatgccggtggttccaaatgcttgtgtgtggggtgccctacttagcagttgcaggatacacggaaatataggcctagcagaaattgccgcgaagaagctcgttgagctggaccctcagcattctggatactggatgctgctaaaggatatgtactcaaaagccaagagatggaatgatgtatcgcaacttcgagctgctatgagagataatggcgttaagaagtgcccaggttatagttggattgaggggcgagatagcgaggtccacagattccttaccgctgacaagcttcactcacaaagccaccagatatacgaagtactaggtgggttaaccgagcagttgatggatgaaggatatgaaatagatgtcgatttgacatatactgagtgagggatgtactagatttctacaacttgtcttgaaaatctagccatttagctgacatccctagtcccaacaccatgtctattgcaagcagccacgcgaatcttattcaatgattacaaggttgcacgagctaaagagttcagtttctgcccaggttagaagcgctaagaagtaggcgcaagatgttacattttgggctcgtcatctgatgtgtaagttgatgccttgtcacgaaaagatcagacccggagcattgtgtaacaagaatatacagagttcacagcctagtttcaatatttttttggtgagaaattctgattcaaatattccaccatgactcataggaaaggttcctcaagatttactggataagagaagacaaaatgagattgtggaaacagaaaagcagctgctgacttcagtggcttgtaaaatgccttaacaggagtccttgttggaaaatacagaaggcaaagcagcaacggactgttacttttg

SEQ ID NO: 22664 - DNA, 1266 bp, Zea mays
  Clone ID: LIB3591-079-D1_FLI
cccacgccgacaccgatgccgagagccggggtgtccagcagcgagagtagccgccgtggcgccggtgcgttcagaaccctctccgaagatcgccgcatcaccgtattctgctccgacggtcgcctctaccaagtcgattacgcgtggaacgctacgaagctggcgggcgtcacctccgtcggggtgcgtgggaccgactccgtatgcgtcgtcggccagcggagggcgaacacgcacgcgcccaaggacaaattgctggacatgaccagcgtttcgcgcctgttcccgatcaccgaccggctggggttgctcgccacggggatcgcaggtgaggggagagcattggcacatgaggcaaggaatcaaactgcagaatttcgtttcaattggggatatgaaatgcctcctgatgttttggcacaatggattgcagacagagcacagatctggacccagtatgtttccaagagaccttctggagttgttgccatgattctgggcattgatgatgagaaaggaactccacaactctttacatgtgatcctgctgggtattttttcggtcacaaggcagcaagtgctggccaaagagatacggaggctgtcaactttcttgagaagaaaatgaagaacaatccttcactaccatttcaggaaaccattcagatggcaatatcagcattgcagttcgccctgaaggctgacctcaaagcctcggaagtcgaggttggggttgtcaggacggatgatccaactttcagagtgctgacagaagctgaaatcgatgagcatctggaagccatcaacccagagccgcggcactctgaaatgctccccggtttattccgggataaactgacattggagaactgaaaccatggcgacctcagctgcattttgggcaccggaaagtcaaagctttcatgtggttctttacgacggctctatggacattggattagcggtttttgggcggttttttcgttccagtgactagcggttttcagtggaaaaacggtttggtaaacctactgggcacacacgaccggccatccgccaagtcaggcgagccccgcgcggtcagtgcttgacgacgtggtatcacagccgccgtctaccgtccctcagcggacggccgggccaattcatgcatcaccgagcaataccgagcaatactgacatctaaaatgttctttagccgtaccatatccaagcaatgaccatagcactagctatgaacgtggtaattattatggtttccccgtt

SEQ ID NO: 22665 - DNA, 650 bp, Zea mays
  Clone ID: LIB3591-079-E11_FLI
gagacgtcacgcctgcgcggctgcgcccaccatggacgaggaggagttccggcgcatgctcgacctcttcccggtcgtccgctcccgagactactgctgctccgatcttggaacatccagcagaggaaccagacagcgatcacgagttcaggaggcaactaagggcgataataaggactcgtccggtggacgagatatgtttatgcagaaattgaagatggctgcggagaataagattggagcgacaaaggcagagttcttctgcaagacattcgaagaagttcatgagaaacttgttcacagagagctgaatttggatgctgctaagaagttcctgagcgcatatgagagctgatgatgaacaataggtagatgctgcttaagggtcggtagttgccaatgatctggaaagttgttgatgctgttgagattttgatcacaggcaaacttttaacaacaggtagatgctgttgagcgcatactgataccgcctgattggttcaccgatcgcccgtagccagctcgtatgcagccaggctgtccagagactgttatttgggccgtagaagtggatgcactcaaaataaatgttgcgtttactcgtgcagcctcacgtcttttacgtgcatgcaattaaacatatgctcaat

SEQ ID NO: 22666 - DNA, 1910 bp, Zea mays
  Clone ID: LIB3591-079-H7_FLI
gcccgtcgggacgcctccccactttcccctcccccggatccgcatggcgcctctgcagcccgcgccgctcggcctcccgtagccgacgcccggccccgtcccaggctcatctttgcacagagtcattggaggaagtttgatgtttcagcagtactgtgacctttattagatgtctttccgcagcattgtgcgtgatgtaagagatggctttgggagcttgtctcgaagagggtttgaggtgaagtttctgggccaccgccgaggcagatctcacggtgctgtccatgagctgcgtgatccagccccagtgatccagagcagttgctgggctaatttgccccctgaattgcttcgagatgtgattgagaggttggaggccagtgaagccacatggcctaacaggaagagtgtagtctcttgtgcagctgtttgtcggacctggagagaaatctgcaaagagatcgttaagaatccagagttctctggaaaaatcacttttcctgtgtccttaaagcagcctgggcctcgagatgtaaccatccaatgcttcatcaaaagggataaatctactcaaacctactacttgtatctgtgccttagcacagctgtgcttgttgaaagtggcaagttcctcctatgtgcgaaacggacctcccgcccaacctgtacagaatatacaatatttatgaattctgaaaatttatctaggtcaagcaaaatgtacattggaaagctgaggtcgaatctcctcggcacaaagtttgcaatatatgatacccagcccccatgcaatgcagcagaacccgggaaaacaagccgtcggttctactcccggaaggtgtcgccaaaggtctcctccagcacctacaacatagcgcaggtttcatatgagctgaatgtcttgggtactcggggccctaggcggatgaactgtgttatgcactccatccctacctcgtgccttgaggctggtggcactgttcccagccagctggacagcatccttgctcgctctactgatgagtcatttggcagcatttccttctccaagtcatctgttgtggaccggtctatgcgtttcagcagctcaagattctccgacatctcaatgagcagcagccgcaggattggagacacggcatcgggagacaatgatgagtgcaaggagaggccattgattctccggaacaaggccccaaggtggcacgagcagctgcagtgctggtgcctcaatttcaggggcagggtgacagtcgcatctgtgaagaacttccagctcgttgctgccacgcagcccgctgctggagcaccaaccccatcacaggctaccccagtgccgcccgagcacgagaaggtgatcctgcaatttgggaaggtggctaaggacatgttcaccatggactaccgttacccactgtcagccttccaggccttcgcgatctgcctgagcagcttcgacaccaagctggcctgcgaatgaagccaccagtcatggctcaaagtcaaggacgatctgtctgtttcacgaagacggtggccccaaattttgctgggccaccattctgttgtatgttgttgatgccttcttaacttacctaggaagctgcgtttagacattttgcacctgatctacagctgctgctgtgtttctgtcctgatcgcattgttttccatagctttgctctgtggagcggcaacttgatctgccctgcccttaactagccggcaggtttattaatttggttttccatactatggttgtattaactgagaagagactccgacactttcgttgtgcctacctaagttctgtctgcctttgccctctgggatatgcaaatgtgcatcttgtaaaatttctgaattgcttttgtggcaagtcatagtaataaaagaactagcttccattc

SEQ ID NO: 22667 - DNA, 928 bp, Zea mays
  Clone ID: LIB3591-080-A4_FLI
caagtttcgtgggtagaggaggcactagatactgtgccagatcggggtctggtagtggcagttgggtgattacgacggagtgggatgggcctcctcgacaagctgtgggacgacaccgtcgcgggcccgcgcccggacaccggcctcggccgcctccgcaagcagcccgcgcgccccgccgccgttaagatcagtgatccggccggggacgctgcagcgctcgtgccgccctcgccggcttcgggtagcgaggagacgccggtgaaggtgacgcgcagcatcatgatcaagcgtcccgcggggtacccgtcttcgccgaggagcgcggcaagcacgccgccggcctctccactagggactaccccgcccatctcgccgtttgccggcgctggtggtcgcttcagaaggaaatcatcatccgacgcatatgagagggcaacccctccagggacgaccagccaccctcctcccttcgaagtgtgaaccggctgcaccctcacacttgttttgctccttgacaagcatctcttcacctataataaggtagaggcagggaggagagaagacgacatcaagaggggaacggggatgagttgcgggtttacctctgctgtgatatattgtaggtgccactatgtgtattgttcccccctatctactacgtggcataggttgtattctagtatgttgaaagctcatggtgccgtgctgtatcaataaggtgttatgcgcatagagtggctcaggaccagggctgcgtttgcgctttgccactggctgtgttgtatgtttcttctgctgctatgccattagggtttagggatggtgtgtggatggcgtcgtgcttgtagtgttagctgggtttgaagcggactacatgtaggtttgttcaatgtctggtatctattagctgaaggtgtttgcctgt

SEQ ID NO: 22668 - DNA, 816 bp, Zea mays
  Clone ID: LIB3591-080-C6_FLI
gtttgtgccatcatctcccgcgccgcgcgcgagtgcaacctctataaaagaagccacagtgcagcgtcgaagctcacaagcagcgagatctcgatcaaacagcttctctgatctcgctcagaagcgaggacatcagacattattgcaattgtatttgcacagcagcgagatctcgctcagaagagactctgaagagataacgagctgcgcttcttcgtcctcgatcaactagcttctctggtcgcttccatatggagagagctgcgtcaagctgcgctagcctcctagcacaaaggaggtgctactccgtggccgcggtcgtggtgaagggatgcgggcggaaggccgtggagaaggtggccaagcgcatcatgggcaaggaggtgaacaccgcggctgcctccggggagaagacgccgtgggtgccggacccagtcactggctactaccgcccggcgggtggcgccaaggaggtggacgcggcggagcttcgcgccaggctgctcaccaagaggatcgccaactgaatcaatctagctgcagagcagtgcggctgagattatttagcgccagttcatctcttgggcctagagcatgacggtgctgtatctttttgaggcataactaggtgagtgcccgtgcgttgcaacggaaacacataataacctaacgtagtctgaaacaaatattatggtctgaaacatatatagagttgcaaagatgggtccaggaattgaggcgaacacagatccgaatttcccaggatagtgaaaatgacccatgattattatagaaaacataagtattcacattctg

SEQ ID NO: 22669 - DNA, 2286 bp, Zea mays
  Clone ID: LIB3591-080-D1_FLI
aagaaacacatttagcagtccagactctaatatcatccaacgattcatggcctgttggcatgttgctggaccgtcactggttcacaggcctctagaggatacttggccagagcgggtgcgccgtgcgcgtgcgcggcggcggagtgcggtggtatccagcgcgtgtgcgccgatgtggaggccgatgcagcgggcccgggctttgaggccgggatggggagcctcagggagtgcggcgacggctgcgcgtctgcgccgtcatgtgggaaccgacggactcagcgcggcgtcgctgtgcggctgtgcgtcgtgtgccacctgcacaaggggtgggggctgcacgctgcggaggcctcaactgcgggcagtttgtgtgcaagtacgccggtaaagaagcaggttctgttccatgacggacgaaatgattccggatgaagctgtgcgcccgtgccgcattccaaactgcaaaaattgctggacgcggctccgtaccatgttgaacaaactgattttatatcgagcgatgaggcgatccaaacatgctgttaaactcctacttaccaagcaaaacaattgatcaatgattactcgaactcgactgccaaacgggcactataaacacataccataataagctaaactgtactaatgcacaagatacattaaaaatgccgttttagtagattgttaaccatgtttgtgctctccacatgtcatagaaatattcgtataatttgttcacttgtgtttccagttagttgttcatctatgcctagctttgctttggttctgttcttgtcatagctgaaaaaagaagcgaattcattgggcaaagccttatatatagttgatacataaggattcatgtaaaatacatttgcagtccggtacagtttttagccttgtgccctttgcaaaaaggactacaagaaccatgcctttttccagcgtaagctgctgttgacttgttgaatagtttattcacagggagtttagactaatgttaatgtggtactccatctgtcccataatataaggcgtaaccactttttgttcttgtcccataatataaggcgtgctttctctagacacacgcacatcgacgcagtgtcatagaaaaaattaaatacatttcttagtctttaaaccagaggtagttacgccttatatactgagacagagggagtaatagagtttaggcgcgtcagctctaaacagtaaactgatagtacattaacgtttatgattagttttgcgccacattctatccaaaagatccagtgagtagattagcttgtggaataatttaacttcttgcccctgcatcattttaagcttatcaagtttcaggaattctccacacaactgttgatttagtgatcttttatcatcagtttataaggttgcatcagaatgaaagattggattttgtttagcctgacattcttgtgtttggctcatacaatcatataagaggtgctttatgactggatcagttattatccagaatagtgtgttgagcttgtgcgctgatgtatatatttttgaacgcattatgtgatgatatttgaatatataatattacagattgttggtattatttagaaactttaactaatacatattgtctttaaaaaaattacattattttttatttgttccccacagtttcaggtcacgttgagttctgactgttgactagcgaacctatagtcactgttgctttcttttgtggtcatctttgtatttaaactgcagggagtttttgacaactgaagaagcgcggagacagcacaagctgtatgatgaacttgcctctggtggcaagctctgtcccgcgcagattgtcataagagagcacatcccttctagtaaagcatgcttaagagtcaacattgatgcaaccatagtgggaaatgtggctcgttttatcatacagttgccttcatgtgatggaggcaacctgcaccccatgctggtgaggagctctgattcgttgctcccaaggctctgcttctttgctgccaaggatatcgtggagggagaagagctcaccttcagttgctgctaagggtttgccatgcttttgtggaagctcgggttgttctggtgtgcttccttcagaagaaacttaagaactgatgccatctcctaggatgtcttacaaatgagttcgattctatttctgacttcgcaaataacattggcttcatgaggaattgtctggcccattctttagccatactgtaatgtgtgcaaaaaaaaacaagcagtcattttttggtg

SEQ ID NO: 22670 - DNA, 2091 bp, Zea mays
  Clone ID: LIB3591-081-A12_FLI
gcatcccgcttcccgcattcctcatcgaggtccggtccagcagccttttgcgccttcgtgtccctcccctccactccctcaccgggggctgggctggtggggagtggggactgggggcagtcgccacgccgcagtccattctttcgtcacccatcgcagctccaacacctctcgctagtcgtcatggcggcttccgcggcagcgttccccctctcaccgccgacgcctcctcttcgactttcacatgtcttttgatatcacagaaaaggattgcccctgccttcactgctgtgaatgccagggacgtttctgtcgccctacaatatatggacattggacttgatagttggcaaactttcttctatatactggacgttccagctttcgccaacctgctgctttaaccacatcttttccttctttcccgattttgcctctcactatcatcaattaccgctaaaagtgaaacaagtgttctccctatggccaagacatcacttcctcctggattccggtttcatccaactgatgtagaactcacagtctactatttaaagaggaaactactgggaaaacacttacgctgcaatgctatcactgagattgatctatacaagttcgccccttgggatcttccagagagagcttccttggagagtaacgatctagtgtggtatttcttttgcccgcgcgataggaaatattctagtgggttaaggactaatcgctcaactggagttggatattggaaagctaccgggaaggacaggccggtggtatataattctaggactgttgggatgaagagaactttagtgtttcatcttggcaagccaccacgaggtgatagaactgactgggtaatgtatgaatataggctggaggacgaggaaatagctgcttctggtgttaaactggatgcctgcgttctatgcaaaatctttcagaaaagtggcccagggcccaagattggcgcacagtatggtgccccattcaatgaagaagactggaacgatgccagtaatgtagagtgttctccatgtgtgccttctgtggccccttgcgcacctgaatcaagtcgtggtgggttgaattctgctggtcaacgcctggctgtgagttatgatgtcaaggtttccttgggctcctcggcagaaggtatcaacagacctgctgtcaatggagttcatcctgtcagaccttctcctgatgctcctaatgactgcatacacattcaattgctggctgaggttatgagatgttcctcaacctcaatgcatgttttacgtactgctggtgacgatggtttgctggctgattcaactgctgactacagtagtgataatagaatatctttggatgctattgaaactatattctgtgaagtggatgagcttgggccccaggctatggtgaacaatactaaccattgtgactcatgcggtgagtatttgattcaccctacgatggtggcactaggagctgaacagtacttagagctaaatgacctgtccttttcgctcaccgatggtcctgattcctgtggcgtgcttttctctaatggtgtatctgttgagcaactaccggatcttgagctcaggtttgagcagttctctcctgaccacatctccaataccgctattgcttccacatcaacaacggttggttcatctgcttcagtgcccttattggaggatcacaggacctgattcagaattggagtcatctggcgcacatgttaattgaatctaggaggatctgcaggacaaaggcataatgctccctttttttcaattttcatgaagttagaatttttttttggatgaaggcacggattagtgaccacttggcacagaaatatgtttgtgttgcggcttgtgaatccaggaccatttctctgcctgtagttttgcatggtagaactagatgggcaacaacaaaatgtgttcagtattgaataacgcactcactgcattaactactttgcctagcttagtatagtattctggatcttgaggcagggtagaagtgggggtgtgggacaatgtactcacagcttgttgtcatttagcagcaatatcttgtttcggt

SEQ ID NO: 22671 - DNA, 3067 bp, Zea mays
  Clone ID: LIB3591-081-E3_FLI
tgctcttctccggctcttatggttgctcctatacccgcgtcagctcttcagccaccagccccagggcaatattttgggaacagaccttctttctcatataacgtagtttcgcatgctaatgctagattgcctactggtcagcagtttcaaccggtcactggagcaaatcttgctggtccaatttctagatttgttccaccaggttccttgcagcctcccacccctgggcacataactcgccctagtacagcgttcccaggatctatggcaccaaatcctcctggatctattcagttgccgttttcagtgccaagaccatccaatattccttttggtgctattgcacaacagggcagctcagacattaataatttgaaatcggactccccaagggcaccagaggttacaccccaagccatgcagttatctactggcatgccatcaaaatctccttcaacaatcgcaagtgcttctggaagtccttcaatccccatccagacactaacaaattcatcggtgccacctcgccctgaggtatttggagccactagaccatctgtacctgcacaaccttctgcaactgtctctaatccaacaggtttccttgggaggcctatagttccacctgctgctcctttgccccaaacaccaccaccaattgcaacccaaggtggcacaccacagaattctcaacgaccgttttacccgtcctatccttcaggacctggtattgtcccacctcaacctttatggccacaccctcatcctccacaacctactggatttcagcagcctcccttccagtactatccagctggtcctgtagggtctcttggcaggccaataactggggcttctgctgcaactatggcctttgccaatgtgcaaccacctggcgtgtcaactggtggggataggaaagtacaagcatcaacaaatgcaggatctgaacagtccactcatgctgcagctgagccagattctacaggacatggaggtcaagtcactgagcagctggaggacaatagaaatactggagttcaggattcagatgcatggtctgctcacaaaactgaaactggtgttgtatattattacaatgctttgacaggagagtcgacttaccagaaaccaaccggttataagggggagcttgagaaggttgcaacagaaccagttccagtttcttgggataaattggctggtactaactggagcatagtaactacaagtgatggaaagaaatattattatgataacaaacaaaaggttagcagctggcaacttccgccagaggtgtgtgagatcctcaagaatgcggaatctggttccttaaaagaaggttcaacttcactgcaggatgctgcaactatagagaataagggagtaataagcattgacgcaagtactcctgccatacagacaggtggccgtgattcgttgccacttcggcaaacagttgcccctgcatcgccatctccattggatttaataaagaagaaattgcaggatgctggtgcttccagtgcgccttcagctctggctacttcatctgctacctctgaattgaatggatccaaaccagctgatgctgcacttaaggggcaactagtggcgaataatggtgagaaattaaaagataacaatggtgatgtgaatatctcagattcttcttcagattcagatgatgaggaacatggaccaagtaaagaggactgcattcgtcagtttaaggtgatgctaaaggaacgaggagttgcaccattttcgaagtgggagaaggaacttccaaaaatagtttttgacccacgctttaaggctattcctagtcactcaacaaggcgggctatatttgaccactatgttcgcacacgtgctgaagaggagcggaaagagaaaagagctgccctgaaggctgcagtagaggcgtataaagaattacttgaagaagcatccgaggacatcaaccagaaaacagactaccaagaattcaaaagaaaatggggtgctgatacaaggtttgaagccttggatcgaaaggaaagggagattctttttagtgagaaagtcaaggctgttcaagaaaaagtccaatcaatgcgcaaagctgtcatagctaatttcaaatcaatgcttcgagaaagtaaagatataacttcaactagccgatgggcaaaagttaaagaaaatttccgtagtgatccaaggtacaaagccatgaagcatgaagaaagggagactatatttaatgaatacatagtggaactaaaatctgctgaacaggaagcagagcaagctgccaaggccaaagtggatgagcaagccaagttaaaggagagggaacgtgaaacacgtaaaaggaaagaaagagaggagcaggagatggaaagagtaaaaatgaagatacgtagaaaagaggctgtgtcatcataccaagctttacttgttgaaatgattaaggatcccaaggcatcgtggactgaatccaaaccaaaacttgaaaaagatccacaaggtcgtgctcgaaatcctgacttaggccaaggtgatgcagaaaagttgtttcgtgaccatgtcaaggacctatatgagcggtgtgtacgtgatttccgggcacttctatctgaggttatcactccagaggtagcagcacggacaacagctgaggggaagacggcaatcaactcctggagtgaggcaaaaggtcatctaagatctgatctaaggtacaataagctaccgagtaaagacaaagagtctatttggcggcgctatgctgatgacttgacgaggaaactcagacaatcagacacgaaggagaaggacaaatcggatacagatgggaaacaacctaggtcctctgatccacctaggcggaggtagcttgtagtaacagtcacttgtacttcctaggtgctgctccttatatttcttactgttgatagttaagggtctgctcgcactcgtctgcaacatttgaatagtcactggctcactgccacttttgatactgagagtttgtgttgtaggaggttttgccttgcaaatgtttttcccgttctggatc

SEQ ID NO: 22672 - DNA, 749 bp, Zea mays
  Clone ID: LIB3591-082-A1_FLI
tttcgccaacccctcgacccgatcggctccattgatcgtacctcgtcgtccggtgatcctctcgaccgattttcccccaaaaatagctgccggagctcgcgataattcggcgggttttactacagtttagtttgtctctgatgctatccttggatcgatctcatctttgtcgttgacttgcgcaggttgtcgatggccaggacctctttcaaaatggagcacgacctcgagaaaaggcagtccgaatctgccaggatcagggataagtatcccgacagaattcctgtgattgttgagaaagctggcaaaactgatgtccccgagattgataagaagaagtaccttgtccctgctgatctcactgtcggccagtttgtctatgtggtgaggaagagaatcaagctgagcccagagaaggccatctttgtctttgtgaagaacaccttgccaccaactgcctctttgatgtctgcaatctacgaagagaacaaggacgaggatggcttcctttacatgacctacagtggtgaaaacaccttcggctctgcctagagcaatcgcccctgccactgtaaataaacgagcatgatggggctgctgctattgtaaacctgtgtatatacctcagtctctagtatgctgctgccggattgcttcaatggcttcaatgacacccttagctttcaactgtttggatttctcctgtgacattgaattccttcggtatcgaaacatttgatcatttcact

SEQ ID NO: 22673 - DNA, 1071 bp, Zea mays
  Clone ID: LIB3591-082-C3_FLI
ccgcaccgcaggtaagatcaaagaggaggcgatggctggcggcgggcaggcggcgatttcgttcatgacgcggatggcgaaggtggcggcggggttgggcgtggcggcgtccgcagcctccacgtccttctacacggtggacggcggagagcgcgccgtcatcttcgatcgcgtccgcggcgtgctcccgcgtacgatgtcagagggcacccatttgctggtccccatccttcagaagcccttcattttcgacatccgcactcgccctcacagcttctcctccacctccggcaccaaggacctccagatggtcagcctcacgctccgcgtcctgtcgcgacccgacgtcgaacacctcccggacatcttcacctccctcgggctcgagtacgacgagaaggtcctcccatccatcggcaacgaggtgctcaaggccgtcgtcgcgcagttcaacgccgaccagctcctcaccgagcgtccccacgtctccgcgctcgtccgcgaatcgctcaccaagcgcgcccgcgagttcaacatcgtcctcgacgacgtcgccatcacccacctagcctacgggcaggagttcgcgcaggccgtcgagaagaagcaggtcgcgcaacaggaggccgagcgctccagattcctcgtcgcgcgcgctgagcaggagaggcgcgccgccatcgtccgcgcagagggggagagcgaggccgcgcgccttatctccgaggccacgaccactgcgggcaacggcctgatcgagctcaggaggatcgaggcggccaaggagatcgcaagcgttctgtcgcgcacgcccaacgtctcctacatccccgccggcgacaatggccagatgctgctcgggcttaacgccgcccggtgaatggatcgtctttttcccgcataattagttagtagtgccctattgaagtacttcagtaatttcagatgcatctacttagttatggttttgtggaacgattctatgctgggtaaagatggtgatatgcattgctcataaagttcggcagatggggaatttgccagaatactctatcgtaatcacttattgtg

SEQ ID NO: 22674 - DNA, 673 bp, Zea mays
  Clone ID: LIB3591-082-C5_FLI
cgccaagccttttgttcaccgttactccgttcaccccgcgaggcgtgactcgtgagctctccgtgtcttggcgatgactgggcgaccgacgatgcagccgtaggccaggggccccaggtcttcctctggtccttctccggcgaagagcaccggtcagcagttactgtggacgatgttcgtttgtgtttatcattttcttggtcttgttcggggcaacaacgacattgggaataagtgtacggcagacaaacagtaacatgggaaggaaaggctcagaaatgtcaccaagtaaaaggtatcccttgaggtctccacatagtagtggtagagttcttcgctctgccttagccaatgataataaggacagtgagcctctgaatgctgctgctgctacccaagccgctgtgaaaaaaagaagtggcagtcagttggatagtcctaatagcagtgtcaggttgtttcactctacatcaaaaaataagaacgaggcatgtagcgggcctctaaatgacaggatccctgataagccagctgcaaataaaagaaaacgtgccagtccttcacaggtgggaagttccagcaacagtgtcagggtgcttcgctctgcaataaaaaataaagatgaggcatgcagtaaatctctaagtgacaggaccgctggtgagccagctgc

SEQ ID NO: 22675 - DNA, 1697 bp, Zea mays
  Clone ID: LIB3591-082-H2_FLI
aagagtgtccacaaggggagatcaaacatctgaagaaactctatcagtaccccatgattacaatgatgttggcagagaagctagtctaagtttggcagagccatcatctattgatgagcatgcacaaagctctgccaacaacttttactatgactatggtgaatggagggttatctgggatccattctataatcggtattatttttacaacatccagacacaagagtccacatggtgtcctcctgaaggactggaggattttgcatcatattgtagcccagatactactaaagagctagctgaactgggatctcagtgttcaagcatggcaccacaagagaacaatctggctactcatgtcaatcatttagaagcacaggagcaagatcactgcattcatgatttatctgacattcctgttgaaaagccaatatatcaaagtatgataactacctctgacaaagcacagcacactgaaaataagtacagcgattcaacaactactgtgttagagatgaaccaggaagttgctagcaccaaaacgaaaaagagaatcattcatgccaagacatggcagggaacgtctctaatgacatcatcaagtactgggctcagcggtattcacttttctcactttttgatagtggtataaagatggatgaagtagggtggttttcagttacgccagagccaattgcaaagcatcatgcatctcgtgtgggtgcgggagtaatgattgattgtttcacaggagttggtggaaatgccatccaatttgccaaaaagtgcaagcatgtaattgcagttgatattgatccacaaaagattgattgcgcgcatcataatgcatccatttatggagtaaatgatcacatagatttcattgtaggtgattttatacatatagctcctcatctgaagggagaaactgctttcatgtcgcctccttggggtggccctgactatgccaaagttgatgtttatgatatgaaaagcatgcttattccttgtgatgggtactctctttttaaactcggaaccatgatagcttcaagagtagtgatgtttcttcctcgcaacattgacctaaaccaattggcggacatgtccttgtctgtggatcccccgtgggcagttgaggtcgagaagaacttcctcaacggaaagctgaaagccataacagcttactttgaagaacaggatcgttgaaccaagcatcggcgctggtgatacaaatcatcttgttagctatgactcacgacaaatttttgtggtgaccctaaacagaacctttgtgttcggagacagaaagaagcggtttatcatcttcaccgagcatagataatttatttgcagagatgagtcattggtatcatacaaaagcagctcagcttatctcaattcacagcaagtgaaactgtcgaaggaaaactacaaggctgacagtcgaacgcgtgggagttagcttaattttgccttatgataagcaagcatgcttcctggtttatttcatacagctactagtagtttcagctgcaacagttgtgcgttggtgtgcgtgtgattctcacatatctggtcctgcggatgtgagtgatgcaaatgtatgtgtcatcatcccatgtaagggtttgtttgtttgctctcaatctatgtagattgagtgggattaagtgagtttaaatctcagacaagtc

SEQ ID NO: 22676 - DNA, 1462 bp, Zea mays
  Clone ID: LIB3591-082-H3_FLI
tgttcagtagcaaccgggcaattataataccccacacatctcctttggcgcggattcgacctcttacagggcgatatgttccaccagaagtggctgcagtccgtgtacctcttctccacctttcaaacttccaaataaatgattggcctgagctttcggcaaaaagctttgcaatcatggttttgatgcttccatctgatagtgcaagaaaatggcatgtacatgaattggagctggttgaggttgttgctgatcaggtagcagttgcactatctcatgcggctattcttgaagagtccatgcgagcacgtgatttactaatggagcagaatgttgccctggatttagctcgaagagaggctgagatggctatccgtgctcgcaatgattttctagctgttatgaatcacgaaatgagaacacccatgaatgcaataatagccctttcctccttgcttttggaaactgagcttactcctgagcagcgtctaatggtggaaacagtactgaaaagcagcaatctgttagcaacactcatcaatgatgtgctagatctttccaaactcgaggatggaagccttgaactggagattaaagcattcaatcttcatgctgttttcaaagaagtgatgggtttcattaaaccaattgcatctatcaagaggctatctgtatcggttatgttggcaccagatttgccgttatgtgccattggtgatgaaaagagactcatgcaaactattctgaacatctctggcaacgctgtaaagtttaccaaggagggacacatcacacttgtagcttccattgtgaaggctgactctttgagagagttcagaaccccagaatttcatccaactgcaagtgatgaccatttctatttgaaagttcaggtaaaagatacaggctgtggaattggtccacaggatctacctcatgtatttacaaagtttgctcatcctcaaagcggaggaaaccgagggtttaatggtagtggtcttggccttgccatatgcaagaggtttgttagtctcatgggagggcacatctggattgacagcgaaggaaccggaagaggttgcaccgcaacattcgtcgtcaagctcggcgtgtgtgacaacacaaacacctaccagcagcagctgatccctctagtatggccaagcagcgcagactccgatttgcgtgctccgaaacctcttccggacgggagaggatctactcccttgaaatctcggtaccaaaggagcgtatgagcctagtgtaaatgattgacggcatagtgccaagtaggggaccgattagtgccaccgtctaattttgtttgtaaccctgtcatagcaggcatatgatgtacaaatactgtaaagcaaatggagactgcggccgtgtatctgggtggcaacgctgacttgctgcattgagtggtatatacatatgctaccagcggattgaattgctt

SEQ ID NO: 22677 - DNA, 507 bp, Zea mays
  Clone ID: LIB3591-083-A9_FLI
caacgaagtccagccagctgagctgagcctcgtgaaccagagcatttgctccttcctcgtcctcctcgatcgacctctctccttggtgccgctgccgccatatatgaactgctagcacgcgcagcagccagcagctgccgaccggcctataatcagaaggccagaaaggatcgatggagaccatcaagtgctgcatcgcgtgcatcctgccgtgcggggcgctggacgtggtgcggatcgtgcactccaacggacgcgtggaggagatcagcgggggccccgtgctggccggggagatcatgaaggcgtaccccaagcacgtcctccggaagccgccgtccacgtgcccggccgacggcggcatcgtcgtgcagaagcccgtcatcctgccgcacaatgccgagctgcagaagggcaagatctacttcctcatgccggtcatggccaccccggcgcccgagaagcccgccgcgaagccacagccgccgcccgccgccggccaatccg

SEQ ID NO: 22678 - DNA, 906 bp, Zea mays
  Clone ID: LIB3591-094-G10_FLI
ctccagagtcctgctcctgccacagtgccagttgcgcctcacgcagccacgcaggaataggataagcactatactacgcacgctctggcttccgcttcgtagatgcatgcgtgtcgccgccggaggctctcgccgcgcacgcgtcgcgcgctgcggtggtaacgacttcacggggtgtcccagcgtagcgtccgcgtcggcgcacacgcgccggcgcctgcccttgcggcgcaccgcccatcagctgctataaaagggcggcacaccgggtctgagtagtcgtcatcaacgacagccccagacaacactcaccgatagcaagtagcgccgccgacgtttcgagagcagagtatccaagctagccaagcgcgcacctcggtgacctagctagctacctagctagttcaggcgacgatatggcgtctggtcaggagagcaggaaggagctggaccgcaaggctcgcgagggcgagaccgtcgtccccggcgggaccggcggcaagagcgtcgaggcccaggagcacctcgccgaagggcgcagccgcggaggccagactcgcagggagcagctggggcagcaggggtacagcgagatggggaagaagggcggtctgagcaccacggacgagtccggcggcgagcgcgccgccagggagggcgtcagcatcgacgagtccaagttcaccaagtagtcctatcgcgtgcgtgcgtacgcagcgttcgtagctgtctgcgtagtgtaccttggccgtagctagtgctactctctactttggagtagctgaatgataataatgtagctagcagcatgcatgtaggcgatcatacatacgtacgtacacaggtacgtgtgtgtgatcatgtatgcttccagaagggtatcctagcttaatcagtcacgtcgtc

SEQ ID NO: 22679 - DNA, 713 bp, Zea mays
  Clone ID: LIB3591-094-H5_FLI
gagcagctgctgggcagctatccagcgggccactgagtttaccttactcttactcttacatactactaagatcgctaccagagcatggcgggaacttcgtcgtggtcgtcgtcttcatcctgcgcgtcgtcgttcgggtcgcccgaccacgatgtcgtctgcgtcaccgagccggactctgtgggcgccgtcgccgacgccgagggaagcgtcaagttcctgtgcagctacggcggcaggatcctgccccgccgcaccgacggcacgctgcgctacgtcggcggcgacaaccgggtcctctccgtcgaccgtcccatccgtgttgcagcggaagctgagggaattgtgcggcggctgggaagcgcacctgcggtgtcagctaccgacggaggacctggacgcgctcatctccgtcacctgcgacgacgacctcgccaagctgctcgaggagtacgacgaggctagcaaggaccgcctccagtcgctcaagatccgggcgttcctgttcccgactaggacgccggcgccgtccatactacagcgtaggagcccgccgtcgattgctcacctccactggcaaaacacttccccgccgccggccgcagccggcgtctcgctgacgtgcgcgccgcggtggtgggcagcgccccaggcctctcgccaggcgcaggcgccccaggcgcagaactacgaccgacacagcctcggtgagg

SEQ ID NO: 22680 - DNA, 810 bp, Zea mays
  Clone ID: LIB3591-095-E8_FLI
cactctctcttatccaaacgcccccgtgccccgtctgcgtcgcgtagggttttggcaacttgcacgtacgagagcgtccatggacgacggcagcagcaacaaggtggttgaggacgtcgcggaggaggaccccggccgccgcggcggtccatggaggacggatgaggccgacgccaacgagaaggcgcctcgcccgagcaggcgggtcgcttccctcgacgtcttccgcggcctcaccgtcgcgctgatgatactggtggacggcgccggcggcgagtggccggtcatcgggcacgcgccgtggaacggctgcaacctcgcggacttcgtgatgcccttcttcctcttcatcgtcggcatggccgttcccctggccctcaagaggatcccggaccgtggccgagccgtgaggagagtggtcgtaaggacgctgaagctgctcttctggggcatcctgttgcaagtggaatgaatgtgtccaggcggttactcccacgctccggacgaactggcgtatggagtcgacatgaggcacgtgaggtggggcggaatcctccagaggatcgctcttgcgtacctggtggttgcggttctagagatggtgacgaaagacggcgccaaggttcatcaggaccagccgccaggttcttcaggccgcttctcccgtgtattcagaatgtatctctcccagtggtacgcaagaaaggctcgggtttttcctttccagtttcgcaaaggttccttccattccatctcgacaacgcattgcatctatctatatgtataaaaggatcgtcgcgtgctgcattc

SEQ ID NO: 22681 - DNA, 612 bp, Zea mays
  Clone ID: LIB3591-095-F7_FLI
atgcgcgccatcgagagcccttcttccctggacgaccagcagtggctcacctactgggtcctgtactcgctgatcaccctcttcgagctctcaagctggaaagtcctgcagtggtttcccctgtggccgtacatgaagctgctcttgtgctgctggctggtgctgcccgtcttcaacggcgcggcctacatctacgaggcgcacgtccggcgctacttcaagatgggcacctacgtgagccccagctacggcgagcgccagcgccgggtgctgcagatgatgagcctcgacgcgcgcaagtccgtcgagcgcttcatcgacacgcacgggcccgacgcgctcgacaggatcatccgagccgctgaagaggaagccaagagggagaaacctgaattgttccgggtggaaaccgaagcaagtctcccatcggttgggtagtcacttgtgcagaaatcgtatcgtatgcgtgtgtgtggttgatcattacgtcgggcttgcccagcagttggagaagagatgcccggcgcccatgagagcatgcatgcatatatgactttgaaagaagccgcgaatttggtgtacttgttaatgaaaatttggcttggacctgtg

SEQ ID NO: 22682 - DNA, 810 bp, Zea mays
  Clone ID: LIB3591-097-A11_FLI
acatcgacagctccggcgaggagcggcggagaggtggccgaccacaccccgagagccggaggcggcagcgacgacgaggactccggcggtgggtcgcgcaagaagctccgcctgtccaaggaccaggccgccgtcctcgaggagagcttcaaggagcataacacactcaaccccaagcagaaggcggcgctggcgaagcagctgaacctgaagccgcgtcaggtggaggtgtggttccagaaccgcagagccaggacgaagctgaagcagacggaggtggactgcgagttcctgaagcgctgctgcgagacgctgacggaggagaaccggcggctgcagcgggaggtggcggagctgcgcgtgctcaagctcgtggcgccgcaccactacgcgcgcatgccgccgcccaccacgctcaccatgtgcccctcctgcgagcgcctcgcctccgcgtccgcgtccgccgaccaggcgggccgtgcagggccctgctggggccctctccccgtgttcgtcgacggcccagcccggaggccgtgatccacgaccacgatatggcatgagatggatgcgcttgctaatcgctaccgctagctaagtagctagtgctaattagggctggatcttctttttttctttgtttggttcttattatactcgcaggctattacagcttagtagtgtttattagtccgatatgataaaaatcttcgttgtttggcagtgttttatttgctgaaaaatagataacgatgtcttatgtctttgtactcataagtgatgcaaaattgtcttactactactttgcat

SEQ ID NO: 22683 - DNA, 564 bp, Zea mays
  Clone ID: LIB3591-097-E2_FLI
aagcgtacgtccagtccaacactccaatccaatccaatccaagcagagtttcagtcgattatcagtccagattccacgggcacaggcggcgcgtgcgtacatggcggcggaggcggaggtgggttcgggtctggctgcgggggagaagcagaggacggtggtggtggtcgctgtggacgacagcgaccacagctaccacgcgctggagtggacagtgcggcacgtggcggcgcccggcggcggcgtggcgggcggggccgccgacctcgtcgtcgccagggcgcgccgcgtctgcgccgccagctcggcgcgcgccctggtcgaggtggtggaaggcgagcccaggaccgtgctgtgcagcgcggcggagaagcaccgcgccgacctgctcgtgctgggcagccacggctacggcgccgtcaagagggcgctgctggggagcgtcagcgactactgcgcgcaccacgcgccctgctccgtcatgatagtcaagcagccaacaaaatccaaatgaaaaaaacaaaaaatttgccagcctgctgctgatgatgaaggtggtgatcc

SEQ ID NO: 22684 - DNA, 1040 bp, Zea mays
  Clone ID: LIB3591-097-E7_FLI
ggtgcgcgagtcggagctggtgcagggtcacccttcccctcggcctcaagagctctgcggttgccgcggccaagggcgtccgtggagaagcgggagcaggtggcggcgatggaagagcaaggcggccaggcggcgctcgggtgggcggccagggacgactccggcgtcctctccccctacagcttctccagaagggttcctaaagacgacgatgagcactacgtggtccgcgtccccgacggcctggcgctggaccgcaccgcgccgctgctctgcgccggcgtcaccgtgtacagccccatgatgcgccacggcctcaacgagcccggcaagcacctcggcgtcgtcggcctcggcggcctcggccacgtcgccgtcaagttcggcaaggccttcgggatgaaggtcaccgtcatcagcacgtccgccagcaagcgccaggaggccatcgagaacctcggcgcggacgagttcctcatcagccgggacgaggaccagatgaaggcggcgacggggaccatggacggcatcatcgacacggtgtcggcgtggcacccgatcacgccgctgctggcgctgctgaagccgctggggcagatggtggtcgtgggcgcgccgagcaagccgctcgagctgccggcctacgccatcgtgccgggcgggaagggcgtggctgggaacaatgtcggcagcgtcagggactgccaggccatgctcgagttcgcggggaagcacggcatcggggccgaggtcgaggtcatcaagatggactacgtcaacacggccatggagcggctcgagaagaacgacgtccgctaccgcttcgtcatcgacgtcgccggcagcctcggctctgccgcctaggcatggctgcaaaggtttcaatcagagcccagccgcaataatttgttagctaccgaatgaatgatggtctacgcttgttgatgagttggtgctttgtcgtggttttgtggatgtaataattcgatgtacaaataaaaaaaggggagacaaggtgcttgttcccttggtttggtgac

SEQ ID NO: 22685 - DNA, 2596 bp, Zea mays
  Clone ID: LIB3591-103-E1_FLI
ctccgtcacacccggctcgcaaaccctagctcgccccggccccacctccggccccgttcgtcggtgctatgtcgaagcggccgaagctcgagggtttcagcatcccgcggcccacctcctacaacttcgagcgctcgcagtccgtgcagcggctctaccgtccgaccgatgacccagacctcgacgacatcgccttctccgacgacgccccctcagatgcccaagccagcaccgcggtagaaggaaaggccgagaatgaggaggagatggacccgctcgacgccttcatggccgagatccaggaggagatccgtgcgccgcccccgccgcccaagcccgaggcgcttcgccgcacggattccgacgatgacgaggatgaccccgtcgagagcttcctgcgggccaagaaggacgctggcctcacgctggccgccgacgtcatgcgcgctggttacgactccgatgaggaggtctacgccgctgccaaggccgtcgacgccggcatgatggaatacgactctgatgacaaccccatagtcatcgacaagaagaaaatagagcccataccagcactcgatcactcgaccattgagtatgacgccttcacaaaagatttctacgaggagaagccatcgatttcaggtatgagtgaccaagaggtaacagattatatgaaaagtttgtcaattcgtgtttctggttttgatgtgccgaggccaataaaaaactttgaggattgtgggtttcatgtacctctaatgaatgctattgccaaacaagcttatgaaaaaccaactacaattcagtgccaggctttacctattgtactttcagggagagatatcattggtattgcaaaaactggctctggtaaaactgcagcttttgtgctccctatgattgttcatattatggatcagcctgagcttgagaaagaagaaggtccaataggagtcatttgtgctccaacaagagaattggcacatcagatatatctcgaagctaagaagtttgcaaagccttacaaccttcgagttgctgctatatatggtggtgtttccaaatttgaccagtttaaagaactgaaagcaggttgtgaaatagtcattgcaactccagggagattaatagacttgctgaagatgaaggcattgaagatgttcagggcaacttatctggttcttgatgaagctgatcgaatgttcgatcttggatttgagccacaaatacgatccattgttggtcaaattagaccagatcgacaaactttacttttttctgcaacaatgccatacaaagtagagcgtttggcaagagaaatattaactgatcctattagagttacagttggtcaagttggcggtgctaatgaagacattaaacaagttgttaatgtactcccttctgatgttgagaaaatgccttggcttttggggaaattgcctggaatgattgatgatggagatgttcttgtatttgcatctaaaaaggctagagtggacgagatagagaaagagttgaatcagagaggattcagaattgctgcgcttcatggcgacaaggatcaagcttctcgtatggagaccctgcagaagttcaaatctgggacatttcatgttctggttgcaactgatgttgctgcacgaggtcttgacatcaaatcgattaaaacagttgtcaactttgatattgcaaaagagatggatatgcatattcaccgaattggaagaactggtcgtgctggcgataaagatggcactgcatatactctgattacacagaaggaggcacattttgctggtgaactggttcacagtttgattgctgctggccaggatgtacccaatgaactcatggatctggctatgaaggatggaagattcagagcaaaacgagactccaggaaaggtgggaagaaaggtggcaaaggaaaaggtggtgttggcggtgctgggcgcgggcgcggtgtgcgtggagttgattttggcctcggcataggttacaatgccgaatctggttcacaagtgcctgctgcaagatctgctgctgtaaattctctgaagacagggatgttgcaacgatttaagagcagctttgtctctggatcttcaaatacaccaagcagcagtgcaccttcctttgtaagaccagcactccgtggctttgtgtctggcggcaccattggaggagacacacggcctgcacaggcagcccccactttcatccctgcatcccggcctgcacagcctgcccccgcggtccctgcatcccagcctgcaggaaataacaacgaaaatgggaacccgaatccagaaagttcacgggatcagttcagggagagaaaacgaccatcaggttgggatcgctagtccctgctaactggtatgcccaattgtgattccttccccgctttgttatattgatgtagtctcttgggagacatcctataaaaaagcactgtagattacatgatgtcaggtaagtgttgttttagttagtttggcctttattctttatccttcaactactgttgtatctggccgttgtttcacatttttcatcagagcaaaatttaccatttgtattcgaagttggc

SEQ ID NO: 22686 - DNA, 665 bp, Zea mays
  Clone ID: LIB3591-103-F3_FLI
gctgccgaaggtgggaaagaaggcggcggcggaggcaccggcaccggcaccgcctaggaaaggaaaccgaggaaactacagccatggtggtacggatccgtctggcgcggttcgggtgccggaatcggcccttctaccgggtgatggccgccgatagccgctcccctcgagacggcaagcacctcgaggtcctcggctactataacccgctcccagggaaggatggaggcaagaggatgggcctgaaattcgaccgggtgaagtattggctgtcagttggggcacagccatcagatcctgtgcagagtattctctttcgtgccggacttctgccaccacctccattgctagctatggcacggaagggtgggccacgtgataggcgccccattcatccaatgactgggcgccctctggatctcgagggtgtcgcaattattgataattccaatgctcctgaaggcgatactgaagtgcctacagatgaggtggctcaataagccttttgtattagcatagcatatgtagcggtgctgcaaaagaaaacttgtttgatgtgcttgtggcaagactttgggtactcgtacaatgtggcaaacttttaaacaggtaactttcatccatttctcttcttaaaaatatgtcagttcccgctgtttgttctt

SEQ ID NO: 22687 - DNA, 937 bp, Zea mays
  Clone ID: LIB3591-103-G10_FLI
cgcaaatctgcaactttgcctcgttacctctatcctacggtctctcaccgcctaacacggccgccatggccgccgcctccacctccacctcccttccccttggcttctctcaccaccgcccaactcccagaatccggccgcagccccagtcccagtcgcaaccactgaaggcaaaaccccctacccccctttgcctcagcctaaccctcaccccggcgaccgcgaagccccgcctcgctgcgatgcccgacgacgtcgccgtcgccaacttcgtggagaaggactggtcgtttctcgagtccgcgggcgcaaacctccagcgcgctctcgcctcgggggcgctcacgccggcgtcgcgggtgttggcattgacgcccacggcgtccttcgtgaggtcgctcctcgcgtcctcgccctgcgagctactggtggccgcgcatgagtcgatgtacgtgctggcaggggtcaaggaggcgcacgacgaggtgaggtgcttccacctcgagggtgggggcggcggcagaggcggcggcgtggtggaggccgtgccagagaggttcgacgacttcgatgttgtgttcgtgtgctacttccctggaatgggagtctccgcgggggcgctcctcaaatcgctggccaagaggtgctcaaaaggtgcaagagttgtcatgttcttagatcaaggcagacagaattttgagcaacaacggagagagcatcctgatgttgtaacttcggatttgcccagtatagccttcctggagaaggctgcatctgggaacaagtatgaaataacagagttcgttgacgagcctagcttttaccttgctgttttgcagtttcaaggatgatttgttccttttttgcaatatttgtgaagcaaattgtgactgtctgtaaatttgcaatatttgtgaagcaaattgtgactgtctgt

SEQ ID NO: 22688 - DNA, 1926 bp, Zea mays
  Clone ID: LIB3591-106-A7_FLI
tctggtctcccctctctcgtccgtctggtcctcccgtccagaggcgttctctctccctccccctttcctctggtcatcgcacccgtctccccgctctgactccgcccgcgccgccgactcccggcacggccccaggcttcatctccgccgccgcgccgcctcgctccgatcgacccccgaaacgccggaaaccgtgggcttcgcgaggtgcaatttcttgggccgcgtctgagcttgattcagtttctggaagcggcctgagcttgggatttgatccgggttgcctctcttcgtccaagcggtagataacataacagtgcgacaggtgaattgcagagagaaggggggcatttggtcgctgtatgatggcggaaggccccaatttcgctggcatgattggaggccatgacaatggtggggatttctgcgacatggcatactaccggaagctcggtgagggctcaaacatgtcggtagacaaccttaatagcatgcagaccagcacacatggtggctccattgcaatgtctgtggacaacagcagcgtagggtcctgtgactcccatactaggatgctcaatcaccctggcctcaagggacctgtcgttggcaattactcggtcggcgggcacagcattttccgtcatggacgggtgtctcacgccttgagcgacgatgcgctggcacaggcgttgatggacccaaggtacccgactgagacactcaaggattatgaggagtggacgattgatttagctaagctccacatgggaatgccctttgcacagggcgcctttggaaagctctacaggggtacctacaacggtgaggatgttgccattaagcttttggagaggccagaggcagatccggagagagccgggttaatggaacagcagtttgtgcaagaagttatgatgcttgcaaccttgaggcaccagaatattgttaaatttattggagcatgcaggaagccagtggtttggtgcattgttacggagtatgccaagggcggatcagttaggcagtttctggcaaagaggcagaataggtcagttccactaaaactggcggttaagcaagcactggatgttgcaagggggatggcgtatgttcatggtcttggcttcattcatagggatcttaagtcagataacctcttgatatctggtgataaatctatcaagatagctgactttggagtagctcggattgaagtaaaaactgaggggatgacacctgaaacgggaacctatcgttggatggcaccagagatgattcagcacaggccatatgaccaaaaagttgatgtctacagctttggcattgtgctgtgggagctcataactggcatgctcccttttgctaatatgacagcagtgcaggctgctttcgctgtggtgaacaagggtgtccgcccagctataccccaggactgcctgcccacccttgctgagatcatgaccaggtgctgggatccaaatcctgatgtccgtccgccattcactgaagttgtgaggatgctggagcatgctgagatggagatcctgagcactgtccgcaaggcccgatttcggtgttgcatgtcccaaccgatgactaccgactgaatcaaacaagagagttgaaatgaactccatggaagcgtaattgagtgtatttatcatgtgtccaaacttcgctcagctgaagtagaaagcacacctgagtttatggctgtatgtgtgtatactcaggtgtaagccttgttgtctttgaaatattcctgcacttagaaatatacctagttcgcgttttcagactcttgagatgttttagggctagtctatgtcctgtcgaaacatcatgcagggttcctattcttgtaatgttcttgtgatcctgctactggaatgtgcctcctactggaggtggtctgttcatgtt

SEQ ID NO: 22689 - DNA, 2213 bp, Zea mays; identical to SEQ ID NO: 5775
  Clone ID: LIB3591-108-G8_FLI

SEQ ID NO: 22690 - DNA, 777 bp, Zea mays
  Clone ID: LIB3591-113-C1_FLI
ctggcttctcctccccctcttaccaagtcctcctcgggttagggttccttagggttttgtggaggggcgatggcggcggctgatgtggagtaccgttgcttcgtcggcgggcttgcctgggccaccagcaacgagtcgctggagaatgccttcgcctcctacggcgagatcctcgactccaaggtcatcaccgaccgggagacggggaggtcccgcggcttcggcttcgttaccttctcctccgagaactccatgctcgacgctatcgagaacatgaacggcaaggagctcgacggccgtaacatcaccgttaaccaggcccagtcccgtggcggtggcggtggcggcggtggctacggcggcggtcgcggcggcggcggcggttatggtggcgggcgccgtgacggcggttatggcggcggtggcggctacggcggtcggcgcgaaggtggcggcggcggctacggaggcggtggcggctacggcggtcggcgcgagggtggcggtggcggctacggcggcggtggcggcggcggctggagggactgatgtgtgggcccatcctggcttcggccgagttatcttatctatctatagtatcgtgttaccgttcgcttctgtcaccgtgttagtgtccgttctacctttggattaggtgttggtaccctgttgttcgctttggttgctcccgctatgaaacgagacgagagaagaatgagcaaggtttttgttcgcagctatttttgtccaatgatattgatatattgttcccctgtc

SEQ ID NO: 22691 - DNA, 1086 bp, Zea mays
  Clone ID: LIB3592-047-E7_FLI
acgatcgcgagcgcaagcacgtacgttgtcggaagctcaagttagaagaagcaccagtgcctgatcgatggcggcccaggctctcctctccggccggcagctgctgggccgccccgtgcagtcggccgtctctaggtcgtcggcgaggaaggcgcccttcgtcgtcagggccagctccagccctccagccaagcaaggtgccgacaggcagctgtggttcgcgtccaagcagtccctctcctacctcgatggcacgctgcccggcgactatggcttcgacccgctgggcctctcggacccggagggcaccgggggcttcatcgagcccaagtggctggcctatggcgaggtgatcaacggccgctacgccatgctgggcgcggtgggcgccatcgccccggagatcttcggcaagatgggcatcatccccccggagaccgcgctgccgtggttcaagacgggcgtcatcccgcccgcgggcacctacaactactgggccgactcctacacgctcttcgtcttcaacatggcgctcatgggcttcgccgagcaccgccgcctccaggactggtacaacccgggctccatgggcaagcagtacttcctcggcctcgagaagttcctcgccggctccggcgacccgtcctaccccggcgggcccctcttcaacccgctcggcttcggcaagaccgagaaggagatgaatgagctcaagctcaaggagatcaagaacggcaggctcgccatgctcgccatcctcggttacttcatccaggggctcgtcaccggcgtcggcccgttccagaacctgctcgaccacctcgccgaccccgtcaacaacaacgtgctcaccagcctcaagttccactagaacgtggtgcatcagcatacctgctgctgccgccgccgccgccagttgtttgctgtggaaagctagatgcatgcgtgttgtaaaggaacctgaagcgttgcatcggtcatgattcatgcatggccagcctgctgcctgtaacaacaaactagtattgatcttattgagaccggaaactgtattgcacatggtaaatcaatgtacaattcctccct

SEQ ID NO: 22692 - DNA, 1249 bp, Zea mays
  Clone ID: LIB3592-049-D7_FLI
ctttcattttaaatttatgagtttcgtttccaggacaaactatcagttaaagcccctttcatagtacctttattctgacagtctcttcacatttactgcctcaacctccaatatcacatctgtacataaaaggtccattgctggaccaagctgttcttggggccatattgccactatgggttgataaattccaacattacagcctgtatgctgttgacaacctttttgattaattactatgtactatgtactatggcatctcaaaagtatgcactcaccaacctcattaaaatggtgcaggacactgcttgtcgcgaatgctggtgactgtagagccgtattaggaaagcgaggccgagcttttgaactctcgagagaccacaaacccagctgcagcgttgagaagctcagaatcgaaaaccttggcggtacggtcttcgatggctacctcaacggtcagctggctgtagcaagggcgatcggtgactggcacatgaaaggctccaaaggctctgcgtgccctctcacaccggaacctgagtttagggaggttaggcttaccgaggaagacgagttcttgataataggctgcgatggcctctgggacgtgatgagcagccagtttgctgtctccatggtcaggaaagagctgatggaacacaatgacccacagcggtgctcgcgggagcttgtccaggaagctcttaggcgcgactgctgtgataacctaaccgtagtcgtcgtgtgcttctcagatgacccgccccctcagatcgaggtcccgagattccgggtacggagaagcatctcaatggaagggctgcatacgctgaggggagctcttgacagtaacgtttgagctccgaaagtgtaccttcgcctgcaacttgtgtcgtggaggatttttctctcttctttgttgtttggtctgttggaagttttgctccgctcggctcatcggtgttttgcgatatagatctcggaataagttttgtagaattattttggaaggaaatttttgttgaggtgtaggctaattaatcttcctttgttgaggccaccattttgttgttggttgctcacaatgtaatcgagcaattaaccggcacgttgttctggtacgaatgagagttatagcagctgatcgtttttggtctttgttcagaattccacttgtatggttggacgagtcccctgttcattattatcagaaccaaaagagaataaagttatggtacagattttgttc

SEQ ID NO: 22693 - DNA, 2544 bp, Zea mays
  Clone ID: LIB3592-095-D6_FLI
gaacacaatagcgtaaatagtgctaattttagcttctaaaacagttaacacaaatagatccaaacatgccgtaatcacgtccaacgttaaacaaatagaaactatgctgaagtgtgcacaagtgacactgaatggtaccaatccagagtgaaccggctagagctacatggcaccaaagtgcttgaacggggagaaaataacgcgaaaccttggccggtggagcagcagaataaccaagcgaagaatgtttactgaacctcgattagggccgcaagaaaatgcggcgaattaatcagcttaaccaaaacctgggaattccagagtcacgttcggctgaaacgctgttgttaggcagcctctgtattctgccagagaactcattaaccttctcatcaatccacatcagggaacgcagttgattatccagtattcggacagcaacatcaaatggtgtcatactatcagcggactcgagctcaccaccctgagtagcattcatagtctgaatgatggattttacttgttctgtcatatgttgcagttcatgctccacaacttctgcttgttcatacatagtatctcttgctgaagcagctccatcttcatgaagtaacactcgttcatcctggaatacgcgttcagcttcctcctccatactctgtagagccttgtctacctctcgttgatgagtttctatcaattcaagttgacgctccaagcctgtttgtgtttcaacaactttagccacctcagcctcaagcctaataagaacatttctgttttgcagaattctcttatcccattcagctattgcggtggcatgtttcctgaattttgcagtacggtcttgaagctcattgttccagtccctaataatctcctcaacatttttgccaacaatttctgatggtagcttaggtgcttgggatgctgctggagtgatagatgtagtagtagtcggacctgtgctgctgacttgaacagctgaggaagttgcttgagttgtggtgctggtggctgatgagctagcagcagtagtagaaacaccaaatgccagtgtgggagatgaggtagaagctggggtagttgtttgaagattaaaatttggaaaccccgttgttccagtcaaaggagccgtggttgtcatgcctgcagatgtagaagcacttgtgacagtggtggtagtggcagtagctgcagctgctgatgatgatggcgcaactgcaaaactaaaaccactggtagaaacagctgggaacgacgacccagatgctgcagaagctgcagccgctgatggcacagtggaggaaccagttgcaaacacagaggctaaagttggtgtagaagctgccgaagatgaaccaaaggaaaatccaggcgtagtgacagacgagctacctattgcactggtagagaacaatgagggagcaggtgcagcctgcgaagtggccaaggagaagccagtggaggacgaggacgccggtgtggttagtgtggtggcggatgatgaaaacaaagaaggagccgtgttcgcggtcgtcgcgcttcctgatgatggtgtaaagccaaacgatggggcggaagcggttgttgctggcgaagaagagaacccaaaggatggcgtggtggtcgcagcagacgctggagaagaagcggtggtggtactgaagaggggcgcagaggtggtggacccgaacagcgacgagccagtggcgccgccaaaccctaaagccggtgctgatgtcggcgtggatgcagtgcttgacgcggccggccccgagttgaacgagaagccaaatgatggtgccggggcggcggccgtggtagtggtggaaccggacgccgacgagccaaagctaaatcccgtggcccctccagagaagaggcttggagtggacgcagcagaagaggcggcgccgaacggactaactgtcgccgccgtggaagaggtggccccgaatgggctcggggtggtcgctgcggaggaagtcccgccgaataggcccgaggtgccaccgaacagactcggggaggttgccgcagagccagtggcggacgcaccgaagaggccggggctgcttgcggcagtggaggtggcgccgaagaacccagggctgcttgcggcggaggtagcagcgccgaataagctaagggttgttccagcggaggatgcgggcgttgcaccgaaaagggatggcgcggacgcggccgatgaggccgccgccatggactgaccgaacgagaaggtggatccgaatccgaaagcgggagaggaggcgggtgcggcggcggcggacgaggccctgaacagggaggacccaaaagttggagcagaagaagcggcggcggaggatgaggagaagagggaggagccaaaggcgggggcaggggaggaggcagacgccggctgggagaaggagaaggctgatggggtggaggagaagggggaggaggccgtggagcccgcggtcgcggagctgccgaaaccgaaggaggtcgccattgctggggcggggatgatttgggcgagattttagcgtggtt

SEQ ID NO: 22694 - DNA, 2241 bp, Zea mays
  Clone ID: LIB3591-083-B3_FLI
tcctagggatgctccaaatgctcatggatactgatttggacacaacgcaacaagactatgttagaaccgcacaagccagtggcaaaactttggtatccctcatcaatgaggttcttgatcaggcaaagatcgagtctggtaaacttgagcttgaggtggtaccctttgatcttagaacagtttgtgatgacattttgtctctcttctgtgggaaagcacaggagaaaggactggagttggcagtgtttgtttctgatcaagttccacaaacactaattggcgatcctggaagaataaggcaaatcattacaaatcttgttggaaactctataaaattcacagagaagggtcatatctacttgacggttcatgtcgttgaagagattatgcattgtctggaggttgagacgggaactcagtatacaaataccttaagtggctacccagtggcgaacaggaagcgcagttgggaaaactttcgactttttagtagggaactgaactcatccgagatgccttttgcacccattgcatcagactcaataagcttgatgatatcagttgaagatacgggtgctggaatcccgttcgatgctcaatcccgtgtcttcacccctttcatgcaagtaggtccatccatcgctcgcatacacgggggcactggcattggattaagcatcagcaaatgcttggttggcctcatgaagggagagatcggatttgcaagtaaaccccaagttggttctactttcaccttcactgcagtgcttacgagagtccattccagtagaaatgagaataaatcatcagaatttaaagagatcaatgcattggtggtagatcatagaccggtccgtgccaaggttactaagtatcatttgcagagactgggagttcagactgaattgacaactgacctagatcaatatatttctaaaaataattgtggatcacagattgcaaagcttgtgctcattgacaaagaaacctggctgaaagaatcccactccatgcctcttttggttactaaattgaggaacaaagatcagccagactctacaaagttatttcttttggagaaccctaaaagttctgtcaagagcaattcacatatattcagggaatataacttgaatgtaattatgaagccacttcgtgcaagcatgcttcaggtttcgctacaaagagcattgggtgggatagataaactgcattgcaggaatggagtagtcggaaattcaacactgggcagccttcttcacaagaagcgaatcatagtggttgatgataatattgtaaatctcaaggttgctgcaggcgctctaaagaaatatggcgcggaagtaacttgtgctgacagtgggaaggaagcaatcacactgctgaaacctcctcacaattttgatgcttgtttcatggacatacagatgcctgaaatggatggatttgaagccacaaaaaggattagagtgatggaaagagatctaaatgagcaaatagaatgtggagaagccccaccagaatgcgtaggggttcggcagtggcgaactccaatattagccatgacagcagatgttatccaggcgacacatgaacaatgcttgaaatctgaaatggatggttatgtttccaagccattcgagggcgagcaattgtacagagaagtagctcgctttttcctaaatcaagaccaagttcagtaggtaggcttatatggagtgtaaaatagtggaggatatcggggttcacccatcgaggctgaaagaattctgtcagagatcccatgttcttgagagtggacatcaattcgcagagttaggggccctattaaaacgctagcaacgctgggatgtggcctccagttaggtggaaaacactttaggctggagatggaaccacccatgttcggttccttggtacatctgaccaaactgcaaaactaaatgtgcaatgtcttgaaatcaaggtgcatgtggagctatttactcgacaatctgaagtcaaggcgtgtgaaaaaaaagcccagctgcattcactaaccgcagatgtcctctgccactataatatagagtagggagagaaattttccttccccggaaggtaccggctgtacatattaggtattggttgtttgtgcaggcatttgttggcattttgttgtgcatcgtcttcggtctgtattgtttgggtcgaagctgtaaaatgtaaatggcattttcaaagatggaagttttgtttgac

SEQ ID NO: 22695 - DNA, 463 bp, Zea mays
  Clone ID: LIB3591-083-E4_FLI
gcagagccgccgcgtggcggtggcgttccaggcgtacaacgcgctgtcgccgctcgtcaagttctcgcacttcacggccaaccaggccatcctgcaggcgctcgacggcgaggactgcctccacgtgatcgacctggacatcatgcagggcctgcagtggccggggctcttccacatcctcgcgtcccgcccgcgcaagccgcggtcgctccggatcaccgggctcggcgcgtcgctcgacgtcctcgaggccactggccgccgcctcgccgacttcgcggcctcgctcggcctcccgttcgagttccgacccatcgaggggaagatcgggcacgtcgccgacgccgcggcgctcctcggctcgcgccagcggcggcgggatgacgaggccaccgtggtgcactggatgcaccactgcctctatgacgtgacggggtcggacgtgggcacggtaaacgtgccc

SEQ ID NO: 22696 - DNA, 796 bp, Zea mays
  Clone ID: LIB3591-083-E6_FLI
ctcctcctcgcctcctctccctagtctccacgacgcaagggagagtgacggaaagcgacgcggcgcgagcgaggagggccaaggcgaagaggggaagcaccgcaccaggacccttgttcgccgccgccgcctctgatctccgcgaggttgtcaggattcaatatgtcgaccagcacattcgctacttcctgcacgctgttgggcaatgttagaacaacgcaggcctcccagacagcggtgaagagcccttcgtctctaagcttcttcagccaagcctgaagacctccaagaaactggatgtctccgccatggctgtatacaaggtgaagcttgtcgggcctgaaggtgaagagcacgagtttgatgctccagacgacgcctacatccttgacgcagccgagactgccggtgtggagttgccatactcgtgccgtgctggggcttgctccacctgtgccggcaaaatcgagtctggttcggttgaccagtcggatgggtccttccttgatgacgggcagcaggaggaaggttatgtgctgacatgcgtctcctacccaaagtccgactgcgtcatccacacccacaaggaaggcgacctgtactagggctagggattttcaatttggcgagggaccaaaaatgctctcgagtggtgctttgtcaagcaaagctccatctgcgcgccctaccccgttgtgcgaactgtttggcatcaaacttgtgtggttgctgtcttctatgttctgctagtttatgttcggagtccgtgggaatatactagctgattaataaaaag

SEQ ID NO: 22697 - DNA, 1535 bp, Zea mays
  Clone ID: LIB3591-083-F10_FLI
ttcactgccggtgcctccggggaactcaaatggaaccagagatgaagttccatatacagcaagagctgtccctgattatttggaccaaaaaagaatacaaaagctgctgcttcttggaccacctggtgctggtacgagcactatttttaagcaggctaaatacttgtacgggactaggttcacccaagaagaacttgaaggtatcaaactgatgatccaaagcaatatgttcaagtatcttgggattttgctagagggccgcgagcgttttgaggaagaggctttgtctagattgaattacacgatttctcagggtgaagaaactcagcatgatgaaaataaagccaatggatcaaattcttgtatatactccataaatgcgaggctaaagaaattttcagattggcttttggatatcatagcaatgggcgacctagatgcattcttccctgctgcaacgcgtgaatatgctccgtttgttgatgagatgtggaaggaccccgccatacaagcaacatttaaaagaaaggaagaattgcattttctccctgatgtggctgagcacttcttgagcagggccgttgaggtgtcaagcaatgagtatgaaccttcagagaaagatgtaatcttcgctgaaggagtaacacaaggaaatgggctagccttcatcgagttcacacttgatgatcgcagcccaatgtctgaaccttatatcgacaacagtgaggcacattcgcagcctctcaccaaatatcagctgatcagagtcagtgcaaaaggcatgaatgatggctgcaaatgggtggaaatgtttgaagatgtccgcatggtaatattctgtgtagcactcagtgactatgaccaattgggaccccctgtaagtggcagcagtcggcctcttgtgaacaaaatgatgcaaagcaaagagttgtttgaggctacaatccggcagccatgcttctgcgatactccatttgttctggttctgaacaagtacgaccttttcgaggagaagatcaaccgcgcgcccctctctagctgcgagtggttcaacgacttctgcccggtgcggacgcaccacaacaaccagtcgctggctcatcaggcatactactacgtggccatgaagttcaaggacctgtactctgcgcagacgaaccggaagcttttcgtgtggcaggcccgtgcccgtgagcgccagactgtggacgaagcattcaagtacattagggaggttctcaagtgggaggaggagaaggatgacaactgctaccaggaggaatcattctacagcacgactgagatgagctcctccccgttcatcagagcggaatgagattttttttttttagctgatcaaatcaatcactgataatcagtgtatattgattgtctaattgatttgcttattcgtatcctagttggtattggttgtgtgtattttagaactaaggctgggctggcatataagaatcgagtgtccatgcattgtatgtaccagtactaatttaattttatccagctggttaaaatgt

SEQ ID NO: 22698 - DNA, 902 bp, Zea mays
  Clone ID: LIB3591-083-G11_FLI
tgaaagagaaatcaacggtttgctagtaatgttgtgactcaatcatttctgtcggtgtacaatcatattgcacaaaattatttacagcctttgtaaatgcaagcatattagttctgtttgactaccttgatgggttcttcacttgtactctgttgtgattttacctttgatggaagtttctttgtaaggaaatttctatagtaacttctagcctatatgtcatagaacctctgttgcaataatacctttctttcatcagttacaaacccaaatgcgttctaaagaaggggaaaagaagcgtgcctaccttactttggaggaacttcgccagttgccagatgataccaacacctacaagactgtcggaaaagtgtaagtaaacgaggaagaccatcttcaacatgggggagttcaattccattttcttgtatggtgctgtgatgcaaaatacggtatcgtgtatttcatttttttcccccacgtccatctgttgccaggtttattctggagccaaagtcagttctgttcaatgagcaggagcaaaagcttaatgacagtgagagtgcgatagcttcaatgcagacatccaaagactaccttgagaaacagcagggcgaagtggagaacaatattagggagctgcttcaacaggacccaggacttgcgcgtcagatcctctcaatgaccgttcaatgagagttgtttttctctccatttaattttttagataatttgtaatgtcgcagtttgatcagtcatgctgtggtcttgccttatctgtgagacatgtgcggtctgtaatttctgaggtgtttggctggtggaatgatgtggtccatcattatctcactctagtgctttgtttggtttgtggaatagattgagttaattcatcatcaaac

SEQ ID NO: 22699 - DNA, 859 bp, Zea mays
  Clone ID: LIB3591-083-G7_FLI
cgagtatcgtcacctcctctctgtgtgcgtgccgtctcttctccattggctttgagctggggggactccggggcctttaattcccccttgtctcctccttttaatccttgaaaggagcacacggccgcctttatcttcctttgtgttcctgcctttctttctatcttatcccccctttccaagctctcatctcctttatccctccttttctttctcgtatggagaggagctttaccctccctctcccacaccttgcatcaaaagagcagccatgtcttgggtgatggagtgagtagaagtgctacgccacagatgcaaccctacaagagcacaagcaaagttgagtttatgtggtgcgctgcgatgtttctctctcatcttttccttgttttttttcacctttttatttgccttttcccattctctttaatctcgcctttgtatccatgtgcttggttctttgttgcactgcactgcagttgttgcaccataagaatccaaagtcctccacgctcataccccctctgatatgtgcttgctatatccatctcttcaatctcccatacatactacatgttcttgcttcgtagtagttgtcagttaccttaacaatcatcattcaggtttgcagtggtatcatctaacgatgagcaatatgtgtccatcaccaggggctagggctagggaagcccatggaggagatgctcatggctggaaacgcaaatctaaaccagaatccaaacccaccgccggctgcgccctcggctcccggcgcccagagggcaggcgctcccgccgcggttgcggcagcgccgcctagcgctggcgcgaccggaggagcggggccggagcggcgggc

SEQ ID NO: 22700 - DNA, 1121 bp, Zea mays
  Clone ID: LIB3591-084-A1_FLI
cgcgatgtcgctctggttctccaactccgcatacatctacctgtctgtgtcatttatccagatgctcaaggcgcttatgcccgtcgccgtctactccatcggcgtcctattcaataaggagaccttcaggtcctcctccatgctgaacatgctctccatctccttcggcgtggccatcgccgcctacggcgaggcgcgcttcgacgtgcgcggggtcgcgctgcagctcgctgccgtcgccttcgaggccacgcggctcgtgctcatccagatcctgctcacatctaagggcatctccctcaaccctatcacctcgctctactacgtcgcgccgtgctgcctctgcttcctcgtcgtgccctgggtcttcgtcgagctgcccaggctacgcgccgtcggcaccttccaaccggatttcttcgtctttgggaccaactcactctgcgcctttgcgctcaaccttgctgtgttcctgctagtgggcaagacctcggcgttgaccatgaacgtcgcgggagtagtcaaggattggctgttgattgcattctcgtggtctgtgatccgggacaccgtcaccccgattaacctgttcggatatgggatcgcgtttttaggggtggcctactacaatcatgtcaagctgcaggcgctcaaggctaaggaggcccagaagaaagccgcacaggctgatgaggaggttgggtcgctcttgcaggagcgcgatggacatggtgatcataagagcgacaatcaggcttagactgtcagatctgatcctggccttcccatattggggatctgatgcaaggtgcaaagaccggagtttggtctacggttgctttcaaggaggtggatgacggtttcttgcacttctttaactttgtgtctggagagaaaatcagaggtatttaacgtttaggaaatatgcacctgcttggtggagagctttgccttgttattttagacactttgttctactgaaaggcagccatgccttactacctcacttgtccattgcctagatttatttgttctgctagtagattagggactaaaaatgtactgctgcagaatgttaatttggtggttattttcgatatataatgagcttaccgtaatct

SEQ ID NO: 22701 - DNA, 1163 bp, Zea mays
  Clone ID: LIB3591-084-B5_FLI
attttcccaattgggggagtaccaagtgggattcagaccagtcggtccttgttttatttcaatctaacatgtgcattttttacagaaaggtttcacacactccacgcgcgcggatacagagcagccaagcagcggacacaaagctatcgtacacacacgatcaggtacactgcggaagggcacaaaatcacgcgcctgtgccggtgccggttgccccggcatcggccttgtcgtcgcggccctccttgttggcgccgaaggtgcccgctgatgccagactccccccagctccaccaaccgcctccccctcccgcgccgccgccggccagcgcaacaccagccgcgccagcggcagcaaatgcgcaacccaagctgactgccgtgaagctgaggatgatcatcaagggcgtgctcgggcggtaccagcgctggaaccccgtgcacccgacggccggcaccttctggggtgtggggctcggcgtcggctgcggcgttggctggggccccggcttcgggcctgaggtgattgggtacgtaggcgccgggtgcggcgtggggttcagcgttgggttcacgctcgccggcgtcggcatcggcctgccgcagcacagcctcatcaggaaccacgaccacggtggttttgcgagcagcgtccctgttgattcagcgagattctacgccctaaccatcatcagaggtctggtatgggacgccatcagctacgtgggcaatgtagcggctatgaggaaagaatctcgacagaagcttccgaggttccaggacagccctcaggttccagggggagttgatctgccgaagctggggaagggcgtgtcgagcagcatccggtccacggtagaatgcatcagggccttcaaagatcagcgttggcctccttaaaagactcgttggaaatcaaagctggtttcaagttgaatggtaccgccatgggaacttaaacatggtgatatacaagtttttgttttgatatggaaggggaaattagttgttctagctggaaatgttagtctgcattctagatattatttttgttatgtggatgcatctgtaaatatgactgctgctcttttgctccctccttattcaagcactgtgaaacagggattgtagcacgaaatataatagaattcccctcttaaatt

SEQ ID NO: 22702 - DNA, 2741 bp, Zea mays
  Clone ID: LIB3591-084-D7_FLI
tagatcgcagcacattacccgaatccgagcaatcatcatttttcgcctttcttctacctcccgactctctggcctctcctgactctgccccgcctcatcactcccattccaccgacacgcggacgcggcgtgtcgcgcgcctccgctaaaaccgtagcccgaggcccgatggccgccccgccgcaaccgcacccacaggcagcggaggagagggccgcgccggcggttcccctgcccactgccccggcgggtccgcggccgtacgacgtggcggtcgcggcggcggagctccggccggtagactgcaacctcgccgcgctctgtgaccacgtccaggcggaggggttcgggttgggggccttctccgacctcgtcgtggaggccgcgggcgccacctaccgcctccatcgcctcatcctctctcgtagcgcctatttcaggaatatgctacatggtccttggagagaggcgggagcacccacagtggttttgcacatagatgatgccaatgttgattcagaagcaattgcaattgcgcttgcatatctttatgggcaagcccccaagcttaatgataacaatgcattccgggttcttgcagctgcatcatttctggatcttcaggacttgtgcacgatatgtacagattttattatttctgagctttggacatcgaactttttacaatatcagttgtttgctgagagtcaagattatggtagccatggagagcgtgtcaggaatgcttgctggggttatctttgtcaaagtgccacactggaattgcgagaggttctaccaaagctttcttcacagactttgcatgccctccttacatctgatgaattgtgggtacctaacgaggagaaaaggtttgaactagcattgtttactctacttgcaaaggttactacgtgtgagatacaagttagtgggaatgaaacaagcttaccaagtgctgatcgatccatgaggaaggggaaggctccaatgaacgaatctggggaggaactgttaatggactctaaactgcagaacttgaagttgcatgataactcggggaatgaaattccccataacattattgctatttcagatatgaatggtgaagctcctaagagaatggagaatgattgttctactggaggaccatctggagaaagcacttcatatcaatttaatgaaaataactggctttctagtgagcaaactgcaaataattatttctcaagaactttcagtagtggtgttgttcctactgagtggggaaggcccaatgcaccactttggggtggtagggttataggacggcggcaagttagatgcattagaggaagttcttgcctatctactgatgaatacaacacttttatgaatatatttgagaggggttctcttctctactgcaatatgtcctttgatgcgctgctaagtgtgcgaaagcaactcgaagaatttggattcccttgcaaagctgtcaatgatggtctatggctacagatgcttctgtgtcacagggtgcaagcgatagttgctgacacttgcaggaactgttgccttacgaataattcttgtgcttgcaagcaagcatatgtgagctcacatacacaccactacaggcaggaacatgaccggagcagtgtttccggcaccataggtaatgtctaccttgcggatgcccagggcgatgggaatggtgtacttgggcctgtccgtgttaacgtaagaggagcagttgatggccttgccggtattgggagagggaactcaaatgtgcctggtgcagcctgggctcctacacgttacgtcttctcacgtgtcccttacgggctcggttcaagaaatgcccagcaatttgccaatgatgaatcagaacctagaattgaccgcaatggagatatttcagcagatggtctgactgcattggttaaccttagccaagaaaacagtgctgcccatccacaggctgaaagtctatttgagacagggatgcagacaagatatcacagtgttgcatctgtttccactcccggtggttcttctgtccagatgcaggagtcaaaggagcatgactgggaaactgcagaggatgcaactatatcattagacatgaaaacacctcttagccattttcctcctttccgctttggggttgagttcgatgatgtgcacaggcttgctgatggtcatgtgaaacattcgactgaagtgttttatgcaggctctctatggaaggtgagtgtccaggcattcaatgatgaggatcctcatgggcgacgcactcttggactttttctccaccggcgcaaggctgagttgttagatcccttgaggaaggctcacttgtacgtcgacccccgggaaaaggtcactgcgcgctatcagctcatctgtccatcaaagagggaggtcatggtatttggatgcctgaagcaggctgggacgctgctgccgaaagccccaaagggctggggttggcgcactgctatactgtttgatgagcttgcagatcttctccagggtggtgccctgcgaattgctgcagtggtccagctcgtctaaacttgagttgtagaaaacaactgcttgcttgcaaggatggtgacaccacggcagtttgtgtagttggtacctgcaagaactcaatccgtcatgtattcgttctctgtaattgtgtattactgtatagtggttcgttgtttgatgctcactccgtcctaaaatatagttcttttcagcct

SEQ ID NO: 22703 - DNA, 1925 bp, Zea mays
  Clone ID: LIB3591-084-E1_FLI
tcgctgccgtcgcctccgccagaccgccgccgcgacactagacaccagcgccgcggcagaaggagcaagggagaagaaggaaagcggcacccgccgcacatacgccgcgcggcggagccatggccgagctgcggcacgccacggcggcggcggcggcgacgcgcgccactggctccccttccaagcgcgacgccgaggccgcgtcctcgcccttggtcgcgtccccccgcgtcggcggcggcagggacgggctccgccctcaccagaggtggccgctcccgccccccgtccgcgccctcctcgcgtgcgaggaccccaggtcccccaccgcctccgcctcctaccggatcctggtcgcggccatcgcctgcttcgccctcgctgcgctcttctccgcgccttccctctgggcacgcctcaacgctccgtacctgtgccgcaaggaggggattcggctccactgccccagggtcagccagccagactctctgtgggagaatcctcatgcagcagcaacttcgtggaagccgtgtgctgagcgtcagagacatgaggtctcagacctcgtgtcagagaatgaaacttctgggtttatatttattcacgctgagggtggattaaaccagcaacgtatagctatatgtaatgctgttgcaattgctaagataatgaatgctacacttattctgccagtgctaaaacaggaccaaatatggaaagatcaaacgaaattcgaggacatctttgatgtagaccattttataaattatttgaaggaggatgtgcacattgttcgagatattcctgactggtttacagaaaaggatgaccttttcactagtataaagcgcactgtgaaaaatgtcccaaagtatgcatcagcacaattttatattgataatgtgcttccaaggatcaaggagaaaaagataatgtctatcaagccatttgttgataggttaggatatgataatgttccaatggagattaaccgactgaggtgccgagttaattatcatgctttgaagtttctacctgacattgaagaaatggctgacaagctagcaacaaggatgaggaatcgaacaggaagtttaaatccatacatggctcttcacttgcgatttgagaaaggaatggtgggcctttcattttgtgattttgctggaacccgggaggagaaagctatgatggctacttacagacaacaacaatggccaaggcggtacaagaatggatcacacttatggccactagcgctacaaaagagaaaagaaggccgatgcccccttgagcctggggaaataggaatcattttgcgcgcgatggggtatacgaaggaaactcagatatatgttgcatcagggcaggtgtatggtgggaacaacagaatggcacccttgaggaatatgttccccaatatggttagcaaagaagatctcgcaagcaaggaagagatggagcctttcaagaagcatgtaaccagccttgctgcgctggacttcctggtatgcctgaagtcggacgtgttcgtcatgacccacggcggcaatttcgccaagctgatcattggctaccgtcgctacatgggccgccacaggctcaagtcaatcaagccggacaagggtctcatgtccaagttcttcggtgacccttacatgccgtgggcgacgttcgtggaggacgtggtgataacccatcagacacggaccggcctccctgaacccaccttcccgcactatgacctatgggagaaccctctcaccccttgcatgtgtagagcttaaattacagtcagcgagtgatggtgcatagttattctttgtatcatatgctgatatgcaagctgcaaattttgtccaccttgtttatttttttttaccacttctgctgtacaagtttaacaaagcaaagctcagttcatc

SEQ ID NO: 22704 - DNA, 1141 bp, Zea mays
  Clone ID: LIB3591-084-E7_FLI
cacgcacaagccttcgttgctacctgcgctccgccaattcggtgaattgcagtctaagcaaagggaaaaggaaggatcttttctccagacttggtaattttggacgacaagatgcacttccttgcatcatttcatgtccctacaggttttgtattatctgatttttcgggatggatgccaaaaggttcctgcatctggtcgaggagaagaaaagaagggtcctcgagaagaaagaagccccactaaagtgggagcagaagctagaaacagcagctaaggccaaggttgatgcagaagcaaaggtgaagaagctaaattcaagaaagcacaggaggagaggagatttgtcctcagactctgatagtgactatggcagcgatgttgatcgaaaacacttgaagaggaagaaccgcagaaggaacaagaagcatgagcattctgactctgatgatgccaggagacgcaatcgtagatctagaaggagcaccgactcaagtgatgagagcaacagtgaatacgagaccaggtctgaagaagaacgtccaaggaagaagcgctcgcacagaagaaggcatcaccggcactcttcaaagtcagactctgaaaactacagcagtgatgaggaacaacggagacctgccaaggaccattctcagagccgcaggcggcaccatcggtcatctgatgatgactcagacaaggacaaggtcaagtcaagacatgggaagggtctgagatctcgtgacgaggatgcaagagcagatttcaacagcaataagcatctcaggagccaatccttggaggagtcatcagatgatagagatgctgatgaatctgagaagatgaggaatggcaaaaggtctcacaagaatggcggccaccgtcaccatcaccatcgacaccaccatgaatgacatagtaactctgcagaacctaatgacaggaggcaagtactgaaagatggccagagggcccttgaaggtgacagcgcatactgaagatatcccagcaaggtcgagttaattgtccttattaaggacatgaagatcatttttttttcgttcctgatgttctcagataattattgtattgctgacaacatttctttgatttgtgaatatactaaacatgttgcctatgc

SEQ ID NO: 22705 - DNA, 1291 bp, Zea mays
  Clone ID: LIB3591-084-G3_FLI
ctcccctcgcctttttagagagagaaaccacggctgccggcccccagcgagctagagagagaaaccaaggccaaggagcacagcaccccgtccgtccccagcaggagagcgagagacagaagggtgtgcgaaggaaagaagaggcggtgggagaggagggcgacatggagaggccggcaccggtgaggaagtctcacacgtcgacggcggacctgctgatctggccggagggggcgccgcaggagtcgcccgccggggccacgccgccatccaaccgccggccgcatcagccgtcggaggcgctcaggaaggtggtgttcggcgggcaggtgacggaggaggaggccgagagcctcaacaagaggaaaccatgctctgctcccaagtggaaggagatgacaggaagcggcatatttgctgctgggggcgaggctgaagaagatgaatctgccaatgcctctgcaactcccattcggaccgctccaaagaattatcaggcaattagcaccataagccacatctcattttccgaggaagaaagcatttctccgaagaagccgacttcgatagcagaggtggcgaagcagcgcgagctgagcggcacacttctgagcgaggacgacagcaagatgaagaagcagatatcggacctgaaatccaaggagctgagcggccacgacatctttgctcctccggaagacccacggccacgcaactcagagaacggctcgacctcgcagaccccgggcaaaaatgcacacgtaagcaacttcaagttcggcgaggccgacgaggacggcatggtgaagaccgcgaagaagatccccacaaagaaattcaccgacctcgcgggcaatatcttcaagggcgacgagaccccccctgggacggcggagaagcacctgagcacagcgaagctgaaggagatgaccggcagcgacatcttcgcggacgggaaggccccctcgcgggactacctcggcgggatccgcaagccgcctggcggggagagcagcatcgcgctggtttaacagcaacagcaacctgatggacatagcagcccctacatcattcgtttctttctcctcgccgtcaccgtcttaggagtgatcttttgttcttcttctttttcctttcctttggaggactgatcgattggaacccccggcttgctttcctgttccccgtaacttgcgccagattttcgttgtcgatcccctctgatggtggtgttgtgtgggcatgacaacaacgatggttatctctaatttaacattgatttggcttggct

SEQ ID NO: 22706 - DNA, 708 bp, Zea mays
  Clone ID: LIB3591-084-H10_FLI
accgaccaccaccaccgcctgcgttcccgcgccgccaccgccatggctgccgctgccccccatgcatactcctccctcgtgcctgtttcggctgcgcggcctctctccggaagcacagtttctttcggtgcttcgtgccacaagtggaggaaggttccggcatggcgactccactgtgttgctgaagacgaagcagaggaagtcaaagattttggagtcaatatggcactatccatgctaaaattttacaaacgagaaatatcacctttactaccttcaagctgccgatatgtaccaacttgcagtgagtactctatgcaggcgtacaaacgatatggtgttgtaaagggttccatcttgactgcttggcgcctttgccgttgtaatcctcttggtggatatgggtatgatcctccaaaatggtttggcgaggaagatgtacctctgcaatagtaatgcctagtaattgaaagtacaggcattgtaattcttcagatccagacttgcagcagtttttatgtaatttactgaaactaaacccagaaacacaaggataaaattctgcaatatctatgcacctctgaaggagcatgtattttttttgtgtatgcctgtatggttattttatctagttctcgtgcaattcctccaaggtgattgtatgagcgaaattcatttattacctacaattaacatccataattcacc

SEQ ID NO: 22707 - DNA, 1941 bp, Zea mays
  Clone ID: LIB3591-085-C11_FLI
caaactttgcttgcttgcgctctccatatatcctgtggatcggagaggatgctctgatctacctgtctgttcttcgatcgagtctgagagatttgggaggaggagggaaacaaagcgaaagagcccatcttttttgtctttttggttcggtttcgtggttgcttcttttggaccccgcggaggagcccaccgtttctacaaaaacccaatctttgctgccttctcagcggtcgagatcgataggtttccagatctgaggctccgtgttctggctgtgagatcggaggcgcagcaatccgagcacgcagctagtagggaaagtatccgagaaaagttgcagattttgctgggggcaacggagcgagaacaagttactgcagaaggaaagggcaaaggtgggggaggcgccggagatgagggatgctatcagctctgatggattatttgaaatcttgctggggtccggcatcaccggctgggcgtccccgcaaaggatcggatgccaccggccgccaggacgggctcctgtggtacaaggacggcgggcaggtcgtcgatggtgagttctccatggccgtggtccaggccaataacctattggaggaccatagccaggttgaatccgggccgcttagcacatcggagcctggactgcaaggcaccttcgtcggggtctacgatgggcacggtggcccggagacagcgcgttacatcaatgaccatctcttcaaccacttgaggagattcgcatctgagcacaagtgcatgtcagcggatgtgattcggaaggcattccgagcgactgaggagggtttcatttctgtggttagtaaccaatggtcattgagacctcaattagcagctgtaggctcttgctgtctagttggtgtggtttgcagcggaactctatatgttgcaaaccttggggactcccgtgctgttctggggagacttgtcaagggaactggggaggttttggcaatgcagctctcagcagaacacaatgcatcctatgaggaggttagacgagagctgcaggcatcacatcctgatgatccccatattgtggtcctaaaacacaatgtttggcgtgtaaagggtattatccagataacaaggtcaattggagatgtgtatctgaagaaaccagaatttaatagagaacctttgcacagcaagtttcgtcttcaggaaacttttaggagaccacttcttagttctgatccagcaattactgtccaccaaatacagccaactgataagttcatcatttttgcatctgatggactctgggaacatcttagtaatcaggaagtggttgacatggtccaaagtagcccgcgtaatggaatcgcacgaaagttagtaaagtctgcagtgcaggaagcagcgaagaagagggagatgcggtattcagacctcaagaaagttgatcggggggtgaggcggcacttccacgacgatataactgtcattgtggtatttttcgattcaaacgccatgacaactgctgcctggagcagaccctcggtctctctccgagggggtgggtttccaatccattcaaacacccttgctccattctcggttcctacagagctaaacaactcctactgaaaccacgcggtatgtgaaggagccaggcaagaggataaaaaaaaagtaaaggaaaacggagaaggaaaaacagctgttgtgatcagttgtagtgtatttcaccgttcatgttcatttaaaacattttttagattctcaagtctcaacctggtgaccagtgcactgatagcaaggtataagattagattattcttagcttttttatcctcttttttttttctcgtccttaccctttagattcactcatgggatatccgatatcaggtgcttgtacattctttggttcaacttgtgataatagttcatcgcccccctcttttcgcc

SEQ ID NO: 22708 - DNA, 615 bp, Zea mays
  Clone ID: LIB3591-085-C7_FLI
ggccttcaaactagggtttactcctcccgctccgagaaagcaaacaagcgtcagctccgccggcggcctcgcgctctctcccccgccgcaccttctctacgccaggactgccaagatgaagctcgtcagattccttatgaagctaaacaatgagacggtcaccatcgagctcaagaacggcacggttgtccacggcaccatcaccggtgttgacataagcatgaacactcatctgaagacagtgaagcttacactgaaagggaagaaccctgtaacgctggaccacctcagcgtgcgaggaaacaacatccgctattacattcttcctgacagcttaaacttggagactttgctggtagaggaaacccctagggttaagcctaagaagccgactacaggaaagcctttggggcgtgggcgcggccgtggtcgtggacgtggtcggggacgggggccgccacgctgacaggtttcccctgctgtgggctctcttgcctgacaagttccctgtacgatgtaacctctttcccccgcacgctgtgtgaaagaaccgttgcattgttacccttctgatgaacgtggactgaaatatctcaatctcaagtggttcttgtg

SEQ ID NO: 22709 - DNA, 732 bp, Zea mays
  Clone ID: LIB3591-086-A3_FLI
gcttctcctccccctcttaccaagtcctcctcgggttagggttccttagggttttgtggaggggcgatggcggcggctgatgtggagtaccgttgcttcgtcggcgggcttgcctgggccaccagcaacgagtcgctggagaatgccttcgcctcctacggcgagatcctcgactccaaggtcatcaccgaccgggagacggggaggtcccgcggcttcggcttcgttaccttctcctccgagaactccatgctcgacgctatcgagaacatgaacggcaaggagctcgacggccgtaacatcaccgttaaccaggcccagtcccgtggcggtggcggtggcggcggtggctacggcggcggtcgcggcggcggcggcggttatggtggcgggcgccgtgacggcggttatggcggcggtggcggctacggcggtcggcgcgaaggtggcggcggcggctacggaggcggtggcggctacggcggtcggcgcgagggtggcggtggcggctacggcggcggtggcggcggcggctggagggactgatgtgtgggcccatcctggcttcggccgagttatcttatctatctatagtatcgtgttaccgttcgcttctgtcaccgtgttagtgtccgttctacctttggattaggtgttggtaccctgttgttcgctttggttgctcccgctatgaaacgagacgagagaagaatgagcaaggtttttgttcgc

SEQ ID NO: 22710 - DNA, 1445 bp, Zea mays
  Clone ID: LIB3591-086-F10_FLI
aaccagggcttaatggatgctgtttgcttgttagttcagcttcaccaatttctcaacagtgtgtttgttcttctccaggacagtagaaaggaaaggagaaaagcttgttgtgtctgtgtgtgagctgcagaccccgagaggatggatcagtatgaggtgctggagcagattgggaaaggagcatttggttctgcactcttggtgaggcacaaggccgagaagaagaagtatgtgctcaagaagatacggctcgcgcggcagaccgaccgcacacgccggtctgcccaccaggagatgcagctcatcgcgacggtccggaatccgttcattgtggagtacaaagattcatgggtggaaaagggttgctacgtttgcattgtcatcggttactgcgagggaggagacatggctgaagctatcaaaaaagtcaatggaaaccatttctcggaggagaaactttgcaagtggcttgtgcaacttctcatggctctcgattatctgcacgcaaatcacattcttcatcgggatgtgaagtgctccaatatatttattgccagagatcaaagcatacgccttggtgactttggtcttgcgaaaatattgacttcggatgatcttgcatcctctgtggtaggaacaccaagctacatgtgcccagaacttcttgccgacataccgtatggtactaaatctgatatttggtctctaggatgttgtatttatgaaatggcagctctcagaccagcatttaaagcctttgacatgcaagccctcattagcaagatcacaaagtcgatagtatcgccgttgcccacgagatattctggttcctttaggggactcatcaagagcatgctacggaaaagcccagaacaccgaccaagcgctgcagaactgctgaagcacccacacctccagccatacgtgctgcaggtccagctgaagtccagcccctctcgcaccacgtccccaatctaccaagctctgacggacaaagtgaagaagatgacgttcgtgagcgacaccgccgattccgcgaggaggagggctgcgagacggagctctctggggagcgagaggaccgtgacgttctgcaagccatcccccgagcgcaactccgtcagctccacgcggagcatcaaggagtacacgacgacgacccagagtgccagggagctctctgtcggcagcagcctgcaggtcgacgacgaggtcacgagtaaggctgttgtgacgaagacggcaggcgttctacggactcccagcaagagccgtgctccggcatctaagacgttggtggcggctagaagccggctggatcctccgaagacgtcctatgccagaacgaaccgtgccgagttggactcaaggacgcctctgagcaagagcagcgcgcggacggcaaggagagcatccctcccgctggcggcgtacagagcacccag

SEQ ID NO: 22711 - DNA, 979 bp, Zea mays
  Clone ID: LIB3591-087-B4_FLI
gtttaggaggttcgggttcaccagatttggggagtatgcttggtggttcacctgatgtttctccgttcagtcagatgttgcaaaaccctgcaatgatacagatgatgcagaacattatgtctgacccacagaccatgaaccagttgcttaacctcaacccaaatgcacgcaacctgatggaatcaaacactcatatgagggaaatgtttcaaaatccagaatttcttcgccagctgacatcgcctgagactttgcagcaattactctcatttcagcagactttattaggacagcttggtcaacatcaacctagccagggcgggaacaatgcaggcagtgccacaggtacacggggaaaccctagccttgacaccttgatgagcatgctcagcgggcttggttcgggaggtggtctaggtgttccaaatacctccagcggtgagtatatatacactattgttggagaacttggatgctcgtacattatttctggtttgcaattattattacacgatctcatttcagtgccaccggaggagctctatgccacacagcttactcaactccaagaaatggggtttattgacaccgcggagaacattcaagcactggtcgctactgctgggaatgtacatgctgcggtggaacgccttcttgggaaccttggacagtagctaacccgagcgagccagacactattcgtaaatcttaaaattgtcgcgcatatgcaggagtgttcggcttaatgttcctcaagccccagaatttgaaggcggcggcgtccatagtcccgaaaacaaaataatgaaagagtcaggcagccgtttacttttgtcatacatggtggtcttgtcttttttttttacagcgatgtattttgcaatgttgattggtgtacatacgtatcggtcggatgttacctccctgtagtctgtcttttccaactatcgattcttgatttccaatatactatcaaatc

SEQ ID NO: 22712 - DNA, 1230 bp, Zea mays
  Clone ID: LIB3591-087-C9_FLI
ctccctcagcccccctctctctctcgctctcggcgacgactgggcgaccgccgccgccgctgccgctgcgccgcccttgtccaggtgcccaggtcttcgccggcgccttcgccaggtcttcgaagattcagggaatataagtaaaatgaggccagttttttgtgggaaccttgactatgatgttcgcatctcagaggttgagcgcctttttgggaagtatggaagggtggaacgagtggatctaaagacagggtttgcatttgtctacatggaagatgaacgcgatgctgaagatgctatcagtagacttgatggaattgattttggcagaaaaggaaggaggatcagggttgagtggacaaaggaggatcgcactgttggccgaaaaagcagctcaaggaggtctccaaccaatacaaaaccgaccaaaaccttgtttgtgatcaactttgacccgatcaacacaagaatccgagatctggagaggcacttcgataaatatggcagggtcgcaaatgtaagaatcaaaaagaactttgcctttatccagtttgaggtacaggaggatgctacaagagcattggagggtactaatggaagccatttcatggacagggtgatctctgttgagtatgcacttcgtgatgacgatgaaaaaggtgaaagagggaacgggtacagcccagacaggagaggtcgtgaaagatccccaggtagaaggcgttctcctagtccctacggtagaggacgggagagaggtagcccagattacgggagaagcaaggagagggggagcccagactatggcaggggaggacgcagccctgataatggcaggggagtaagcccagctggtggtggcagaggcgatcatgccaggggtggagggcgcagtcctgactatgatcgccagcgccgggaagctagtcctccaggttatgacaggtcccccagccgctcacctgggagggaggccagagagtagaagcagcgttccattccatgcctgtgttcaagcatcagatgaatgtgcaagttggtaatgttagccggcaggaaacttgtctactatgcgcgttagctcgtgtttgactttccacccatttcagtatgaagcgacctcagaatgtaactcgtgtagtagtattttttagtggtagctttcagtactggtttgaacctgttgttggctttattttctgagtaaaatgcaccactcgaactttactc

SEQ ID NO: 22713 - DNA, 966 bp, Zea mays
  Clone ID: LIB3591-087-F1_FLI
ggagaggggagcagcgagatcgtgcgcgcctccgagatctccacgaagttgtggtaacatggggctcaccttcacgaagctcttcagccggctcttctccaagaaagagatgaggatccttatggttggtctcgatgcagctggtaagaccaccatcctctacaagctcaagctcggagaaatcgtgaccaccatccctacaatcgggtttaatgtggagactgttgaatacaagaacattagcttcactgtctgggatgttggaggtcaggacaagatcaggccattgtggaggcactatttccagaacacccaaggccttatctttgttgttgatagcaatgacagagatcgtgttgttgaagcaaaggatgagctccacaggatgctgaacgaggatgaattgagggatgctgtcttgctcgttttcgcaaacaagcaagatctaccaaatgcaatgaacgctgctgagatcaccgataagcttggtctccattccctgcgccaacgccactggtatatccagagcacttgtgctaccacaggagaaggtttgtacgagggtcttgattggctctccaacaacattgcaaacaaggcctgaatggacaattctgctgtttcacggagcacatctgcacatggcgaggcatggtcattttgaccctcagacgatcattgtttcattggaaagtatcgtatttctatgctaggcttttcagagagattactctctaagaaactgatccgatattaagacactataattggcattggcactagtagatcgtttactgagtaatgcagtttattttaatgtatcccaattgtgttgtaagatacaactatgcgtcggaattacccattcaatttgaatctagatacgtagtttttgttatatacttatacttggatatatattgtttaatacatggtaaaagtaacatatcaagaaaaatattttat

SEQ ID NO: 22714 - DNA, 670 bp, Zea mays
  Clone ID: LIB3591-087-F2_FLI
gaattccaggaggccgaaatcctatggccggcaggcgtggacggcggcggcgaggcggcgcctgcttgctcggtccgtcatcgtcccagggcagccacgccggtcgacatctctcggcagaagcggcggtgccgcccctgcccggtgtcgtcgtcggagcattattacgccaccacgctcgacgaccaggaaaccgacgacgtcggcgatggtgcaaaagggacgactgcgaaccacggctcggcagtcgtgccgccgcacgttcttgtcgcgcggcggaggaggctggtgcgcggccggacggcggcctactccatgtgcgctggcaaggggaggacgctcaaagggcgagacctccgcgacgtccggaacctcgtcctcaagatgacaggcttcatcgaggagtgaatgaatgcgtgccgtcgcatcgcatggatccagaggattcttttcagcaagccaatggaagaagcacccgtagcagtctagcagaaggatatacaactatacaagaagatgacgactgttcacgcgtaataattaatttgctagcttatgtaataactaggtatatgcccgtgcgttgctacggaatcaatatgataaaatccatatatatgtaaatgttgaataattagacaaattccaaattaaattccgaatataaatc

SEQ ID NO: 22715 - DNA, 881 bp, Zea mays
  Clone ID: LIB3591-087-F9_FLI
tggcttctcctccccctcttaccaagtcctcctcgggttagggttccttagggttttgtggaggggcgatggcggcggctgatgtggagtaccgttgcttcgtcggcgggcttgcctgggccaccagcaacgagtcgctggagaatgccttcgcctcctacggcgagatcctcgactccaaggtctgcttcgtcctcgctaggtttcatttcgcggtctgtttgtgccgttggggctagatccgggtcgtggttcaacagatctgcttcgttttggtacagatctgcgttcgctcgaatcgagcatgacgttttcatgtgattatgcaggtcatcaccgaccgggagacggggaggtcccgcggcttcggcttcgttaccttctcctccgagaactccatgctcgacgctatcgagaacatgaacggcaaggagctcgacggccgtaacatcaccgttaaccaggcccagtcccgtggcggtggcggtggcggcggtggctacggcggcggtcgcggcggcggcggcggttatggtggcgggcgccgtgacggcggttatggcggcggtggcggctacggcggtcggcgcgaaggtggcggcggcggctacggaggcggtggcggctacggcggtcggcgcgagggtggcggtggcggctacggcggcggtggcggcggcggctggagggactgatgtgtgggcccatcctggcttcggccgagttatcttatctatctatagtatcgtgttaccgttcgcttctgtcaccgtgttagtgtccgttctacctttggattaggtgttggtaccctgttgttcgctttggttgctcccgctatgaaacgagacgagagaagaatgagcaaggtttttgttcgc

SEQ ID NO: 22716 - DNA, 377 bp, Zea mays
  Clone ID: LIB3591-088-A3_FLI
taatgcatttctttatattagactcattcaatgtttgccccccttttgtcagccaaaactgaaacaaaacctacaaacgatgagatcacaccttctgaagaaaatacagacaaaccagctcacagcagtaacgaagcaccctcgaaggaggtgatccatctcgccatcgttcaaaagatcctcaaatttcggccattcagtgcgggagtatccgcagcatggagcatatcatcacaaggacaaggagctccagataaaaaaaagccgttttcttgttcaatacctccagtgtacatttaggtagctcattgacccgtccaaacgaggtggcttgtatacttgctgagttcatctatatatatctgagctaacatatc

SEQ ID NO: 22717 - DNA, 2065 bp, Zea mays
  Clone ID: LIB3591-088-D7_FLI
ccgctggccggctcacagtaccagaggagtccaccggaggagctcagctagactcccaccctggtggctcgatcggcaccggccgctgcctgcgagactccgccagcgcgcgatgtaccgggtgaagagcgagggggagggcgagggcgagggcgactgcgaaatgatgctgcaggaacagatggactcgctggtggccgacgacgtcagcagcggaggagggtcgcctcacaggggcgtcggcacgcccctgaagaaggggccatggacgtccgcggaggacgccatcctggtggactacgttaagaagaacggcgagggcaactggaacgcggtgcagaagaacaccgggctgttccgctgcggcaagagctgccgcctccggtgggcgaaccacctcaggcccaacctcaagaagggggccttcacccccgaggaggagcgcctcatcatccagctccacgccaagatggggaacaagtgggcgaggatggctggtcacttgccagggcgtactgacaatgagatcaagaactactggaacactcgaataaagagatgtcaacgagctagccttcctatttatcctgctagtgtatgcaatcaatctacaaatgaagatcagcaactgtctggtaattttaacggtggcgagaatatatccaatgatcttctatctgggaacagcctttatctgccagattttaccagtgacaatttcattgcgaacccagaggctttatcctatgcaccacagttgtcagctgtttcaataagcaatttgctcggccaaagctttgcatcaaaaagttgtagcttcatggatcaggttgaccaagcggggatgctgaaacaatctggctgtgtgcttcctgcattgagcgatgccattgacagtgtgctttcctcagctgatcatttttcaaatgactctgagaagctcaggcaggctttaggttttgattatctgaatgaagccaatgctagcagcaagagtattgcacctttcggggttgcacttactggcagccatgcctttttaaatggcaatttctctgcttctaggcccacaaatggtcctttgaagatggagctcccttcactccaagatactgaatctgatccaaatagctggctcaagtatactgtggctcctgcaatgcagcctactgaattagtagatccttacctgcagtctccatcagcgaccccttcagtgaaatctgagtgtgcatcgccgaggaacagtggtcttttggaagagctgcttcatgaagctcaggcactaagatctgggaagaaccaacaatcatcggtccgaagttcaagttcttctgctggcacaccttatgagactaccacggtggttagcccagagtttgatatgggtcaggaatattgggaagaacagcccagttctttcctcagtgaatatgctcattttagtggaaattctttcactgaatccactcctcctgttagtgctgcgtcacctgatatcttccagctctccaagatttctcctgcacaaagcccttcaatgggctctggcgagcaggcgttagagcctaaacatgagtcggcagcttcacctcgtcctgaaaacttgaggcctgatgcattattctctgggaacacagccgatccatccattttcaataatgccatagccatgctcctgggcaatggcattgatgccgagtacaaacctgttcttggtgatggaattgtgctcgattcttcgtcatggaacaacatgcaacatgcttttcagatggcgggattcaaatgagttccatgcacttgtttgtgatgctgaagggcttcttgttgcttgttttggggtcagtatcagcgaaggccgcattgattgtgacgctgcattcctgacagagggcgtgcaggtgcagcagctaccatatgtgatcttcatgctaatagtccttttgtctaataaagtgcatgaagataaaccggatattttttttttgctttgtattagagaaccgtttttgtcaaccctgtcaggattctgttggaaatgtgtcatgatttttgtttgaac

SEQ ID NO: 22718 - DNA, 829 bp, Zea mays
  Clone ID: LIB3591-088-H7_FLI
cgcccttcaccacagtccccagacatggagttcgaagaccgctgccacaaggtccaggagcccaagttcgactgcctgctcttcgacctcgacgacaccctgtatccgctgagcgccgggatcgcaggccatgtcaagaagaacattgaagattacatggttgagaagctgggtattgacgagaccaagatcgagaacctgggcaatctgctgtacaagaactacggcaccacgatggctggactcagggccatcggctacagcttcgattacgatgagtaccacgccttcgtccatggaaggttgccgtacgacaacatcaagcctgaccccattctcaagcacattctcaagaacctgcgcatccacaacatcagggaagcgctgccggagctgtgggaggaggccgagaaggcggaggacgtgctctaccccgaacgcgttgcgatggagacctcggtcaccgcgtaaaacccctgaatgcctccggtgcaccgtcagccgaactttctcgacatctccaggaccgcatcaacgatcacatgtcactcgctccccgagccagggccggtgatgatctcgcgctggaactgaatccaccagcaatggccgggccgaggatcgatttccgacagcaggaagggtgcagcatgtaaagggggaacagatgagatcatgtttgggttggtcccccgttgtatatgtagttatgtatcagccagtcctttgtttgtaaattaccagtatttagaagtaataagaaaatgggggtttacgtgtacgtttcctgtgctctgtcatctgaagcaataaaactggttagcaagac

SEQ ID NO: 22719 - DNA, 590 bp, Zea mays
  Clone ID: LIB3591-089-A10_FLI
ccaccctcatcttcgtcttcgccggccagggctccggcatggccttcagcaagctgaccggcggcggcccgacgaccccggcgggcctgaccgccgcagccgaagtcgggcctcttcgtgggcatcaacaagggccatgtcgtcaccaagcgcgagctgcctctgcgcccgtcccaccgcaaggggaaagcaacgaagagggtgtccatggtcaggggcctgatcagagaggttgctggctttgctccttatgagaagcgtatcaccgagcttctgaaggttggcaaggacaagcgcgctctgaagcttgccaagagaaagcttggaactcacaagagggcaaagaagaagagagaggagatgatgggcgtcctcaggaagatgagatcggctggtacgcacactgacaagaagaaataaagcatttcaagttcatgaatgtggcagccagagattatcaactgtgttttttccctacctctagaaactagacatggcaaagtatttttgaccgaaacattgtttgttagtaatgtattgaaccacctcgtggtattttgccccaacttccaatgcatcaatggtttgtt

SEQ ID NO: 22720 - DNA, 411 bp, Zea mays
  Clone ID: LIB3591-089-D1_FLI
tataccgaaagcaagcaaggcttcttttttttttctttctctcccaagaacatggaggctccctccaccttgctccagctctccctctcctcctcctcgtctctgggtcttcttctgctgctgctgctgcttgtgcagttgccgtccatggccagctgccacgaggagatgaagtccatctacgtgggccagagggttctccccgtgcgcctcggccggccggcgttcgggcccgagagcctcgccttcgaccaccgcggcgacgggcccttcaccggcgtctccaacggccgcatcctccggtggcgcggcgcccagcgcgggtggaccgagttcgcccacaaccacaagcacgagacggtggccatgtgcgcggcgaagaagaggctggtggtgccggagagcgcgtgc

SEQ ID NO: 22721 - DNA, 832 bp, Zea mays
  Clone ID: LIB3591-089-D10_FLI
cgagagacttgaccaagcagcagcagcagggatggcgcctctgaagctgtacgggatgccgctgtcccccaacgtggtgcgcgtggccaccgtgctcaacgagaagggcctcgacttcgagatcgtccccgtcgacctcaccaccggcgcccacaagcagcccgacttcctcgccctcaaccctttcggccagatcccggctctcgtcgacggagacgaagtcctcttcgagtcccgtgcgatcaaccggtacatcgccagcaagtacgcgtcggagggcacggacctgctccccgcgacggcgtcggcggcgaagctggaggtgtggctagaggtggagtcgcaccacttctacccgaacgcgtcgccgctggtgttccagctgctcgtgaggccgctcctgggcggcgcccccgacgcggcggtggtggacaagcacgcggagcagctcgccaaggtgctcgacgtgtacgaggcgcacctcgcccgcaacaagtacctcgccggggacgagttcacgctcgccgacgccaaccacgcgtcctacctgctctacctcagcaagacccccaaggccgggctcgtcgccgcccgcccccacgtcaaggcctggtgggaggccatcgtcgcccgccccgcgttccagaagaccgtcgccgccatccccttgcccccgccgccctcctcctcggcttgacctcgccttgcgttgcgccgttgcctgggtcgcggatgcgtcggagccccgagtcgaataaaagaggcagcatcctgtcttgcatttgctgctgcgccatgtgttaacagcctgtgtaataaacactgttgcttt

SEQ ID NO: 22722 - DNA, 1086 bp, Zea mays
  Clone ID: LIB3591-089-G8_FLI
aacctcgccaaaaccctacgccgctcaactatgctcatccggcgaccgctccaaatcctcaccctccccctcctccgccgccacatctccgccgccaccgtcgaggcctttgtgtcccccgaccaagccaccgacccgctctccccgccgtacgactacctcccgggccacccgcggccagacgctaagcacaatgaggtgatcctcgccgtcccgcgcgcctcttcggggcgccacgtagccgccaaggagcgcaaggccgggcgggtccccgccatcgtgttcgagcaggagaacggacaggagggcggcaacaagcgcctcatctccgttcgggccaatcagatccgcaagctcgtcgaccacctcggccggtccttcttcctctccaggctgttcagtctccaggtctggtcagaacatgccgggcagggcgaactcatcgaaagcgtccgcgtcctacccagaaaggtacacctgcatgcaggcactgatgaaccgctgaatatcacatttatgagagcaccttcttctgcacttctcaaaatagatgttcctctgatgttcattggagaggatgcctcgcctggtctcaggaaaggagcttacttcaacaccataaaacgaacagccaagtatctgtgccctgctgacatagtaccaccatacattgaagtggatctaagtgagttggatgtaggacagaaattgatgatgcgtgatctgaaagttcatcctgcgttgaagctgcttcattcgccagatcagcccatctgtaactttaccggatcaaggtctccagaatagaagaagggaaaataacttgcttctttgtatgagctgttttgagcacaataaggttttgtttcgtacttgagtgattcaggtgttacttgtcctactgttaggatgaattgtagccagagacacctatttttacctcaggaagggatcttttgagcaggtagatgctactacagctagacgcacttgcaaagtttcctaaatatggtcatctagtgttaacagaaacttatggtgctgtgagcaatattgaaaattgtttgcaatctaattgtttacaat

SEQ ID NO: 22723 - DNA, 1319 bp, Zea mays
  Clone ID: LIB3591-090-F9_FLI
cttcggcctcgccaccgtggcccgccgccgcggctcgccgcacgcggcgcgctgcgtcgtgggcacgccggagttcatggcgcccgaggtgtacgcggagggctacgacgagcgcgccgacgtctactcgttcggcatgtgcgtcctcgagatggtcacgctcgagtacccctacagcgagtgcgtgcaccccgtgcacatctacaagaaagtcacctccgggataaagccggcggctctgtacaaggtgaaagaccccgcggtgaggcggttcatcgacaggtgcctggcgccggcgtcgcggcggccgagcgcggccgagctgctcagcgacccgttcctgcagctggaagacggctgcggcctcggctacggagacgacgcggactacagcgccatgtacaactacctgcaccagcccgcgtgcctggaccaccaccaccatgccggcagcattggctccacggcgagcaacggggtggtgtccaatggcggcggcggcggcggcggcagatgggacgacgagtccgaggacgaggacgacgatggcagcatgttccaaggcatcgaccagctgttcaacgagcacgaagacgacgagctgcacgttgctggtgtcgacatcaccatcaagggcaagaggatgcaggacggacgcatcttcctccggctgcgtatcgccgacaaagatggcacagggagggtccggaacatctacttccccttcgacgcggacgcggacacggcgctgagcgtggccaccgagatggttgcggagctggacatcaccgaccacgaggtgacccacatcgccgagatgatcgacggcgaggtgggcgcgctgctgccgcactggaggccgggtcctggcatggacgacgacgacggcggcggcgccggtccggacacgtcgggcgctaccgaccgctgcaagaactgccggtccagcgcgtcctccgccgggtcgctggacgactacatgtcggcggcggcggcggcgcggcgcggctgccggtgcgcggagctgcacggccggttcgaggagatcacgttccaggccgacgaagagcaggtgcggttccagggctctgggtgcagctccgacgacggaggcgggcaggctgagcagtgcgccggggacggaggcagtactgtaactgaacgttcagaccagccatgacctggttcctcgcaggagcaactcctgttttaaaaatctgaaaatgtcaccagtgcagccgcacagctgcttgtaagtgaacttttttgtggctctggttgagcatacgatcgttaagacggatatagtttgaagtttc

SEQ ID NO: 22724 - DNA, 996 bp, Zea mays
  Clone ID: LIB3591-090-G8_FLI
caccactccacagcagtagcaagagggatagagcaaggccacacacacacacacaccactaggctaggttagccttttaatcgtcgtcgagaagcaagaagggcgcgcacgcaagcaggcaagcaagaagagagccgatcgaccgagagctagcacgcgatggcgaggtcttccaagatgatggtggcggcagctctgctggccttggccctggccgtgtcgaccgccgaggcgaggaacatcaagaccacgacgacggagaagaaggacgacgcggtggtgcagccgcagaccttcccgcccttcgaccgcctcggcggcggcgcgtccccggcgttcggcggcctccccggcggcagcattcctggcagcagcattcccgggttcagcatgcccggcagcggcagcagcctacccgggttcagcttgcccggcagcggcagcatgcccctcttcggcggcggctccccgggcttcagcggcttcggcggcatgcccgggtcgcccaccgccggctccgtccccgagcacgccaacaagccctgaacgccaacaagcgtggtagtagagtggtgctactgttactgtagtacgtcgtcgtcttcatgcatgcgtggttcgtggtttcccctagctccatacgagcagtagttgggccttgcacgtaccgtacgtctagctagctatatatatatagcttgtgttctactgccttttagtttaattacctgcctgcattggagagttggatctgtttcatttggtggtgtttgctttactattaggtcagtatctgtttgtggagacttggtgtttaatttatttagccgtttgtgactggttgtagctagcggtggtgcggtggtgatgttcttgaggcatgaataatgctacatgcatgtgatgtatccatgttttgtgtgtggtaaacctgttgtttgtataagctgtatgcatgggtctttaatttgtttttgaagcagggttcacgttatt

SEQ ID NO: 22725 - DNA, 539 bp, Zea mays
  Clone ID: LIB3591-091-B12_FLI
ctgaaacatagtacagaggaggagaggagaacgagagctaagaagatgaccggcaaggttctccttgtggccgtccttatcttggtgggcgtggcctctcgatgctcgggcagtaggggcctgcagggcgatcacgttgctgaacagaagttcggtggcggtggctatggaggtggcggtgggtacggaggctacggcggcggtggaggaggaggtggtggtgggtatggcgccgccgtcgcgcaggccgccatgttcaagaaggccaactacgcctgcagctactagctaggcctcgcgcatcatcagcgtataacgtacgcacgcaatgttcgttatataattccatacgtatatgggtgtgcaaggtccagaccgaccagctgtatgtcttcatcgttgccttcgtttctgcgtcgtcctcccatgcatgtttatgcatgatgccgtgccgtctcgttgtcagctggttcagtagtgatgcttactttcttgtcgttgttgctaatgtaagaaataagacgatgcgttgactgctt

SEQ ID NO: 22726 - DNA, 800 bp, Zea mays
  Clone ID: LIB3591-091-C5_FLI
aggaagatggggctcgcgttcgggaagctcttcagccggctcttcgccaagaaggagatgcggatcctcatggtcggcctcgacgccgccggtaaaaccaccatcctctacaagctcaagctcggcgagatcgtcaccaccatccccaccatcggtttcaatgttgaaactgttgagtacaagaacattagcttcactgtctgggatgtcgggggtcaggacaagatcagacctctttggaggcattacttccagaacacccagggtcttatctttgttgtggacagcaatgaccgtgaccgtgttgttgaagccagagatgagctccacaggatgctgaacgaggatgagctacgtgatgctgtgctgcttgtttttgccaacaagcaagatcttcccaatgccatgaatgctgctgagattactgacaagcttggattacactccctgcgccagcgacactggtacatccagagcacttgtgccacaactggcgagggtctgtatgaaggcctggactggctgtccagcaacattgcgagcaaggcttgaggcctaccttgaatgtcaaccgcgaactgactaggagctccggatgtatcatggaaactcaggacagaatcgcagttgcaacctgttagatgtcttctaccggcactatatatattttttgtttgatgtgtaatgatgttactgttcaacgtttattaccctactatactgttggatgttctttggacctgtttcatttcgcacaaggattggacttccaatatcatgctacattttacattcgtggt

SEQ ID NO: 22727 - DNA, 937 bp, Zea mays
  Clone ID: LIB3591-091-E7_FLI
atccccctccttgacttcgccatccccctctcctacgctttgttctgggctcttcctggctgcctcctcttcctcctcccctgtacagagagagaacccagagagagggagcgggctctgagagaaccggagatggggaacatctgcggtggctccgggaaggatcgggtggccgaggatttcaggccgtctagcccagggacaacaataaccgccgctcaacttcgccatggtcgacgacggcatcttccgctcgggcctcccggacgccgccaacttccgcttcctgctctccctcaacctgcgctccatcgtgtacctgtgcccggagccgtacgcggaggagaacgcgcggttcctgcgcacgaacgggatccggcttcaccagttcgccgtcgaagggagcaagagtggtccgacagtgctggataccatgtcggcgcaggaaccattcgtccacatccccgaagaaacgatccgggaggcgctcaaagttgtccttgacgtgagaaaccagccggtcctcatccactgcaagagaggcaagcaccggactggctgcgtcgtcggatgcctgaggaagctgcagaagtggtgcctgtcctccgtgttcgacgagtacctgcacttcgcggcggcgaaggcgaggaccaccgaccagaggttcatggagctgttcgacgcgtcgagcctgatgcacctgacggcggcctcgcagtactgaccactgaccagagcggggcgagtggttcccgagcggtcccgatcctgccaccatgccgcatcaagcaagccgtttccccctgctgtttccgaagcaactcggcagagaataatgctggaaccatgagtgtgctgtgttgcgtgagtgctgtggttgcttcgtgttcaactggtttcagattctgaactggcacggcctgcattcacttgaatc

SEQ ID NO: 22728 - DNA, 1194 bp, Zea mays
  Clone ID: LIB3591-091-G7_FLI
ttccacgcttgcttctccgggagggaaggcacacgggaggtcgccccgccacccatcgcaaaagccacgcgccaccaaactcttttttccctcacccagtcgctttcgcgttcagcgcgagctgagccagccagtgggtcggtcgctggaggcggagccataaaggcgtcagcgacggcagcatgatgagcggcagatcgggcgggagggacgccgagggcgagtgggaggttcggcccggcgggatgctggtgcagcgcagggacggtgaggcggccggccccgtcatcaggatcagggtctcccacggcgccaacttccgcgaggtcgtcgtgccggcgcaggctaccttcggtgagttgaagaggatccttgttcagactactggcttggagcctgagaggcagaggctcttcttccgtgggaaggagaagagtgacagagagttcctgcacacggcaggtgttaaggatggagcaaagctgcttctgctcgagaagcctgcccctgccaacatagagcagaaggttgagcctgtgattatggatgaaagcatgatgaaggcatgtgcggctgttgctcgtgttagagttgaagttgataagctgtctgctaaggtgtgtgacttggagaagaatgtactaggagggagaaaggttgaggataaagaatttgttgtcttgacggagctgcttatgatgcagctgctgaaactcgatggcattgaagctgaaggagaagcaagggcacagaggaaggctgaggtgcgccgagttcagtcccttgtggagaccttggataagctgaaagcaagaaatgcaaaccccttcagcgatcataataaggctgtttcagtaacaacgcagtgggagacgtttgagaacggcatgggcagcttgagtgctccacctccccgtgtttcttcaacgcaagctaacactgactgggagcagttcgactaggctcagatgaagctgttgatgtatcatgaaatctgtgagatcggtatggacattcctttccgaggcagcgaggtgttgtgtatatgcaccacgtttgataacttttggcgtcccaagtgcctgtgattctgtgaatgttaccagatcgtgccactgccatactaccatgtgaattgcatcgctcattgagggtcatatttcaatatgctcctgccagtgccattcgcgtgct

SEQ ID NO: 22729 - DNA, 1249 bp, Zea mays
  Clone ID: LIB3591-091-H7_FLI
aaaaagtcaaacctcctccttaatagaagaaataattcatacatattacatacgacaagcgcgaggagacaaggtaagcatttgggtcctccactccgtctccgagatgggtatcgctctcctcgcgctgctgctggtgctgccggcgagccatgcgcgggtgtgcccgccgtgcgggtcgacggccgtgccgtacccgctcagcacaggcgacggctgcggcgacccggcgtacaaggtccggtgcgccgccgccaccaactcgtcgacgtcgtcgccgacgctcatgttcgatgcgctgaacggcacgtcgtaccggatcacgtccatctcggccgcgacgcagcggctggtggtcgcgccggcgccgttggtggcgcagggcagcaggtgcgtgtcggaggggcgcggcggcggggtgcagctgaacgcgtcgctgccgttcaacgtgagctcgtccaacaccatcatgctgctcaactgcaccagcgcgctgctgctgtcgccgctcaactgctcctccaactcgctctgccacgtctacgccaacgccacggggtccacggcggcggcttgcgcgccgctgccgctctgctgcaccttcgtggcggggggctcgtccacgtcctacagcatccgggtgtccccgcagttctgcagcgcgtaccgcagcttcgtggggctcgacccggcggcgcagccgccggccacgtggggccgccgcctcgggctggagctgcagtgggccacgcccagggagccgctctgccgcacgcaggccgactgcgaggacggcgccaacgccacctgcgccgacgacccgctcacgcccgcggcccgccgctgcttctgcgtgcccgggctctcgtggagccccctcgccggcgcgtgccagctgagtacgtaatttctttccgctgcatctgcacgccgttgaatcgaagactcgaggacgaggatggacaggtcctgaattaaatggaactcctgtactacttgttcggtttggtgcagatccctctgattgccagatcgctgggggctgcggaggatccaaccatgcgcctctcattgcaggtaaccgcttgcttccgtgttcttgtcgttcagagtgttcgacaaatctcaaaacctcatattaaccgctaaaactttgacaacaattttcctcggcgtagtacaaatccctcatatgacgcgttgggtaaagaggaggtagtggtttggtcgactcaagcaacccttttga

SEQ ID NO: 22730 - DNA, 1717 bp, Zea mays
  Clone ID: LIB3591-092-A9_FLI
gccgctggcgctcgcgcaactgcaggacttgcgggaccgcatctccgaccgcctccgcccatggagccgctccgcgcagttctgggtccgcgccgcggacatctacaccagctacaaggtgtgccagctgcgcgcggggttcgtgaaggacgaggacgagctagagaccatgtgggagcggcagcacgagctcggcgcggagaagatgtactccctctgctccgagctcggcggtctcttcctcaaggctgctcaaattctgggaaaacctgacctggcaccgatggcttgggtgaagagacttgttacgctgtgtgatcaagccccatccacgccatttgatgtggttagagatgttgtggagaaacagttggggaagaacttcgatgacatgtttgaattcttcgatgtcgagcctgttgggtctgcttctattgcacaggtgcatcgagcaaggcttaaattatcaaagacagacgttgctgtcaaggttcaacatccaggagccgaacaactgatgatggttgatattcggaatatgcaagcaatggccttgtttttgcagaagcatgacctcaactttgatctattctctgccaccaaagagatggaaaaacagatatgttatgagtttgactttgtgcgtgaagcaagagcaatggaaagaatacgagaatttctacgtgtcactaataagaaacctccggttatggtgcctcgtgtgattcctgggatggttagcagagaagttttgataatggaatttatcaaggggaccccaataatgaatcttggcaatgaaatggctaaaaggggcatagatcctggtggtaagattgcagcaatggcaaagcagaagattttgtcagatcttactcttgcatatggtcaaatgatcttgaaggatggctttttccatgcagatccacacccaggaaacatccttatctgcaaggacacagaggtggctttacttgattatggacaagtgaaagaaatgccagaagatttacggctggcttatgcaaatcttgtagttgcaatggccgatgatgatttctcgagggctgaggaaagtttcagggagctgggtatccgaacatgggccataactgataacaaactagaagaattgtttcagttatccctgcgaatgttcgatacaagattaccaccaggtgtaactgttatgtcaccttttgccgatgattcttcgcttaacaaaattggagtggagagcttcccggaggagctattttcagtgcttcgaacaatccagcttttgcgagggttgactgtgggcatgggccttacattctcgtgcgcccagcattggagaccgatagctgaggaggcgttgttaaaagctggaagacaaagcgcttcaaaatcaagaaaacagaagaggagttttctgaggagattgttttggtgaagtaggcatttagccgcatagcgaacatcaaaggacatggtatacgaacattctgtgatgaaacggaagtagccaaaagctcgagccttcgatttttagacagtacatctgtccatattcgtttaccttgggtgcgtgttattttatatatttgctcattcctttatcactatgtgttttttgggattcagtatatagttgggattgtatcggaagctgacatgtacacaagtgacatggaccaattcaaaggaaatcatcgtggtatgtgggggtttgttc

SEQ ID NO: 22731 - DNA, 617 bp, Zea mays
  Clone ID: LIB3591-092-E2_FLI
ccgccatggcaagtacatggcatgctgcctcatgtaccgtggtgatgtggttcccaaggacgtgaacgctgctgtggccacaatcaagaccaagcgcaccatccagttcgtggactggtgcccgactggcttcaagtgcggaatcaactaccagcctcccagcgtcgtcccaggcggtgatctggccaaggtgcagcgtgccgtgtgtatgatctccaactccaccagtgttgtggaggtcttctcccgcattgaccacaagttcgacctcatgtacgccaagcgcgccttcgtgcactggtacgtcggtgagggtatggaggagggcgagttctccgaggctcgtgaggatctggcggcgcttgagaaggactacgaggaggtcggtgctgagtttgacgagggtgaggacggcgacgagggtgacgagtactagacgctctactggcgcggcgtcgtcgggcttgtgtgccactgctatcctgtgatctgccctgagtggctcctatcgtgttatgtttctgtcggttcttatctatctgtcgttgtgtggtttacaacttacgttgtaagactttattcccccgctttgctactgggttattaagtttggcgtt

SEQ ID NO: 22732 - DNA, 988 bp, Zea mays
  Clone ID: LIB3591-092-G5_FLI
gccgccaccaggtgcagagtctttcgtcatctcttctccggcgaagaacccccagtcgcccaccagatcacttgttaaactttgttgaggggtgatggcggtttctttcgcaaacctcaactccgaggcagggcttaaaaagcttgatgagtaccttctcactcgcagctacatcactggctaccaagcttccaaggatgacttggctgtctacacttcgttttcggctgctccctcgtccaagtatatcaacgtagcaaggtggtttaaccacattgatgcgctcgtgaggctgagcggaattactgcagagggccaaggtgtgaaggttgaatcctcagcagttccttcagccccaactccagatgttgctgaagcacaggccccagttgctgaggaggacgacgacgatgatgttgacctttttggtgaggagaccgaagatgagaagaaggctgctgaagagcgtgctgcagctgccaaggcttctggcaagaagaaagaatctgggaagtcatcagttttacttgatgtgaagccatgggacgatgagactgacatggccaagctcgaggaagctgttaggagtgtccagatggaagggctgctctggggcgcatccaagcttgtcccagttggatatggtatcaagaagctgcaaatcatgatgaccatcgtcgacgaccttgtctctgtcgacactctcattgaggactatctgtgcgctgagccagtgaacgagtacgtgcagagctgcgacatagttgccttcaacaagatctaggcgtgacttccgatcagtccttcccctggggtgctggcgatggtggtggctgggcaatgcaccagcctaatttatccatagctatatgtctgctttgtgtggccagtgatattgccgtgagtatttttggatcctattcgagtcgaatgtaccagtaccagagttaatttgctttaattcgaaacaccgttccagttggaattc

SEQ ID NO: 22733 - DNA, 726 bp, Zea mays
  Clone ID: LIB3591-092-H11_FLI
acggttgctctagatccgttcatcctggtggttttgtgaggtcgaaagcggcgagcgaattagaagatgctggacaagctgtgggacgacgtggtggccgggcctcgcccggagacgggcctcgagaagctccgcaaggccaccaccgcccgcccgctcgtcatcaacaaagacgcggacggcggcagctacaagcgggcgcagtcgatgccgtcgaccccgacgacgccggtgacgccgtcgtcgtcgtcgtcgtcgacgacgccgcgcggcgccggcaacgtgtggcgcagcgtcttccacccggggagcaacctggccaccaagggcatgggcgccaacctcttcgaccggccgcagcccaactcccccaccgtctacgactggctctacagcgacgagaccaggagcaaccaccgctagatcgggcgagatggatggacagtgaagaggccatgtttgctggtccttgtggttatctaaaacgcacgcatgctctattatagctagtcatcactatatatatacttgtgtttgtgtattgttgttcttgttctgctggtgtctccgccgtttaatttgacctatgttatggagtgagtgatatatgtgccgtcactcctagtatatagtagtgagtgactagttggtatgtgtagtactgtactatcttttctccatatgcatgttttgccagcgcgtaatgaatgtaatgtcagtactgct

SEQ ID NO: 22734 - DNA, 509 bp, Zea mays
  Clone ID: LIB3591-093-C10_FLI
cttccaaagttctagcccctctcgtgagtcctgtccaaataatggccacgcgcagcagtgtccttctgcttctgacggcgctcgccgcagccacggccgcgccgtcagcggcgaccaggaagctcatgttcctcgtccagccacagccgaacctcctcacgtaccacaacggcgccgtgctgagcggcgacatcccggtctccatcctctggtacggccgcttcacgccggcgcagaaggccgtggtctccgacttcctcctcgccctctccggcgccgcgccgccgcagggctcgccgtccgttgcccagtggtggagcagcgtcaaccagctctacctctccaaggcggcggcggcggcggccgtcagcaagaacggcgcgcacggcggcggcggcgccaagagcgcgcgggtggtgctgtccgggcaagcctccgacgagggctgctccctggggaagagcctgaagctgtcgcagcttccggcgctagcggccaaggcacgcccc

SEQ ID NO: 22735 - DNA, 1193 bp, Zea mays
  Clone ID: LIB3591-093-E10_FLI
gcgacgtctacgccgagtgcccaggcattcttcaggcgcaggtcgctgccgccctacgccaggtgccccggtcttctttcgtcccttcgccggcgacgaccaccgccaggacagtatagcggatggcttcgtcggtgcgggcgccatcggggtcggtgatcgccgtggcatcgtcctcttcctcagcagccttggccggggtgtgcggcacgggctcgccgtgcgccgcgtgcaagttcctgcgtcgcaagtgccagccggactgcgtgttcgcgccctacttcccaccggacaacccgcagaagttcgtgcgcgtgcaccgcgtcttcggcgcgagcaacgtgaccaagctgatgaacgaaatccacccgttgcagcgcgaggacgccatgaactcgctcgcctacgaggccgacatgcgaattcgcgaccccgtctacggctgcgtgggcgtcatctccatcctccagcacaacctacggcagctccagcaggacctcgcccgcgccaagtacgagctctccaagtaccaggcggcagcggcggcagcatccgcgtcgacggcgccgaccgggccgcaggcgatggcagagttcatcggcagcgcgatgccgaacggcgccgcgcacaacttcatcaaccttggacactcggcggcgctcggctccctcggaggctccaccgccatgttcgggcagcaggagcagttcggcagcaacgcgcagatgctgtccaggagctacgacggcggcgagcccatcgcgaggatagggatgaacaacggcggctacgagttcggttactcgagcgcgacgacgatgggcgggtctgcaggcgctgtctctggcggcctcgggacgctcggcatcagcagcccgccgttcttgaagtctggaaccgccggcggcgacgagaagcccagcggcggtcagtaggcggttccatccgtgtgaccgatccttctatccatccatccatccatcagtcttgtcaggtttggtttggttttgcatttgcatgctgcctgcacagtgttctagtctgttgtgttttgccttgtgcttccgattaattcgcgagtctggtggactactgttagtcagtttattttctaggtagaggcactaatgaagcatgactaaaataagggtttcattccatttccagggctaataaataccttttgttgcatg

SEQ ID NO: 22736 - DNA, 1388 bp, Zea mays
  Clone ID: LIB3591-094-B1_FLI
caaaagtccaagctttttcgacaggaatcctcctccgcttctgcttggcttgcgatgcttgtttgaatgcgcgggcctgcggtgaggcgacagcggcgccggacggttgcatgctgattgatggtagccgatggagagtagacgaggagggtcggtggcagaagatgcgagcggggcgatgacgagctttgggccacctcagcacggcatcaacacagatgtgaacagcatgcaaccttctcgagttactgactttggggcacttgcacagtctgctggattccgaatagaagatcttgttaaccttaatgcaaatgctttgttcaatctgaagtcgaatactcatacaattaacaacattcctcttcagtttggaagctacggaaagtttgaacaaggacttgttgctgtccccacagcttctgattctagtgacaaatcaagggacaaactagatcagaagacacttcggcgtcttgcccaaaatcgtgaagctgcccggaaaagccgtttacgaaagaaggcatacatccaaaaccttgagagtagcagattgaaacttactcagttagagcaagagcttcaccagactcgtcaacagggtatttttatttctacatcaggagatcaacctcaatcaacaagcggaaatggagctttggcatttgacatggagtatgcacgctggttggaagagcacaacaaacatgtaaatgagttgaggcttgcagtcaatgcacatgccggtgataatgatctccgtggtattgttggtagtgttatggcacactacgatgaatttttcaggctcaagggtgtggcagctagatcagatgtttttcatgtgctgtctgggatgtggaagacccctgctgagagatgtttcatgtggttaggtggcttccgatcatctgaggttcttaagcagtcctcccaacaagctgaagatgctctttctcaagggatggaagcattacaacagtcgcttgcagaaactctagcatctggatccctgggccctgctggaccttctggcaatgttgcaaattacatgggacaaatggcgatggctatgggaaaacttggcaccctagagaactttctacgacaggctgataatctacggctgcaaacacttcaacaaatgcaacgcatcttaaccacccgacaatccgcacgagccctacttgcaataagcgactacttctctcggctgcgtgctttgagttctctttggcttgcccgtccaagggaataaattcaattaactcataaataggattttttttgtactgtctctagtatgtcaattagtttcttcacattgctcatgtgttgatgggatatttggatctaagatcttatgaatggatgacatgtatgtgttc

SEQ ID NO: 22737 - DNA, 1467 bp, Zea mays
  Clone ID: LIB3591-097-G1_FLI
gatattttctttgctgcgaccaatcaattcgaaatctttcctactcggccggatactccgatccacccagtttgttgcgtgctggagctctagtaacagtttattttccaataaatttgggggtttcaactgagcctgctctcccgtgctatcttcaatcgctccgcactaataacactatacagaattgattgtctgtgctaggtctgatgggaagtaaagacggcaccggtgacatatcggaagcccaaggctatgctgccgacattgattccatcagggaggcgcaggcccgcattgcgccgtacgttcacaggacgcccgttatgtcgtcgacgtccatcgatgccatggtggggaagaagctcttcttcaagtgcgagtgcttccagaaagcgtgagggttactgaccgatgtgtttttcggttctgggatgctctataattggtacagtacttattgtttgagtggggaaatgttgagttttgttgtgtaggggcgcattcaagatccgaggtgcttcgaattcgatattcgcacttgacgatgagcaggtatcaaagggcgttgtgacacatagcagtgggaaccatgccgctgctgtggctttggctgcaaagctgcgtggcatacctgcgcacattgtcattccaagaaatgcaccagcgtgtaaggttgaaaatgttaagcgctacggtggtcatattatttggagcgatgccagcattgaatcgagagaatatgtttgtaaaagagtccaggaggagaccggcgctgttcttattcatcccttcaatagtaaatacactatcagtggtcagggtacagtatcccttgaacttttggagcaagtccctgaaattgacacaataattgttcccattagtggtggtggtttaatttctggtgtggcccttgctgcaaaggccataaacccttcgatacgcattctagcagcagaaccaaaaggtgctgatgattctgctcagtctaaggctgctggaaagatcatcacattgccttccacaaacaccattgctgatggactacgagcttttcttggagacctgacatggcctgtggtgcgtgacttggtggacgatgttatcgttgtggatgacactgccattgtggacgccatgaaaatgtgctatgagatcctgaaggtggctgttgagcccagtggcgcaattggcctggccgcagcactgtccgacgagtttaagcaaagctctgcttggcacgagagcagcaagatagggataattgtttctggagggaatgttgaccttggcactctctggcagtctatgtacaaacactgattggagagagtaggaccgatgatattgcccttgaatttcaaacgtgatagttttagacaagtcgtttgtaaacttggaatagttcgttgtaaacatcacttattacctgtttttttatcaatgggttattcagttgcagcc

SEQ ID NO: 22738 - DNA, 1123 bp, Zea mays
  Clone ID: LIB3591-097-H8_FLI
catcaagcctttccacaacatgcgcaaccctaatggtactgggaggtcattgttcccgcagctctcgcaccactcgccagcgcaggtgctcaggaacttcacgcacatcaggaatcttcggatcgagctcccttctggggatgtgggtactgaggagggagttctcctgaaatggcgagcagagtatgggagcacacttcagagttgtgtgatcctggggggtacccgggttgaccgcaagcctgttggtggagagcatgagcagtctttggaggataatggaagcatgccagagtctttctataccaatggtgggctgaaacttcgtgtcgtctggacaatcagctctctaattgcggcatcaacgaggcactatcttctccgctcaatcatcaatgaccattccacacttctgagcttggtactgacagatgccgatggccaaggcacattgtgcatgggagcagagcagctgaaggagttcagagagaaccagttgtcggcctcagcatgttccaacaggactcaggtcccagcctgcaacatgaagctcaagtatgctccatatcttgaactgcctggtggtatggcgttgcaaggcgccactttggtggctatcaaaccctcacctgacggaagcaatggaagccaccctaaccgtaaagaagccgacgcatttgtctttggagcatttgatgggccatttaaggctgctgtgaaggctttgatgaagaggcgcacttaccttctggagatgaatggcttctagaaatcttgtggtatcgagcttgttggtgctatgcatggcatatttagctaagcttttcatctttgtaatatccaagaaagcaccatctctagttgctgcttttagtctgctgttttagctctttgtacagtgttaacatttgattatataaaaatcgtatcaagttctctagtgtaatagcgaatcgctccatagttcaccatcctggcccctggtgtaatatccaagaaatcatatcagtttcgtaggtgtaagttgaaagtagccttggaaaaggagagccagtttatgccttcaggtacataacattcattttgggattgtgaaatgaaagagactgatctgatgccgaca

SEQ ID NO: 22739 - DNA, 574 bp, Zea mays
  Clone ID: LIB3591-098-A2_FLI
gtcgccctccgcggcgtgctgcagcggggtgcgctcgctcaacagccgcgcgtcgtcgacggcggaccggcaggccacctgcaactgcctcaagagcatgacgggccggctcggcggcggcgtcagcatggccaacgccgccaacatcccctccaagtgcggcgtctccgtcggcgtgcccatcagccccaccgtcgactgcaccaagatcaactgatcgatggaaccatagtggaggtagctcgctcgttggatggcagcgtacgtggccatcagcagcatgcagtcgtcgtcgtagcagagatgtcctagctacgtgtgtgtcatgcatcagactggcacataataaagaagtagatcatgcacccaccccactagtgatcacttcgtctagtgtccctcccgtcgtcgtcgtcgtgtacctcgtacgtgacatgccgtagcacgtactacgctagcagagcagcacctcaatgtccttgggcttgctttgctggctctctgttttcgtctctcgtgttgcttttaatctggtacaggtttctaaattataataatgaatagttttttgtcc

SEQ ID NO: 22740 - DNA, 505 bp, Zea mays
  Clone ID: LIB3591-098-D6_FLI
aacgaattaccctcggtgccctccctctcggcggcggcgcaagtccccttcatctccggcgcggcaaatggcaggtggcagggttgcacatgctaccctcaagggccccagcgtggtgaaggagatcttcattggactgaccctgggtctgatcgctggaggtatgtggaagatgcaccactggaacgagcagaggaaaactagatccttctacgacatgcttgacaagggccagatcagcgtcgtcgtcgaggagtagttcccacgtgtcacctcagaagtttttttttccagttgtttttgaaaactcactctggagggcacgacaaagtgaatgctgtggagatttggcttgaaaataagcataaccatttgagaacaccagcttctgttgaattgtcttttcttgtcatgactatttgagcatgtccgtgtcgtaaccaaacatctgatctactttacaatatgttttatgtgatctttgcgattaactgtgctcgacttt

SEQ ID NO: 22741 - DNA, 1497 bp, Zea mays
  Clone ID: LIB3591-098-G6_FLI
ccagctctgacctgctcggtcgcccgtgtcttcgtcttccttaatctcgaattccgaatcctcctccaacacctcgttttcctggattatccagcgagggacgccggtttgttgctcgtcctcctccctggttgcccgaggcggcggtggcggggcgaccatgtacagatcggcgggggtcgcgatggcgtggaacgtgttccggttctgcacggctctgcgtgggctaggttccatcatgatcctgctcgtcctcgcgatcgtcggcgtcacctactacgctgtcgtcctctgcaactacggccccgccctgttcaccggcggcggcaccactctcgccgcgctcgccgtcctgctctccttccacttcctgcttgctatgcttttatggagttatttttctgtcgtgttcacggaccctggttctgttccaccaaattggaatcttgattttgatgtggagatgggagaaactgctcctcttgctagctcagagctctgtagccagatgaactcacagcaatctgtggctcttggcaatatgacaaatccaagggttaggtactgtaggaagtgcaaccagttgaagccacctcggtgccaccattgctctgtttgtggaagatgtgttcttaagatggatcatcattgtgtgtgggttgttaattgtgttggggcgctgaactacaaatactttcttctcttcctgttttacaccttcctcgagacaactcttgtcactctctctctattgcctcacttcattgccttcttcagtgatgccgagatcccaggaagtcctgcagcacttgcaaccacatttctcacctttgtgttgaatctggccttttctttgagcgttcttggttttatgattatgcatatttcacttgtttctgctaatacaacaacaattgaggcatatgagaagaagacaactccacattggatatatgatcttggccggaagaggaattttgctcaggtttttggaaatgacagaaaatattggttcatccctgcatactcagaagaggatttgagaagaactccagctctacagggtctggattatcctgtgagaccagattttgatggtcaggaactgtaacacagcaatttttgccagtgtcctcgtcagatacctcagtgttggacatctactgatacaactgacagcattgctgattgcgctatgcaaggcatcaaatgaaatgttcacaagattttagtaaccatgagtaattcatctgttgcacgtcatgtatgtgacgaagtgaaatttctcctagctgggccagaggaagtttgttgggatgtaaattagttttatcgacaacgtggattggtttcattccatccaaactggtagtgtgcttcaaatagtgctgtactttagtttagttattattatgtgatataaatatcatttctgataattgtgcctctgttatacactatcaatagtaaatggataagcgctgtgtaattctttcg

SEQ ID NO: 22742 - DNA, 1454 bp, Zea mays
  Clone ID: LIB3591-099-A7_FLI
cttccccgctcccggcgccatggactgcgcaaaggggagggcggtggcggacctctacgacgaggtgatggtggagatcctctcgcgcgtgcccgtcaaagacctccgccgttgcacgtgcgtgtgcaaatcttggcgcaacctcatcaccgaccccctcaaccgcaagaagctgccccagaccctggaaggcttcttccacggcgtcgtcggagggcctcacagctacggccaattcaccagcctgtcggggagcggagaacgcgtggctccggtcgacccttccttctccttcatcacggcaatgctgcctggcgtggagcgcatggtcctcttggattcttgcaacgggctcctgctcttcgggtgcacccgggaggacaagttcgggtacatcgtgacaaaccctgcgaccgaggaattgatgactgtgcccgccagctccggctcttgtccccttccacctccatttgaaagggacatggttggtggggaaagatatgcgcacacctttctgatgtttaaccctgctgtctcctcgcacttccacttggtccagatctgggagaataaggcggcgaaggaggtggaaacggtgcactcttactcgtctgaaaccaaggcatggagtgacaggtcaagcaagtgggggcgaggtgaagagggcggtgaatgggagctgtggggtgaatccgtgattggattcatgtgtggctggacattggtcgatggtctgctgcattttcttgccttcgatcttcagaaagaagagactgtgataattgcagtggatggggaaggggaaactcgtaggatcatcggctggcatggtaaggatgtgagagcaattgtttttattggtgaatcccaagaccatctacactgcatcggtgtgaatgtgcaattagatcaaggctctgaagtgcgcttcacgcggatgtcgatctgggttcttgaggactatgatacacaagcatggatcttaaagcacaatgtgagctctttgcagttctttgaattactgagtcacccaatcaaagacttccatattgtggccattcatccatatcacaattcgttcatccttattcagcactggaaccagaaacttgtatcatataacatggatactcaggaactgcatggtctcggcactcttggaaagggctatgcggttattaccccttacataccctgtttcttggagtcatcggttcttgccaccaaacactgaggttgttgtttctcggggacttctctgcatgttcaacaagagcctgatcatccaagtgtggggcaaggtgatctagtatgatggtgctttaatgtccttttgtaatgctttgagaaagctgtttacagggcaacatggttagttccatgatatatcagtgagaaagctgtttacaggacagcatggttagttctatgatatatcaaattagatcacactt

SEQ ID NO: 22743 - DNA, 1711 bp, Zea mays
  Clone ID: LIB3591-099-A8_FLI
cccgagacacggcagcgccttcctcctcacaaccgctgcgccatcttcagtccatgcccacacgctccctctccactacatccactctgccagctctgctcctccttgctctctaacacgcacgcttgaagaccgtggaggccggtgacagagtcgtcgtctggaagacgggaagaggaaagtttgggggaagcacgcttggatgttgattggtttatgctttatccaaaatgccctaaagattttaatttttaatcaatcattgttgcttgcagagactgcgtctcacgatttgaagcgatttgtgttgttgaagctttgattaagcaagctgtttctgttcactttatacgaagggtcatgccttcggataatgaaggagaagatttaggaacacaattgtctcggctgttaggacttatgcaagatgtgtgcactatcaaaagtggatcacacttggactcgaaagatgcatatgttactgtcatgcatgtgaagtttgcaacaaagaaaggtgaacacccattgtgcaaaatcgatagctacatgaaatgtagtgaactaaagtgggttcagcttgaaggcgatcaacagaaacttctcttgttattcgacataaaacgaaggcaagcatattaacgcatttaatgccacactcagattgatgtcatgtccaagttcttcaagctgatgatggtaggtgttctgcttcacttctttctcattgttgaagttgtcccaggttgtattcactcttagaacccctctattatttatttttgaacaaagcttccttttttgttacgtcctaaaatgatatcaagcaagaccattatttctgtgggttgagtaaatctagattttttacttggcatgatgagacaatctggagaatgtataccaattatgttgtatgccttttatatttatctacattaccgagtgtagcatattatttgtttctatcttagtcaattattactcatgctatggtatatttttcttttgcttcttgaaaataatttaacctatgttattgagtcatgttataacatattattcttttgcttcttggaaataatgtaaccatagattgtgcttcaaaattattgtcgtcttgaccatcaccatatgcacaacaggaacaaggtctgctactcagcttgcatcaatgctacaacactagctcttgtatatgctaggattccaatgcgagacactgtcacatcttgtagtgttgtctatttgtgttctactcctttgctccacaggaacctacctaattttcataactttagcagtagtcttatggtaataaaagtcaaacaataataatgtattgtgctagatctgaattacctcgaagacagtgttgggggttccgatgtcactgttgacatcatatccaaatttgtatcattttgtatggtgtgatatatctagaagctctaagaatttttgtcttgtgcaggtcctgcaattaatgaatgatttgaaccaaagtgttcgaaatgttgttctcttgtattgaggcttactgtgtgcttgaggttcttcgacctctctatgaatcccctaagataccggcacaaaagataactgttgcgatatgtgtcattgatcaatttcgttgttactaggagtttaaggtaaaagacatatggcatatgatgacttgtggacatgttattaatggaatgtactgttatat

SEQ ID NO: 22744 - DNA, 2015 bp, Zea mays
  Clone ID: LIB3591-099-B3_FLI
ctgctccgctcctcctccttgccgccgtgcggttgagcgccgacgagcaagcccgacgccaccctatggctatggaggtccgccgcagggttccgccgccgcacgggagcgccccacggcgccagcaggcgaccggcggcgaggggcagcgggtgcgtgtgcaggcgggggacgcgctgccgctgccgatccggcacacgaacctcatcttctcggcgctgttcgccgcgtcgctggtgtacctgatgcggcggtggcgggagaagatccgcgcctccacgccgctccacgtggtctccctcgccgagatcttcgccatctgcggcctcgtggcgtcgctcatctacctcctcagcttcttcgggatcgccttcgtgcagtccgtcgtctccaacagcgacgacgaggaggacttcatcatcgactcccgccacggacaggcgcgggcgccgccgccgcccgcgccggcggccccgtgtgcgctgctggggagccccgccgccgcgccggagaaaatgccggaggaggacgaggagatcgtggccgccgtcgtggcagggaagatcccgtcctacgtgctggagactaggctgggagattgccgccgggccgccgggatcaggcgggaggcgctgcgcaggatcaccgggagggagatggacgggctcccgctcgatgggttcgactacgcgtccatcctcggccagtgctgcgagctgccggtggggttcgtgcagcttcccgtgggcgtcgccggcccgctccttctcgacggccgccggctctacgtaccaatggccaccaccgagggctgcctcgtcgccagcaccaaccgcggatgcaaggccattgccgagtccggtggggcctccagcgtcgtgctcaaggacgggatgacgcgagccccggccgtccggttcccatctgcacgccgcgccgccgagctcaaggccttcttggaggacccagcgaactttgacaccctggctatggtgtttaacaggtcgagcagatttggaaggctgcagggagtgaagtgtgcgattgcagggaggaacctttacatgaggttcagctgcagcacaggggatgccatgggaatgaacatggtctccaaaggtgtacagaacgtgttggactacctccaggctgacttccctgatatggatgtcatcagcatatcaggtaacttctgttctgacaagaagtcagctgctgtgaactggatcgatggccgtggaaagtcggtggtttgcgaggcggtaatcaaggaagaagttgtgaaaaaggttctcaagacaaacgtacaggctctcgtagaattgaacgtgatcaagaaccttgccggttcagctgttgctggagctcttgggggtttcaatgcccatgcaagtaacattgtggcagccatcttcattgctactggtcaggaccctgcacagaacgtggagagttcccagtgcatcaccatgttggaagctataaatgatggcaaagatctccacatctctgttactatgccatctatcgaggttggcacagttggtggaggcacgcagctggcctcacaatctgcctgcttggacctgcttggcgtcaaaggtgccaacagggaatctccggggtccaacgcgaggctcttggccacggtggttgcgggtgcggtcctagctggggagctgtccctcatctctgcgcaggccgctggccatctggtcaagagccacatgaaatacaacagatccagcaaggatatgtccaagacccttgcagaggaaacagacaaacccaagaaatgctgaataatatcaagtagttgttctatagccctttgggagaaaaggagcagaaagggtcgtacaggatgactttcttgcggcatgctcaggtggaaaggggggaaaaagaccttcaggcgaaaagagataattcagtcgccttgtcatatttaccaggcggtgagacctgttgtggatcctggagtatgacctatttaatttgttgatgttgttgtt

SEQ ID NO: 22745 - DNA, 948 bp, Zea mays
  Clone ID: LIB3591-099-B7_FLI
cagacagacaggcagaggcaggcaggcaaggccaagagcccaagacggtcggggcggagcgcgagaggcaggcgacgcgaggagaggaggcggtgctgtggtggcctcacctgccctgccatgattataaaaaataacggagcgcgacgcgggtagaaaccggaaggcccgccgctgcccgccccttcttccttcccgtcccacacacgccgccgccgccgccgccgccgctcgcttcctccaccccccggtccgcgcggcgcgggctgcctgcgcgaccagggaggcagggcacgcggcaaccacgtggggaggcgacgacaccacaccaccctatgctctctgtcctcgcccgcagggtaagattgcagcagcagtgaatttgggagcttgaagcgttcatccgagacatggaaaaagtgatctgccgggcatatctccttcaatgcaagcgattcttttcgaaagaaactcttgattggtgtgtcttagcccgtgggaacacccatctctcctctctggtgaactacacatagtggttatatgctcctctatgctccacaacaagcaggctgatgcgatattttcctgaagttattatattccagtctatgccagacatctacatgtagatgatgctcatataagggggggttaatatatttgccatcttcagcctacatctgttgctgccctaattagttgatttgtcttctgtgtactatctgaggcaagatattgatcagctagaacttggcaaacccttgcctttcgtgtctgttcatatttctcgtggcttggttattctgaagggtaaaacttgcacaaggcagctttgatattacaacaatggatagattcaagttgattaaggaagttggcgatgggacttttgggagtgtatggcgtgctatgaataaacagaatggcgaagttgttgctgttaag

SEQ ID NO: 22746 - DNA, 778 bp, Zea mays
  Clone ID: LIB3591-099-C1_FLI
cccacttcgactgctcccgcacctttcgttcacgcaagcgcaacctgcttctcccgctggctgtctcggacaccccctccctcctgccacgcatcctccccgcccacgagtctcccccgcaaggccgcaaccggataataaggaagaggaagagaaaccgtgcggtgcggcgaaaggaacagtgaaaaaggaagaatctctgatcgaggttcctgtccggcttgcagaatcttggcggccagccagccatatatggatgtactgctaggttccgggaggttcttggcgcgacggcctcccctcgcgctcgtccctcgctgctctcgaggctccccggacaaaagcggcagcgacaaaggtgaaacctcagctgactgggacaaggcatggtctgccttcaagaagaaagggaagaggaccctgttttctgatttctcaccggacaagtacgtgatctggaacccacggcgcagcgagtatccattgtcagaagaggtcgatccaatcaagagaagtgaaagatctaacttgatgctgtggacaagcccccagttcaccttggtcggggcgattatcatcgtcttgacattgctaatctatacactagttgttcctcctcccaagtaactgcagaggtgacaactactaggggggtgagctgtaaactagtagtatttcaactggggagtctgtattgtacatttttacgtgtactatggcaactatagcagtattaattcaattgcgatcatgtagatacaacaccactgtccattcc

SEQ ID NO: 22747 - DNA, 1511 bp, Zea mays
  Clone ID: LIB3591-100-A11_FLI
gctgctcctctccgcaccgaccaccacagaggcctacgattcgctggatccaaacggcaacatcactataaaatgggatatcatgcagtggactcctgacggatatgtcgctgttgtcacaatgttcaattatcaacaatttcggcacatcggggcacctggatggcagcttgggtggacatgggcaaaaaaggaggttatatggtcaatggttggggctcagaccactgaacagggtgactgctcaaagttcaagggcaacaccccccattgctgcaagaaagatccaacaattgttgatttacttccaggcactccatacaacatgcaaattgccaattgctgcaaggcaggagttataaatacctttaaccaggacccagcaaatgctgcttcctccttccagatcagtgttggtcttgctggaactaccaataaaactgttaaggtgccgaagaatttcactcttaagactccaggccctgggtacacatgtgggcgtgctattgttggcaggccaacgaagtttttctctgcagatgggcgcagggtaacccaagctctaatgacatggaatgtgacctgcacatattcccaatttcttgctcagaagactccatcctgctgtgtatctctctcatcattttataatgacacaattgtgaactgcccgacatgctcatgtggctgccagaacccaagtgggtcaaactgtgtgaacgaggattcacctaatctacaagccgcaattgatggtcctggtaaatggactggccagcctcttgtacaatgcacttctcacatgtgcccaataagaatccactggcatgtgaagctcaactacaaggaatactggagagtgaaaatcactatcacgaacttcaacttccgcatgaattacacacagtggaacttagttgctcagcatccaaactttgataatatcactcagttgttcagcttcaactacaaaccacttactccatatgggggtggcataaatgatacggcaatgttctggggtgtaaagttctacaatgatttgctgatgcaagccggcaaacttgggaatgtgcaatcagaactgcttctccgcaaggactcacggactttcacattcgaaaagggatgggccttcccacgccgagtgtacttcaatggtgataattgtgtcatgccatctcctgaaaattatccatggctgccgaatgcaagccctctaacaaaacaagcattgacactcccactcttgatattctgggttgccttggctgttctgttggcttatgcatgatgagtgggatcaagatgtttagcaagcttcaagttgatgtcggattccatgaggtgcactgcaacgggatatttattcattcaattccatagcggcacaggagagatgaggcgaagccaagaaaaagtggatgtgtgtgtgtgtgtgtttgtaagttaaagggccaaaaatgtatttcttgtctggtagtatatagcagctctacaacactttggtg

SEQ ID NO: 22748 - DNA, 1717 bp, Zea mays
  Clone ID: LIB3591-100-E11_FLI
cgctgcaccgcgactccagtcatggctagtgttaccgattctttcgtggcggatcttgatgagctattggagtataggacagagaagactatcctggagatgaaaacgcagagacagaaaacttggaagatgatgctaatgatagtgtccctgacctgaaatctcttgatcttgatagtgtctaaaaacatcagaaggcacaatggtataaagacataatgaagatgcacttgaaaggtgactccaatcaaggggccattctgcaagatcaagataccagcttgttgttgattgcaatgcttcatcagtagatattgacaatgagattactataatccacaatttcatacgtgacaagttcaagctaaaggaccctctactagaatcctgtgttcactatccgattgattatgcccgtgttgtctggaagattggaaatgacatggacttaacacttgatttgaaagttatttaccttctgcagacatgatcacaatggcagaaacgacaactggtggggagcctctttctgaagataatttagtaaatactattgaagcatccgacagagctcttaaccttgatgccgacaaagaagatgatacttgaatttttgaagggcagaatgggatacgttgcacgaaaccttgccgccattgttggcagtgctgttgcctcgaaaccgagtcgtgctgccgtgttggtggtttgggagcactggccaaaatgcccgcttgtaatgtgctgcactgctgcttctcggtgcaaaaaagacaaatctgtctggattctctactgcgtcagtgcagtctcgtattggttatctagaacaaactgaagtattatttgaaagcacacctccatctttaagatttcagtctagtagacttatagctgcaaagtcaacactagcaacaaggatcgattgtataaggctatcttcagcagtttactcattctcatctcttattttaacctacactctataaacagtgcattttacagtacaaaacagtgttttacatgttcatatgcacgatctgctggctatagcctaagagatgatccaactagaacggttgtgcagaacttgttagaagaaattagtaagaagattgaaaactggcaacaactaccacctgcaaggcttccaaagccaattccaattccagactttatgcctaaaaagaaacgaggggttgttggctccggaaaatgaaggaaagataatttatttgaaactttctcatgtccaaattgattaaaactattgtacttcatgtaaaagattgctatataatgcccattcacatgtctcatttgcattttgcaatttgttatattactcgagttccctggttgcattacctgtttggctgtttgtcttagttgcattttgcaacttactttgttatatcactctgagtgacccttcaatttcctcttacctttttgtatttgggaactcaattgtgaagatatgcacagaccaacacgatgaagcttgtgaatcggatgaagtttagcatgccagaggagagcacattgggtgatggcttagggaaaggttacggcttgcttgggcaggctggaagcgggaagctacgtgtgtcagctggtcaaagcaaactttctactaaaattgctaaaatgtaagcgatttatacgtgagtgacggtgttgaaatatataagtgaattgagtattttcttccgtc

SEQ ID NO: 22749 - DNA, 1260 bp, Zea mays
  Clone ID: LIB3591-100-E5_FLI
caagtccgcttcctgtgctggtccgccgtcgctctctgttcgccgtccgccgtgccgtacatccgccccgctccacgcagcttgggaataacggatcgccgctcgctatccctcgacctcggtagaaagttccaaacgaccacgacgtcctcttggtctcccgctgtcatcagtccgcaattccgcatttctattgtcctttttccgtcgcatccgtttcgtctctttgctcgcatctggcctcaagcccctcaggcctcagctcaccaccacgaaccaaccgacagaaagagggacgaatggcgagctctcagtgctgcgataacccgccggccctgaacccggcctgcggggagggcaaggtcgtcgacagcttcggcgggctcaaggcctacgtcgccggccccgaggactccaaggccgccgtcgtcctcgtcgccgacgtcttcggattcgaagcgccgattatgaggaagatagccgacaaggttgcttcgtcagggtactttgttgtggtaccagatttgtttcatggggatccttatgcacctgagaatgttgagaagccctttcctgtgtggataaagtcacatactccggaaaaagggtttgaagagacaaaacaagttattggggctctaaaggagaagggagtgtctgctgttggagctgcagggtattgctggggtgcaaaggttgttgtggagttggcaaaagctcatgagatccaggctgctgtgctgttgcacccttcttttgttaccgttgacgatatcaaagaggtcaagtgcgcaatttctatcctcggagctgagattgacaaaatgtccccaccggagctaatcaagcagttcgagcaggtcctttctttgaactcaggggttggccacttcgtcaagatcttccctggtgtggcgcatggatggagcgtgagatacaaccacgacgacgcagctgccgtgaagagtgctgaggaagcctttgcggacatgctcgactggttcaacaagaatctgaaataaactctgcaattgcatcctgccttgtaataatgcgtgttccagtgccctgggatcgaatctgctgtgtttgggcttttgcatggtcaggctattcagagttgtcatggacttagggttgtgttagtagattggttgcgctgaatctataataaaaacgaggtaaactaggacaatgatgatgtggccgtgtgtatttaatgtattctgttcacaattatgtttcgtgctcttttttttt

SEQ ID NO: 22750 - DNA, 1627 bp, Zea mays
  Clone ID: LIB3591-100-E6_FLI
ctccgctgggccaccagctttgaccgccgcctcccttcccctccgctactgctcctccccaccccactcccccgcaggagcggcggcggcggcggcgaggtcgtaccccacatcggcgagcggcggcggcaccgccggaggcaaaggcaagatgttcgggcgcgcgccgaagaagagcgacaacaccaagtactacgagatcctcggggtgcccaagtcggcgtcccaggacgatctcaagaaggcctaccgcaaggctgctatcaagaaccaccccgacaagggcggtgaccccgagaagttcaaggagctcgcacaagcctatgaggttttgagtgatccagagaaacgtgagatttatgatcagtatggtgaagatgcccttaaggaaggaatgggcggtggaggatcccatgttgatccatttgacatcttctcatcattttttggaccctcttttggaggaggtggtggaagcagcaggggaagaaggcaaaggaggggagaagatgtagttcacccacttaaagtttctctggaagatctttacaatggcacctcaaagaagctctctctttcgcgcaatgtcatctgctccaagtgcaagggcaagggctcgaagtctggtgcctcaatgaggtgccctggttgccagggctcaggcatgaaagtcactattcgtcagctgggcccttccatgatacagcagatgcagcagccttgcaatgagtgcaaggggactggagagagcatcaatgagaaggaccgctgtccagggtgcaagggtgagaaggtcattcaagagaagaaggttcttgaggttcatgttgagaaggggatgcaacacaaccagaagatcaccttccctggtgaagctgatgaagcgcctgatactgtcactggagacattgtattcgtcctccagcagaaggatcactccaaattcaaaagaaagggtgaagatctcttctatgagcacaccttgtctctgaccgaagcactatgtgggttccaatttgttcttacacatctggacaacaggcagcttctcatcaaatcagaccctggtgaagttgttaaacctgaccaattcaaggcgattaatgatgaggggatgccaatttaccagaggcctttcatgaaggggaagctgtacatccatttcacggtggagttccctgactcgttggcaccagagcagtgcaaggctctcgagacagtacttccaccaaggccttcatccaagctgacagacatggagatagatgaatgcgaggagacgactatgcatgatgtgaacaacatcgaggaagagatgcgcaggaagcaagctcacgctgcccaggaggcgtacgaggaggacgacgagatgccgggcggagcccagagagtgcagtgcgcgcaacagtaagcagactatcatcaaggcaattgggaggggtggtgcccttaaagcatgggagtgatctctggttttgctgtcgccgagctgggaaataggaagctgaatcgacctcgcaagcggggaatgtatccttttttgctgcaacataaaaaatgctacccaggcatagctgggtaccttttaacttctgtttgtgggatttgctagagtgatggtttcgat

SEQ ID NO: 22751 - DNA, 837 bp, Zea mays
  Clone ID: LIB3591-100-E8_FLI
cccaactacccccagcctcggaaggaaccttccagaagcgcaagactctaaaggccgtcgccttcccattcttcctcgccgcgggggtcgcctgagatcacataaacaatggtgaaggctgttgctgtgcttggtagcagcgatggtgtcaagggcaccatctttttcacccaagagggagatggccctaccgctgtcaccggaagtgtctctggcctcaagcctggcctccatgggttccatgtacatgcacttggtgacaccaccaatggatgcatgtcaactggaccacactacaatcctgcgagcaaggagcatggggcaccagaagatgagaaccgccatgctggtgatcttggaaacgtgacagctggagcagatggtgttgctaatatcaatgtcaccgacagccagatcccactgactgggccaaactcaatcattggcagagctgttgttgttcacgctgatcctgatgatcttggaaagggtgggcacgagctcagcaagagcactggaaacgccggtggccgtgttgcttgtgggatcattggactccagggctgaaaacgatcgccggacttgggggtgcctgagaggtccgtctcctgccgtccccagcagacgagcctgaacattcggagacatcgtgaaataagagcgtcgctgatctgtgatcatcgtatttgtcattatgcacctgtagcaaccgatggactgaactgtgctggattatgctgttggatcacctgagtatgtgttacatgtcggttttgatgtgacatcctatcgtttcgatgtgttttgtggaagtgttgttgcaagatttcaacagtc

SEQ ID NO: 22752 - DNA, 1000 bp, Zea mays
  Clone ID: LIB3591-100-F12_FLI
ctccactcctccagcagcgaggcccatccgcccatgccgaacctcccggaagcgcaaatggcactccagcaccagcgaacgagtctgggtctatgtcgaactttctagaagcgcggcgccaaataaataccccactacctcaatcctcgctgcccctctcgattcggaaaacctccaaggctccaaccctagccgcgatccgacaacgcctccatccctagccgactgctgcaagcttcagagctcaagagtcagggcgccatggcgacagagacggagaccttcgcctttcaggctgagatcaaccagctgctctcactcatcatcaacaccttctattccaacaaggagatcttcctccgggagctcatttccaactcttccgatgcgttggacaaaatcaggttcgagagcctcactgacaagagcaagctcgatgcgcagccggagctgttcatccacattgtaccagacaaggcttcgaacacgctctccatcatcgacagcggcatcggcatgaccaagtccgaccttgtcaacaacctcggtaccatcgccaggtccgggaccaaggagttcatggaagcccttgctgctggcgctgatgtgtctatgattgggcagttcggtgtcggtttctactctgcctacctcgtcgccgagagggtcgtcgtgaccaccaagcataacgatgacgagcagtacgtgtgggaatcccaggcgggcgggtcgttcactgttactcgtgacacgtctggggagcagcttggcaggggtactaagattacacttttcctcaaggaagatcagttagaataccttgaggagcgtcgcctcaaggatttggtcaagaagcactctgagttcatcagctaccccatctccctgtggaccgaaaagacaacggagaaggagatttctgatgatgaagatgaggaagagaagaaagacgctgaggagggaaaggttgaggatgttgacgaggagaaggaagagaaag

SEQ ID NO: 22753 - DNA, 1532 bp, Zea mays
  Clone ID: LIB3591-101-G3_FLI
cttggcttgtactgcatcgcaaaccgcaatcgcacgcggcacttgccccccgcgatcataacctcaccgcccgccaccagctgcagccacaagcgcagcgctcgacagcctcaccagccgccatcactcgcggcagtacccggccgctgggactgcaagagtggggagtgagacgctgctgctgttgccgagcgcgaggagacactactactcactcaagagtcaagactcaacagcagcaggggcgaccgagctctgcgtgcgtggggagaaccggagaaggcagcagaggagggagggagggagcgcgtggaccaggctaggcgcagcagcatgggcgccgggatcagggtcctggcggcgctcttggcggcgctcgcggcagccaccgccggcgtgacggcgcagctgcggcaggactactacgcggcggtgtgcccggacctggagagcatcgtgcgcgccgcggtgtccaagaaggtgcaggcgcagcccgtcgccgtgggcgccaccatccgcctcttcttccacgactgcttcgtcgagggctgcgacgcgtcggtgatcctggtgtccacggggaacaacacggcggagaaggaccacccgagcaacctctccctggccggcgacggcttcgacaccgtcatccaggccaaggcggccgtggacgccgtgccggcgtgcgccaaccaggtgtcgtgcgccgacatcctggcgctggccacccgggacgtcattgagctggctggcgggccgtcgtacgcggtggagctggggaggctggacgggctggtgtccatgtccaccaacgtcgacggcaagctgccgccgccgtccttcaacctggaccagctgacgagcattttcgccctcaacaacctgtcgcaggccgacatgattgctttatctgcggcgcacacggtggggttcgcgcactgcagcacgttctcggaccggatccagccgcagtcggtggacccgacgatgaacgcgacgtacgcggaggacctgcaggcggcgtgcccggcgggggtggaccccaacatcgcgctgcagctggaccccgtgacgccgcaggccttcgacaaccagtacttcgccaacctggtggacggccgggggctcttcgcctccgaccaggtgctcttctccgacgcgcggtcgcagcccaccgtggtggcgtgggcgcagaacgccaccgccttcgagcaggccttcgtcgacgccatcaccaggctcggccgcgtcggcgtcaagaccgacccgtcgctgggggacgtccgccgcgactgcgccttcctcaactgaaaaaggatgataagcgctagctagtaggtgtaagcatcggctggcactcacctggaggaagaggccggcttttggtcagtggtgacatctgatggatgtccaatcacgcaggatgccaaaaggcccacgcctacgcatatgaacggtgaaatatagcgaactctaaatagcaaacactgctggagggctcttggacgctaagaaacgctacatcttctcgc

SEQ ID NO: 22754 - DNA, 1157 bp, Zea mays
  Clone ID: LIB3591-102-C4_FLI
cgtgagatcctccccgacgagatggcggggaagggagccaaggccacggccgccaagtcggcggacaaggacaaggggaagaaggccggcggccccgtctcgcgctcctcccgcgccgcacctcaggagaattcaactccgaagaaagatgtttatcaattgttcgctgagaaggttagggataacaaacagctggaatcaagatgggcaatcatgcaagaaacccgtgtggagtattttcgtggaaaagatttcaatgccttcatcaagaattatccagaagtcagggaaattttggggccagataaggatttagaagtggaagacattgttaacactttgttgaccaagaaccttgtgataaggtgtgaccgagttatgaaaactgtgaggcctggcaagaaaaagttatcatcatggcctgctcacttggagatacataattaagagctgccatctttggcatcttatgggttctccttgggaaacgcgtgtggttcttccccaatataaatgcagaggagacaacatttagagaactggttcgtttttggcctgaaaaagatgaaggagagcggccaaagtggacatcaagacttttctatgctcttgttgctctattggtgatattactgcttaggcaccatgctcctgacgaagcagctagagccaggtaccaaaagaaggtttctaacataattgatgatgttcttgaatggtccccaaagttagctatttctggaatgattgaaaaacacactggggctaacattacagaagaaagcaattacactagcagggctgcgagtagtcatgtgcctccttccaccaaagccaaagcttcagaagccggttcagatacagatattgaggctaacttagatgaagcccaagatagtgaatatgctgatgatacaagatcaaacgaagcttaaaatcagctttatcttgtagttttttgagcaatctttgttattgttaatctgcaggatcatgtagatagcttactgctgacaacaaaaatttagggtgtcatgttttgatgttacaaccatatattgcctgcaatggttgtattctaaggttcccaaacaacattctcatagagcgcgacaaatcttcaccttttctctacacgagcatgaatctttttaatt

SEQ ID NO: 22755 - DNA, 1253 bp, Zea mays
  Clone ID: LIB3591-102-D7_FLI
gctagattttgttgcttcctttcgcatctgatctttttatctcttctgagtgctccgcaaagccttccagtgttgaagaagctgctggaagaacgaagagatgagctttctcttgaaggaaaaagagatgatcattgctgctggtatcgccagcatgggtaggggaaggattgagatcaagaggatcgagaacaacacgagccggcaggtcaccttctgcaagcgccgcaatgggctcctcaagaaggcgtatgagctctccgtcctctgcgacgctgaggtggccctcatcgtcttctctagccgtggtcgcctctacgagtatgccaacaacagtgtcaaggctactattgagaggtacaagaaggcacacaccgttggctcttcctctgggccaccgctcctagagcacaatgcccagcaattctaccagcaagaatcagcaaaactgcgcaaccagatccagatgctgcaaaacactaacaggcacttggttggtgattccgtgggaaacctgtcactcaaggagctgaagcagctggagagccgccttgagaaaggcatctctaagatcagggccaggaagagtgagctgctggctgcggagatcagttacatggccaaaagggagactgagcttcagaatgaccacatgaccctcaggaccaagattgaggagggagagcaacagctgcagcaggtgaccgtggcacggtcagttgcagcagcagcagcagctaccaccaacttggagctgaacccattcttagagatggataccaaatgcttcttcactggcggccccttcgcaacgctggacatgaagtgctttctccccggcagcttgcagcagatgctggaggcacagcagcgccagatgctcgccaccgagctgaacctcggctaccaactggcgccgcctggttctgacgctgccgacaataaccctcatcatcagttctaaactggatgcatgcacgagaagcttttcaagcgaactgtgaacgatggaagctggctgttgcctctagatgttcttggcttccatgacctagcttattatggtgtgtattgttgttgccttttgtgtgtgattctccttgctactctactgatggagaactaaacctaatcgattggacataatgatcaaatgctacagatcctgtgatgctgtgatcaggttaaggcaaaacatgtatactgattgcttaaatgggtttacgagtgacgacaatgctatttgttgcttc

SEQ ID NO: 22756 - DNA, 1143 bp, Zea mays
  Clone ID: LIB3591-102-F5_FLI
ctcgctggccgcctgtgtatagtccagtacttccagctagaatctgaaagaaactcgtcaccagctcgatctcgtccttcctcccttcgctcgactcctctgcttctcccccatccggtacgtgcggtgcggggaggctagccgggcggccggagctccaaccgcaatcggtctcttgctctgctgctgcgatggaggcgtcgtcgttggcgctcgtggccgccgtgctcctcctgtcctccacgcttgccgcgtcagatttctgcgtgtgcagttcggaccagccgacggcggtgctgcagaaggcgatcgacttcgcgtgcggtccgcaggggggcgccgactgcacggccatcctgcagggcggcgggtgctacagccccaacaccgtcgccgcgcactgctcctgggccgccaacagctactaccagaacaacaaggccaggggcgccacctgcgatttcggcggcgccgccgccgtctccaccacagaccccagtttctccgggtgcactttcgcttccagtgccaccagcgctggcgctgggaccgggacggcgggtaccaccaccggcaccacgaccgcgggcggtgcgacgacgggcaccctgagccctggcgtgggcatcggcggcctcaacggcacggggatgggcggcagcaccggcctgggaccggcggacaacaccctggacgccgccgcgcccggcctgctccccggcgccgcatccctcgccgccgccgccgccgccctctccttgctcgccctgctgcagcattgattacgtgggctagctgcttgctctgtggtccgtgaaaaagaaagggggcacgggggattgtactggagaatgtgaattggttcggttggttggaggacggatccgatttcacttcacccatctttgttagtagtggcaggcggtggttgggggcggtgtattctttctttcttttccttatgcctttttgatgtatggtttatttagcggtaggatgccagtctctttcctacaaggaccattgtctctcctctctctctctttctttttaaattttgtttatttataaaagttgtacttgctatcctcttttcttaacctctctgtttttattagaccagtttcaataaaaattcttaag

SEQ ID NO: 22757 - DNA, 1213 bp, Zea mays
  Clone ID: LIB3591-102-G10_FLI
ctggcttcctcatgcagaaggaacttgactaccttgttggagctgttgccaacccaaagaagccatttgccgccattgttggtggatccaaggtctcaactaagattggtgtcattgagtcgttgctggcgaaggtcgatatcctcatccttggtggtggtatgatctacacattttacaaggcacagggatattctgttggaaaatctctcgtggaagaggataaactcgagctcgcaacttctcttattgagaaggcgaaggcaaagggggtttctcttttgcttcccactgatattgtagtagcggacaagtttgcagccgatgctgagagcaagattgtccctgccactgctatccctgatgactggatgggtcttgatgttggccctgatgccaccaaaacattcgacgaagcattggacaccaccaagactgttatttggaacggccccatgggagtgtttgagttccagaagtttgcagctggcaccgaggcgattgccaagaagctagctgagcttacaaccacgaagggtgtcactaccatcatcggcggtggcgactctgtcgctgctgtcgagaaggctgggctggccgacaagatgagccacatttcgaccggcggcggtgcgagcttggaactcttggaaggcaagactctacctggtgtccttgccctcgatgacgcctagatccgctgctgctgctgctactcaggttctgccagctttgcgtgtcatcttgtttcggaccttggtgtagcactgcaaggctaaggtttactcctccacacatggactttcgaggataggcttgccaccgtgttttgctagatgagtcgtgaaataagcttttacttcctcgctgctgtgggtgaagtgactggaattcggaaatttggaactaacaaaaccccccgtggatttgtatgatacgttttgttcgacagtttgcgtcccatctttcactgtggtatctggtatggtatgttcttattttttgtctgacagagtgacagtttgcattcctgtgttgccgttgctattcgttcctgctacctgtggcgccagatgaattgggaacaaggttttctagtttagttggttaaattatcttctttcagtgttgttctggagtggtggtagctaatggcggcccttgcaaataaaaacttgctacccgagtttggcgctggcgcagcaatttattc

SEQ ID NO: 22758 - DNA, 1547 bp, Zea mays
  Clone ID: LIB3591-102-G3_FLI
ttttaagcttcacctccagccatgggtaaggagaagtcccacatcaacattgtggttattggccatgtcgactctggcaagtcaaccaccaccggccacctgatctacaagcttggaggcattgacaagcgtgtgattgagaggttcgagaaggaagccgctgaaatgaacaaacggtccttcaagtacgcttgggtgcttgacaagctcaaggctgagcgtgagagaggtatcaccattgatatcgctctgtggaagtttgagaccaccaagtactactgcactgtcattgatgcccctggacatcgcgacttcatcaagaacatgatcacgggtacctcccaggctgactgtgctgtcctgatcattgactccaccactggtggttttgaggccggtatctctaaggatggccagacccgtgagcatgctctccttgctttcacccttggggtcaagcagatgatttgctgctgcaacaagatggatgcgaccactcccaagtattccaaggcccgttacgatgagattgtgaaggaagtttcatcctacctcaagaaggttggatacaaccctgacaagattgcctttgtccctatctctggttttgagggtgacaacatgattgagaggtccaccaaccttgactggtacaagggtccaaccctgcttgaggctcttgaccagatcaccgagcccaagaggccttcagacaagcccctgcgtctgcccctccaggatgtgtacaagattggtggtattggaactgttccggttggtcgtgtggagactggtgtcatcaagcctggaatggttgtcaccttcggtccaactggcctgaccactgaggtgaagtctgttgagatgcaccacgaggctctccaggaggcccttcctggtgacaacgttggcttcaatgtgaagaacgttgctgtgaaggatctcaaacgtgggtacgtggcctccaactctaaggatgaccctgccaaggaggctgctagcttcacctcccaagtcatcatcatgaaccaccctgggcagattggcaatggctatgccccagtgctggactgccacacctcccacattgctgtcaagtttgctgagctcataaccaagatcgataggcggtctggcaaggagcttgagaaggagcccaagttcctgaagaatggtgatgccggtatggtgaagatgattcccactaagcccatggtggttgagaccttctctcagtatcctcctctgggtcgttttgctgtccgtgacatgaggcagacggttgctgttggagtcatcaagagcgtggagaagaaggacccaactggtgccaaggtgaccaaggctgcaataaagaagaaatgatgcgtcctcccatgtgccctcgtttattttgtacttgtgcccgtatacttcgatctgttaaaatctattggttgtgtgccctgtgtctgttgtttgggtatctatactgttattttgagacatgttgacttgcatggtcatctggattgggttcgcatttctgagtcatttgtcttgacatg

SEQ ID NO: 22759 - DNA, 1087 bp, Zea mays
  Clone ID: LIB3591-102-G5_FLI
ctgcttgctctggggggaaggagagagagagagcgagagagagatctagtagagaggctagctaggtggtcctcgaacgaagatgttggcggtgttcagcgggcaggtggtggaggtgccggcggagctggtggcggcgggcagccggacgccgtcgcccaagacgaaggcgtcgcagctggtggggcgcttcctggccgcctccgagccggccgtgtccgtgcagctcggcgaccacggccacctcgcctactcccacaccaaccaggcgctcctccgccccaggtcgttcgcggccaaggacgaggtgttctgcctgttcgagggggtgctggacaacctgggtcgtctgagccagcagcacgggctgtcaagcaagggcgccaacgaggtgctcctcgtcatcgaggcctacaagacgctgcgcgaccgcgcgccctacccggccagcttcatgctcgcccagctcaccggctcctacgccttcgtcctcttcgacaagtccaccaactccctgctagtcgcatccgaccccgagggcagggtgccgctcttctgggggatcaccgccgacggctgcgtcgccttctccgacgacatcgacatgctcaaaggctcatgcggcaagtcgctcgcgccgttcccgcaaggctgcttctactccaacgccctcggagggctcaagtgctacgagaaccccaagcacaaggtcaccgctgtccccgccgacgaagaagagatctgcggtgccactttcaaggtggtggaaggctctactgtcctgacggcgctgcactgatcggtcatcagctggcggaggcgatgcgatgatgatgcagaactttgtacatgcgttggtggatggtggtgtaacatagtggctgccaacaagtcatgctcatgcaaaccgatgaatctatctctgtatcatcgatctcggttgcttgctagtccagactccagacatggctatatatatatagctggtgctaataaataggagtataatcgtcatatcgatcggttgcgtgtggaatgccaatcatgtgtgtaatctgttggcaaataacaaacctctgttcctccc

SEQ ID NO: 22760 - DNA, 776 bp, Zea mays
  Clone ID: LIB3591-102-H3_FLI
gtccttgacgtccgtggccactcaggttgtgttctctgagttctttcgccggggccggggcggaagcggagtgcgcggtcgaggaaggcctaggccttagcggtcggatcgatcggcgccgtgcttgactgcctgtacatgaggagcggctgcggcggcggcggagggagacaacctggggaaggaggcgggggaggcgctggggctgctgggctgcgtcaatgaggtggtggcggcggtggcagccacgtgggggcccatgaccgacggcgcgcgcgtcgagacggcgcccaggctcgcccaatggcgcgtcgacccgctcccctgctacacctaccgcaagtcactccccttcctcatcggcctctggaactggtgcatatctgtggagagaaataacaagcaaacctgtgttaagctctttgcagagaatacaagttctctcaagaacggttcctcagccccaatagcttcctttatcgccaaacttattgtatctcttccccctaatcagcagaccatagtccccccaggaatttttgacaaacagctgaaatacgacggttttgtgtggacaatcgatagcaccgtcactgggaggtttgtgattgagatagagtttcttgacctgaaggtcgctgatccgtctgtaagcactgtctctctgtcttgttgtgttttttttgtcaatggttggtacaacaacaattagtgagtagtagggtacgtggattactgcccttgatgactcacctggaaataatatgcatgtacag

SEQ ID NO: 22761 - DNA, 409 bp, Zea mays
  Clone ID: LIB3591-106-B6_FLI
aaggctgttgaaggcaaatcgaaggatgaggcgatgaatgactacatcaccaaggtgaagcagctccaggaggaggctgccgcctcttaaaagtctcttaatagtgttgccaaacagctatttgtcagatgagctttgtgccatttcctcattagaagtatatcattcgatccattggggatctgtgaaccatgtacctgtttatgtaactttttttttttcgaaagagcgcaggaggactgcgcacccatatattaaagtagagggaaaataaagggccataatgatgatatccatctatctatctatgtaactggtttatgtaccatgtacctgtttatgtaactggttaccagtgttatccatctatctatctatctgtgaagacttgagtcttctaaattatgat

SEQ ID NO: 22762 - DNA, 374 bp, Zea mays
  Clone ID: LIB3591-106-H3_FLI
ccaccgatcgggcaagatcgtggtcgaactcaacgggaggctgaacaagtgcggcgtcatcagccctcgctttgatatcggcgtgaaagacattgagggatggactgcaaggctgctcccgtccaggcagttcggatacatcgtcctcacaacttcggcaggcatcatggaccacgaggaggcccgccggaagagcgtaggaggcaaggttctaggtttcttctattgaagaagctgagaatctttgttatggcctgcctgcctgtcttactctctcagactagagtacctgttattttactttaatatgtctctctcagactagagcgccttcttttacttgaatattggtgactgcattggtctttcacttt

SEQ ID NO: 22763 - DNA, 737 bp, Zea mays
  Clone ID: LIB3591-107-F1_FLI
gcttccgaaaatggccaccgacgagctcgcccacgccgtcgcccccgccccggccgggggagaccactccccggccttctcgttcagcatctggccgccgacgcagcgcacgcgggacgcggtggtgcggcgcctcgtggagacgctcgcgggagacaccatcctctgcaagcgctacggtgcggtgccggccgccgacgccgagcccgcggcgcgcgccatcgaggccgaggccttcgacgccgcggcctccacgggaggcgccgccgccgcctccgtggaggaggggatcgaggcgctgcagttctactccaaggaggtgagccgccgcctcctcgacttcgtcaagtcccgctccgcggacgccaaggccggtgacacgccgtcggaggaggcccgggctcctggcgcgcccgaggccgaggccgcccagcccgcggcgtgagcgccggacagccattcgttccgtttttgtatttcctgcagcctgtgtgtggcttgggtctgagtttgtatgacttgaacgttagctgtttgcacatctatgcaattcttgttcttccatgaatagccccgttctagtgcgtgttcctgtttttctgggaatccctgcccgatcctgaggttgtcaaaccatcgcagcattgacctctgtctgtgtgcagcttcgagtgatggtcgaattgttccggagaccgaattgacaagcaattaagattcctcccatctttcaagcc

SEQ ID NO: 22764 - DNA, 839 bp, Zea mays
  Clone ID: LIB3591-107-G1_FLI
ctgtaccatgtcgtgtcggggctcttcgcagccccgcccccgccgccgccgcgcccgcgggaggagcccgaggcggagccgctcccgccccccgtgcagatgggggaggtctcagaggaggagctcagccagtacgacggctccgaccctaagaagccgctcctcatggccatcaagggccagatctacgacgtcacccagagcagaatgttctatggacctggtggaccatacgccctattcgccggcaaagacgccagcagagccctagcgaagatgtccttcgagccacaggatctgaccggcgacatcactggcctaggcccgtttgagctcgatgccctgcaggactgggaatacaagttcatgagcaagtacgtgaaggtgggtactgtcacgaagaacgtcaccgttgaagaccgcagcagcgccgcaagcacagcccctggaaccagtgaggccgccaccgaggccgagaaggcgccgactacgacgacgaccgaagagaagccgagggaagtgccagcggaggctgtgaaggagaaggaagccgccgctgccgccgccgcggctggtgaaggtgcccaggaaaactagagcatttttcagtatgcagcaataattcgacatggtcccattcggttcgtgtcggggccctctcgtatatcgtatcagcagcgtggcctgtgtaattggatatacgtcatctgtacgagcgccatggcccttgaggagctggtgctttgtgttgttattagtcgtccgttgcagattttaaagacatcgggttcaggttgggcgcccctggccctgtttggtcggaaaacaggcgctctttc

SEQ ID NO: 22765 - DNA, 1592 bp, Zea mays
  Clone ID: LIB3591-108-A11_FLI
gccagtcgcgtcgaccccgagtcccgaccggtgcgcgcgcaggcgcacagccaggacacgaccgagcacggagcaacgtcgccctcccccagtagcgcagcccggccacgccctcatcgcccatcctgccgggccgcgtcgccgactcgccgccaattaccattcgcctctgcagacccgacacggcgcgcggctcctcgccgatttgttcccggcggctcatcagaaaggctgtctccttggggggatcgattactcgcgtggctcgcagttcgcacgatactcgggggttctgacttggttctaaacagcatctgcatcttctcgaccccccaggctttggatctggccttcgtctcagttcagcgagccgcgaagaacagccttgatttggtgccccaagtgatgtagtgtgagaggctaacttcttgagagcgcgatgagcagccagggattcggtgcggggagccccaagtccttccgctaccccagaggcggcgacttcgatctcgagtccgggtccccacgcaagggccgcaagcccaagaaccctcacctcgagacctcgatcgtcatgaggatccgctacttctacgaggcgcaccccgtggccgtcgccctcatcctcctctccttcgggctcagcgtgctcatcctcctctccgtgtacgagacccggttcaggacgatgaggagcgtcagtgcgtggtccagtgacggtggggattatccattgccaatgctccggaaccttgtcatggtggctgggcattcgatctatacgagctcaagatgcggggagaccgagagtgagaattcctggttcttggagccgtaccagaagcacgctggacaggcggccaccttcctggctcacatcaaggagggggtggggatcgcggcgagggatgagggggcactcctgttgttcagcggcggggagacgaggagagatgctggcccgaggagtgaggcacagagctactgggctattgccgagtcgaaaggatggttcggaaatgatgagggtgtaagaagccgagcactcaccgaggagcatgcacgagatagttttgaaaacctcctatttagtgtgtgccgtttcagagagctaactggaagatacccacagaacataactgttgttagctacgatttcaaggaggaacgttttgcacaactgcacagaaccgcactcggattcccggaaggaaggttcttcttctcaggtacaccagctacgccttctgcaagggaggctgctctgaaaggcgaagcagctgtccgagctcagttccttgaagacccgtatggatgtctaggatctcttcatgtaaagaggctgaagcgggacccgttccaccgaaccattccataccctgccggttgcccagagctgaagggtctgttctcctattgtggcccggtgccttactctgggcacctcccttggactgagtagtagtgtaatgtacatcagccttggatggagctccccactgccacttcacgatgtccagcagccttgcactgaccttgttctgaattgagggagagtatatgttacactatcaacatatggatttttaacc

SEQ ID NO: 22766 - DNA, 428 bp, Zea mays
  Clone ID: LIB3591-108-C1_FLI
ccggcgttcggcggcctccccggcggcagcattcctggcagcagcattcccgggttcagcatgcccggcagcggcagcagcctacccgggttcagcttgcccggcagcggcagcatgcccctcttcggcggcggctccccgggcttcagcggcttcggcggcatgcccgggtcgcccaccgccggctccgtccccgagcacgccaacaagccctgaacgccaacaagcgtggtagtagagtggtgctactgttactgtagtacgtcgtcgtcttcatgcatgcgtggttcgtggtttcccctagctccatacgagcagtagttgggccttgcacgtaccgtacgtctagctagctatatatatatagcttgtgttctactgccttttagtttaattacctgcctgcattggagagttggatctgtttc

SEQ ID NO: 22767 - DNA, 752 bp, Zea mays
  Clone ID: LIB3591-108-C6_FLI
tcacctctcggtcgcgtgcgcttcacgcagcggctcagtcagtcctcacaccacgcatctgattctgatcgcaccgccgtcggcccaccgcttcagttggcagttgcgagtggctccaacaatccaccggcaccaacccagcgcggcgccaccggcgacccgtaccccctcccccggagagcgatggcgacggagctgacggcggcgcagctgcgcgcgtacgacggcaccgacccgtccaagcccatctacgtctccgtccggggcaaggtctacgacgtcacctccggccgcggcttctacggccccggcggcgcctacgccgtcttcgcgggccgcgaggccagccgcgccctcggcaagatgtccaaggacgaggccgacgtctccggggacctctccgggctcaccgacaaggagctcggcgtcctcgccgactgggagatcaagttccaggccaagtaccccgtcgtcgcccgactcgccgccgacgcctgaactcgtcagtctcggtctaaatttactctgtcctgcctcttgcggtgttcagtgctgtgcttgcttgcttgttgctagttgctttgctacccaataatctgaatggaaggacgtatgtgatgtgcctgctgaatagttcctagtccttgcatacactgctgtgctaccacatgacatgatgtactcgtgtgtgtgctttggttgttgtgtaattccatgaccatgatcagtaatctgaataaaaaatattggag
